United States Patent Application Publication US 2023/0026259 A1 - sequence listing, part 36

SEQ ID NO: 122770 - DNA, 3860 bp, Homo sapiens
  Payload ID: 4061
  Gene Symbol: CTAGE5
  Gene Name: CTAGE family, member 5
  Uniprot ID: O15320
  ENST ID: ENST00000280083
  CDS Start-End: 315-2729
tgcccggccgaaaccaaaccgaggggtggggtggcgaggacagggtacgtcgcaggcttgtgcgggtcgggctcggacctgcgctgcctcgggatgtaaagtataacaagagggtcgggatgggcagcgtaggcctgtgaggcctgcgggtgcccctgtcccccagctccccccgcagccggctccgcagtggtccactccggttgccgggtgcggattcgggttccggaccgaaggctgtgtgttctccgccgtttattgtggccccgacaggccggggttactgtggcgaccacgagagcagctttggcgctatggaggagcccggggttacccctcaaccgtatttggggctgctcctggaggagctacgcagggttgtggcagcactgcctgaaggtatgagaccagattctaatctttatggttttccatgggaattggtgatatgtgcagctgttgttggattttttgctgttctcttttttttgtggagaagttttagatcggttaggagtcggctttatgtgggacgagagaaaaagcttgctctaatgctttctggactaattgaagaaaaaagtaaactacttgaaaaatttagccttgttcaaaaagagtatgaaggctatgaagtagagtcatctttaaaggatgccagctttgagaaggaggcaacagaagcacaaagtttggaggcaacctgtgaaaagctgaacaggtccaattctgaacttgaggatgaaatactctgtctagaaaaagagttaaaagaagagaaatccaaacattctgaacaagatgaattgatggcggatatttcaaaaaggatacagtctctagaagatgagtcaaaatccctcaaatcacaagtagctgaagccaaaatgaccttcaagatatttcaaatgaatgaagaacgactgaagatagcaataaaagatgctttgaatgaaaattctcaacttcaggaaagccagaaacagcttttgcaagaagctgaagtatggaaagaacaagtgagtgaacttaataaacagaaagtaacatttgaagactccaaagtacatgcagaacaagttctaaatgataaagaaagtcacatcaagactctgactgaacgcttgttaaagatgaaagattgggctgctatgcttggagaagacataacggatgatgataacttggaattagaaatgaacagtgaatcggaaaatggtgcttacttagataatcctccaaaaggagctttgaagaaactgattcatgctgctaagttaaatgcttctttaaaaaccttagaaggagaaagaaaccaaatttatattcagttgtctgaagttgataaaacaaaggaagagcttacagagcatattaaaaatcttcagactgaacaagcatctttgcagtcagaaaacacacattttgaaaatgagaatcagaagcttcaacagaaacttaaagtaatgactgaattatatcaagaaaatgaaatgaaactccacaggaaattaacagtagaggaaaattatcggttagagaaagaagagaaactttctaaagtagatgaaaagatcagccatgccactgaagagctggagacctatagaaagcgagccaaagatcttgaagaagaattggagagaactattcattcttatcaagggcagattatttcccatgagaaaaaagcacatgataattggttggcagctcggaatgctgaaagaaacctcaatgatttaaggaaagaaaatgctcacaacagacaaaaattaactgaaacagagcttaaatttgaacttttagaaaaagatccttatgcactcgatgttccaaatacagcatttggcagagagcattccccatatggtccctcaccattgggttggccttcatctgaaacaagagcttttctctctcctccaactttgttggagggtccactcagactctcacctttgcttccagggggaggaggaagaggctcacgaggcccagggaatcctctggaccatcagattaccaatgaaagaggagaatcaagctgtgataggttaaccgatcctcatagggctccctctgacactgggtctctgtcacctccatgggaccaggaccgtaggatgatgtttcctccgccaggacaatcatatcctgattcagcccttcctccacaaaggcaagacagattttgttctaattctggtagactgtctggaccagcagaactcagaagttttaatatgccttctttggataaaatggatgggtcaatgccttcagaaatggaatccagtagaaatgataccaaagatgatcttggtaatttaaatgtgcctgattcatctctccctgctgaaaatgaagccactggccctggctttgttcctccacctcttgctccaatcagaggtccattgtttccagtggatgcaagaggcccattcttgagaagaggacctcctttccccccacctcctccaggagccatgtttggagcttctcgagattattttccaccaggggatttcccaggtccaccacctgctccatttgcaatgagaaatgtctatccaccgaggggttttcctccttaccttcccccaagacctggatttttccccccacccccacattctgaaggtagaagtgagttcccctcaggtttgattccaccttcaaatgagcctgctactgaacatccagaaccacagcaagaaacctgacaatatttttgctctcttcaaaagtaattttgactgatctcattttcagtttaagtaactgctgttacttaagtgattacacttttgctcaaattgaagcttaatggaattataattctcaggatagtattttgtaaataaagatgatttaaatatgaatcttatgagtaaattatttcaattttattttagacggtataactatttcaatttgattaatccactattatataaacaatagtgggagttttatatatgtaatctttcaggtggggaggctttaaattctgaagtctgtgtctttatgccaagaactgtatttactgtggttgtggacaaatgtgaaagtaactttatgcttaaataaattatagttgatttaaagatttgtttggcattgataataataaaatcagtagtttttctataactatggctctattaacttttttccttttaccaataactttgaggtgcaaaactcaaacttatgtgggtcttttgtgttcaattatgttatgacaaatgtgctctctttcttgtaaatagacatgagtggcccaaagcaacaaattaatacacttttaaaagtcaaaattgattatattttaaagataaccaggatattatctaatggtgaattgtagaattttgatcttcttattcactgagtttcttgcacggtttctttattgcttttttttccccgcctgttcttttgtaaggtatttactattttctgtggaggatattgagatgtactacaggataactgtagtgaatgatgtgtcatcattttgagctttggactcaatatctttagtgtttccctaaatcagatttgtaggtcatgttaagcttcttgcacattaatatgattatggaaggaaaggcagtgaagcataactaataaacatcataatacttaacgttgcccagttggttgttttagtattagacttttttttcaatgccaaaagatagaagattaaatattcttgaataaagcagtgatatatattggaacacttcaccccagcatttccccaggtgttgtttggaacactgatcttgtgaagtatttttgctccctttctattctaaccctcacctcaaaaaaaaaaaacaaaa

SEQ ID NO: 122771 - DNA, 4091 bp, Homo sapiens
  Payload ID: 4061
  Gene Symbol: CTAGE5
  Gene Name: CTAGE family, member 5
  Uniprot ID: O15320
  ENST ID: ENST00000341502
  CDS Start-End: 215-2530
gtataacaagagggtcgggatgggcagcgtaggcctgtgaggcctgcgggtgcccctgtcccccagctccccccgcagccggctccgcagtggtccactccggttgccgggtgcggattcgggttccggaccgaaggctgtgtgttctccgccgtttattgtggccccgacaggccggggttactgtggcgaccacgagagcagctttggcgctatggaggagcccggggttacccctcaaccgtatttggggctgctcctggaggagctacgcagggttgtggcagcactgcctgaaggtatgagaccagattctaatctttatggttttccatgggaattggtgatatgtgcagctgttgttggattttttgctgttctcttttttttgtggagaagttttagatcggttaggagtcggctttatgtgggacgagagaaaaagcttgctctaatgctttctggactaattgaagaaaaaagtaaactacttgaaaaatttagccttgttcaaaaagagtatgaaggctatgaagtagagtcatctttaaaggatgccagctttgagaaggaggcaacagaagcacaaagtttggaggcaacctgtgaaaagctgaacaggtccaattctgaacttgaggatgaaatactctgtctagaaaaagagttaaaagaagagaaatccaaacattctgaacaagatgaattgatggcggatatttcaaaaaggatacagtctctagaagatgagtcaaaatccctcaaatcacaagtagctgaagccaaaatgaccttcaagatatttcaaatgaatgaagaacgactgaagatagcaataaaagatgctttgaatgaaaattctcaacttcaggaaagccagaaacagcttttgcaagaagctgaagtatggaaagaacaagtgagtgaacttaataaacagaaagtaacatttgaagactccaaagtacatgcagaacaagttctaaatgataaagaaagtcacatcaagactctgactgaacgcttgttaaagatgaaagattgggctgctatgcttggagaagacataacggatgatgataacttggaattagaaatgaacagtgaatcggaaaatggtgcttacttagataatcctccaaaaggagctttgaagaaactgattcatgctgctaagttaaatgcttctttaaaaaccttagaaggagaaagaaaccaaatttatattcagttgtctgaagttgataaaacaaaggaagagcttacagagcatattaaaaatcttcagactgaacaagcatctttgcagtcagaaaacacacattttgaaaatgagaatcagaagcttcaacagaaacttaaagtaatgactgaattatatcaagaaaatgaaatgaaactccacaggaaattaacagtagaggaaaattatcggttagagaaagaagagaaactttctaaagtagatgaaaagatcagccatgccactgaagagctggagacctatagaaagcgagccaaagatcttgaagaagaattggagagaactattcattcttatcaagggcagattatttcccatgagaaaaaagcacatgataattggttggcagctcggaatgctgaaagaaacctcaatgatttaaggaaagaaaatgctcacaacagacaaaaattaactgaaacagagcttaaatttgaacttttagaaaaagatccttatgcactcgatgttccaaatacagcatttggcagagagcattccccatatggtccctcaccattgggttggccttcatctgaaacaagagcttttctctctcctccaactttgttggagggtccactcagactctcacctttgcttccagggggaggaggaagaggctcacgaggcccagggaatcctctggaccatcagattaccaatgaaagaggagaatcaagctgtgataggttaaccgatcctcatagggctccctctgacactgggtctctgtcacctccatgggaccaggaccgtaggatgatgtttcctccgccaggacaatcatatcctgattcagcccttcctccacaaaggcaagacagattttgttctaattctggtagactgtctggaccagcagaactcagaagttttaatatgccttctttggataaaatggatgggtcaatgccttcagaaatggaatccagtagaaatgataccaaagatgatcttggtaatttaaatgtgcctgattcatctctccctgctgaaaatgaagccactggccctggctttgttcctccacctcttgctccaatcagaggtccattgtttccagtggatgcaagaggcccattcttgagaagaggacctcctttccccccacctcctccaggagccatgtttggagcttctcgagattattttccaccaggggatttcccaggtccaccacctgctccatttgcaagcgcacgctctccgcccggggcaggagccccggcttcaggtaggggcctaggagggccccagaaatgaagccgaagcattggcggatgagactaacgagatctgtgacgactcgtatctgttcaagtggaacagaagccagaaggccctacagtgccgggtagctggcggcgggtaatcaaattgaagccttggcctaactgtctcggaggctgccatcttgcttggtgctcaacggaagccgactttcaagccttattgtttaaggaatacattttataagactatagctaccatagatagtatttcatctgatggatttgggaaaagtaaagtgaaaacctcaaaaggattcacccttctagatgccattcagagtatttgtgattcatgggaggagattaaagtatcaacattaactggactttgtaaggagtggattccatgtttaaggagtccattccatggaatccatggaatgattttgaggggtctaagacatcaggggaagaggtcaccgcatatgtggtggaagtagcaagagaactagaatcagaagtggagcctgacaatgtgactaaagtgctgctgcaatctcatgataaaacttgaacaaatgaggaattgcttctatggatcagtaaaaaaagtgtgtttttgagatggaatttactcctggtgaagatgctgtgaacattgttgaaataacacaatacttcagatattccatacacttagtagataaagctgccgcagagttcgagaggattgagtccaattttgaaagaagttctgtggggaaaaagctataaaacatcatggcatactacagagaaaatgtccacaaaaagaaggaatggatgcggcagatttcactgttgtctcatttaagaaattgccagagccacccagccttcatcaaccaccactgccatcagtcagcagctatcaacatggaggtgatatcctccaccaggaaaaagattatgactcgctgaaggctcagattattattagcattttttagcaatattttaaaagttaaggtctgtacattttttagacataatgctattgtacacctaatacatttcagtataaacataacttttatgtgcattgtgaaaccaaaaagtttgtgtgacttgctatattgcattattctctttattgtagtggtctggaactgaacctgcaatatctccaaggtagggctgtaccataatgccgagttcccccatctgctaatcatttattgccttatggaaaaacaattgttttcatcagaaattagaatttaactttggtcaatatacaaagctgttgataaagtaaggcatacccatgtagagtatttattgacagctatccaaacaatcttacattttttccttcatgtttttcttttcaaagaggcagttttattttgctgcattgttactgtaatttcaaactttatagtttaaacctgttttttcatgtctttccatatccctttaagtctaaattttatgtccttacctgatttccctctgaaaaatgttttccagagatgtagtgatattgtgatattaatgctaacccaaatgttaatatgccattcatttgagaaatatatttgagagtcttc

SEQ ID NO: 122772 - DNA, 2912 bp, Homo sapiens
  Payload ID: 4061
  Gene Symbol: CTAGE5
  Gene Name: CTAGE family, member 5
  Uniprot ID: O15320
  ENST ID: ENST00000341749
  CDS Start-End: 104-2482
gagtgcaggatatattagaatctgaaatctttctcaaggatatgaggtgcctggtagaactttatttacatgttaggaaattttaacatgagcttttcaagaaatggaattgaaaagtccagaggaagaggttgtggcagcactgcctgaaggtatgagaccagattctaatctttatggttttccatgggaattggtgatatgtgcagctgttgttggattttttgctgttctcttttttttgtggagaagttttagatcggttaggagtcggctttatgtgggacgagagaaaaagcttgctctaatgctttctggactaattgaagaaaaaagtaaactacttgaaaaatttagccttgttcaaaaagagtatgaaggctatgaagtagagtcatctttaaaggatgccagctttgagaaggaggcaacagaagcacaaagtttggaggcaacctgtgaaaagctgaacaggtccaattctgaacttgaggatgaaatactctgtctagaaaaagagttaaaagaagagaaatccaaacattctgaacaagatgaattgatggcggatatttcaaaaaggatacagtctctagaagatgagtcaaaatccctcaaatcacaagtagctgaagccaaaatgaccttcaagatatttcaaatgaatgaagaacgactgaagatagcaataaaagatgctttgaatgaaaattctcaacttcaggaaagccagaaacagcttttgcaagaagctgaagtatggaaagaacaagtgagtgaacttaataaacagaaagtaacatttgaagactccaaagtacatgcagaacaagttctaaatgataaagaaagtcacatcaagactctgactgaacgcttgttaaagatgaaagattgggctgctatgcttggagaagacataacggatgatgataacttggaattagaaatgaacagtgaatcggaaaatggtgcttacttagataatcctccaaaaggagctttgaagaaactgattcatgctgctaagttaaatgcttctttaaaaaccttagaaggagaaagaaaccaaatttatattcagttgtctgaagttgataaaacaaaggaagagcttacagagcatattaaaaatcttcagactgaacaagcatctttgcagtcagaaaacacacattttgaaaatgagaatcagaagcttcaacagaaacttaaagtaatgactgaattatatcaagaaaatgaaatgaaactccacaggaaattaacagtagaggaaaattatcggttagagaaagaagagaaactttctaaagtagatgaaaagatcagccatgccactgaagagctggagacctatagaaagcgagccaaagatcttgaagaagaattggagagaactattcattcttatcaagggcagattatttcccatgagaaaaaagcacatgataattggttggcagctcggaatgctgaaagaaacctcaatgatttaaggaaagaaaatgctcacaacagacaaaaattaactgaaacagagcttaaatttgaacttttagaaaaagatccttatgcactcgatgttccaaatacagcatttggcagagagcattccccatatggtccctcaccattgggttggccttcatctgaaacaagagcttttctctctcctccaactttgttggagggtccactcagactctcacctttgcttccagggggaggaggaagaggctcacgaggcccagggaatcctctggaccatcagattaccaatgaaagaggagaatcaagctgtgataggttaaccgatcctcatagggctccctctgacactgggtctctgtcacctccatgggaccaggaccgtaggatgatgtttcctccgccaggacaatcatatcctgattcagcccttcctccacaaaggcaagacagattttgttctaattctggtagactgtctggaccagcagaactcagaagttttaatatgccttctttggataaaatggatgggtcaatgccttcagaaatggaatccagtagaaatgataccaaagatgatcttggtaatttaaatgtgcctgattcatctctccctgctgaaaatgaagccactggccctggctttgttcctccacctcttgctccaatcagaggtccattgtttccagtggatgcaagaggcccattcttgagaagaggacctcctttccccccacctcctccaggagccatgtttggagcttctcgagattattttccaccaggggatttcccaggtccaccacctgctccatttgcaatgagaaatgtctatccaccgaggggttttcctccttaccttcccccaagacctggatttttccccccacccccacattctgaaggtagaagtgagttcccctcaggtttgattccaccttcaaatgagcctgctactgaacatccagaaccacagcaagaaacctgacaatatttttgctctcttcaaaagtaattttgactgatctcattttcagtttaagtaactgctgttacttaagtgattacacttttgctcaaattgaagcttaatggaattataattctcaggatagtattttgtaaataaagatgatttaaatatgaatcttatgagtaaattatttcaattttattttagacggtataactatttcaatttgattaatccactattatataaacaatagtgggagttttatatatgtaatctttcaggtggggaggctttaaattctgaagtctgtgtctttatgccaagaactgtatttactgtggttgtggacaaatgtgaaagtaactttatgcttaaataaattatagttgatttaaagatttgtttggcattgataataataaaatcagtagtttttctataa

SEQ ID NO: 122773 - DNA, 2762 bp, Homo sapiens
  Payload ID: 4061
  Gene Symbol: CTAGE5
  Gene Name: CTAGE family, member 5
  Uniprot ID: O15320
  ENST ID: ENST00000348007
  CDS Start-End: 47-2332
gacaggccggggttactgtggcgaccacgagagcagctttggcgctatggaggagcccggggttacccctcaaccgtatttggggctgctcctggaggagctacgcagggttgtggcagcactgcctgaaggtatgagaccagattctaatctttatggttttccatgggaattggtgatatgtgcagctgttgttggattttttgctgttctcttttttttgtggagaagttttagatcggttaggagtcggctttatgtgggacgagagaaaaagcttgctctaatgctttctggactaattgaagaaaaaagtaaactacttgaaaaatttagccttgttcaaaaagagtatgaaggctatgaagtagagtcatctttaaaggatgccagctttgagaaggaggcaacagaagcacaaagtttggaggcaacctgtgaaaagctgaacaggtccaattctgaacttgaggatgaaatactctgtctagaaaaagagttaaaagaagagaaatccaaacattctgaacaagatgaattgatggcggatatttcaaaaaggatacagtctctagaagatgagtcaaaatccctcaaatcacaagtagctgaagccaaaatgaccttcaagatatttcaaatgaatgaagaacgactgaagatagcaataaaagatgctttgaatgaaaattctcaacttcaggaaagccagaaacagcttttgcaagaagctgaagtatggaaagaacaagtgagtgaacttaataaacagaaagtaacatttgaagactccaaagtacatgcagaacaagttctaaatgataaagaaagtcacatcaagactctgactgaacgcttgttaaagatgaaagattgggctgctatgcttggagaagacataacggatgatgataacttggaattagaaatgaacagtgaatcggaaaatggtgcttacttagataatcctccaaaaggagctttgaagaaactgattcatgctgctaagttaaatgcttctttaaaaaccttagaaggagaaagaaaccaaatttatattcagttgtctgaagttgataaaacaaaggaagagcttacagagcatattaaaaatcttcagactgaacaagcatctttgcagtcagaaaacacacattttgaaaatgagaatcagaagcttcaacagaaacttaaagtaatgactgaattatatcaagaaaatgaaatgaaactccacaggaaattaacagtagaggaaaattatcggttagagaaagaagagaaactttctaaagtagatgaaaagatcagccatgccactgaagagctggagacctatagaaagcgagccaaagatcttgaagaagaattggagagaactattcattcttatcaagggcagattatttcccatgagaaaaaagcacatgataattggttggcagctcggaatgctgaaagaaacctcaatgatttaaggaaagaaaatgctcacaacagacaaaaattaactgaaacagagcttaaatttgaacttttagaaaaagatccttatgcactcgatgttccaaatacagcatttggcagaggctcacgaggcccagggaatcctctggaccatcagattaccaatgaaagaggagaatcaagctgtgataggttaaccgatcctcatagggctccctctgacactgggtctctgtcacctccatgggaccaggaccgtaggatgatgtttcctccgccaggacaatcatatcctgattcagcccttcctccacaaaggcaagacagattttgttctaattctggtagactgtctggaccagcagaactcagaagttttaatatgccttctttggataaaatggatgggtcaatgccttcagaaatggaatccagtagaaatgataccaaagatgatcttggtaatttaaatgtgcctgattcatctctccctgctgaaaatgaagccactggccctggctttgttcctccacctcttgctccaatcagaggtccattgtttccagtggatgcaagaggcccattcttgagaagaggacctcctttccccccacctcctccaggagccatgtttggagcttctcgagattattttccaccaggggatttcccaggtccaccacctgctccatttgcaatgagaaatgtctatccaccgaggggttttcctccttaccttcccccaagacctggatttttccccccacccccacattctgaaggtagaagtgagttcccctcaggtttgattccaccttcaaatgagcctgctactgaacatccagaaccacagcaagaaacctgacaatatttttgctctcttcaaaagtaattttgactgatctcattttcagtttaagtaactgctgttacttaagtgattacacttttgctcaaattgaagcttaatggaattataattctcaggatagtattttgtaaataaagatgatttaaatatgaatcttatgagtaaattatttcaattttattttagacggtataactatttcaatttgattaatccactattatataaacaatagtgggagttttatatatgtaatctttcaggtggggaggctttaaattctgaagtctgtgtctttatgccaagaactgtatttactgtggttgtggacaaatgtgaaagtaactttatgcttaaataaattatagttgatttaaagatttgtttggcattgataataataaaatcagtagtttttctataa

SEQ ID NO: 122774 - DNA, 3695 bp, Homo sapiens
  Payload ID: 4061
  Gene Symbol: CTAGE5
  Gene Name: CTAGE family, member 5
  Uniprot ID: O15320
  ENST ID: ENST00000396158
  CDS Start-End: 337-2766
cgcctccccgccttctcgcggctgcccggccgaaaccaaaccgaggggtggggtggcgaggacagggtacgtcgcaggcttgtgcgggtcgggctcggacctgcgctgcctcgggatgtaaagtataacaagagggtcgggatgggcagcgtaggcctgtgaggcctgcgggtgcccctgtcccccagctccccccgcagccggctccgcagtggtccactccggttgccgggtgcggattcgggttccggaccgaaggctgtgtgttctccgccgtttattgtggccccgacaggccggggttactgtggcgaccacgagagcagctttggcgctatggaggagcccggggttacccctcaaccgtatttggggctgctcctggaggagctacgcagggttgtggcagcactgcctgaaggtatgagaccagattctaatctttatggttttccatgggaattggtgatatgtgcagctgttgttggattttttgctgttctcttttttttgtggagaagttttagatcggttaggagtcggctttatgtgggacgagagaaaaagcttgctctaatgctttctggactaattgaagaaaaaagtaaactacttgaaaaatttagccttgttcaaaaagagtatgaaggctatgaagtagagtcatctttaaaggatgccagctttgagaaggaggcaacagaagcacaaagtttggaggtagaaaatcaaatggcaacctgtgaaaagctgaacaggtccaattctgaacttgaggatgaaatactctgtctagaaaaagagttaaaagaagagaaatccaaacattctgaacaagatgaattgatggcggatatttcaaaaaggatacagtctctagaagatgagtcaaaatccctcaaatcacaagtagctgaagccaaaatgaccttcaagatatttcaaatgaatgaagaacgactgaagatagcaataaaagatgctttgaatgaaaattctcaacttcaggaaagccagaaacagcttttgcaagaagctgaagtatggaaagaacaagtgagtgaacttaataaacagaaagtaacatttgaagactccaaagtacatgcagaacaagttctaaatgataaagaaagtcacatcaagactctgactgaacgcttgttaaagatgaaagattgggctgctatgcttggagaagacataacggatgatgataacttggaattagaaatgaacagtgaatcggaaaatggtgcttacttagataatcctccaaaaggagctttgaagaaactgattcatgctgctaagttaaatgcttctttaaaaaccttagaaggagaaagaaaccaaatttatattcagttgtctgaagttgataaaacaaaggaagagcttacagagcatattaaaaatcttcagactgaacaagcatctttgcagtcagaaaacacacattttgaaaatgagaatcagaagcttcaacagaaacttaaagtaatgactgaattatatcaagaaaatgaaatgaaactccacaggaaattaacagtagaggaaaattatcggttagagaaagaagagaaactttctaaagtagatgaaaagatcagccatgccactgaagagctggagacctatagaaagcgagccaaagatcttgaagaagaattggagagaactattcattcttatcaagggcagattatttcccatgagaaaaaagcacatgataattggttggcagctcggaatgctgaaagaaacctcaatgatttaaggaaagaaaatgctcacaacagacaaaaattaactgaaacagagcttaaatttgaacttttagaaaaagatccttatgcactcgatgttccaaatacagcatttggcagagagcattccccatatggtccctcaccattgggttggccttcatctgaaacaagagcttttctctctcctccaactttgttggagggtccactcagactctcacctttgcttccagggggaggaggaagaggctcacgaggcccagggaatcctctggaccatcagattaccaatgaaagaggagaatcaagctgtgataggttaaccgatcctcatagggctccctctgacactgggtctctgtcacctccatgggaccaggaccgtaggatgatgtttcctccgccaggacaatcatatcctgattcagcccttcctccacaaaggcaagacagattttgttctaattctggtagactgtctggaccagcagaactcagaagttttaatatgccttctttggataaaatggatgggtcaatgccttcagaaatggaatccagtagaaatgataccaaagatgatcttggtaatttaaatgtgcctgattcatctctccctgctgaaaatgaagccactggccctggctttgttcctccacctcttgctccaatcagaggtccattgtttccagtggatgcaagaggcccattcttgagaagaggacctcctttccccccacctcctccaggagccatgtttggagcttctcgagattattttccaccaggggatttcccaggtccaccacctgctccatttgcaatgagaaatgtctatccaccgaggggttttcctccttaccttcccccaagacctggatttttccccccacccccacattctgaaggtagaagtgagttcccctcaggtttgattccaccttcaaatgagcctgctactgaacatccagaaccacagcaagaaacctgacaatatttttgctctcttcaaaagtaattttgactgatctcattttcagtttaagtaactgctgttacttaagtgattacacttttgctcaaattgaagcttaatggaattataattctcaggatagtattttgtaaataaagatgatttaaatatgaatcttatgagtaaattatttcaattttattttagacggtataactatttcaatttgattaatccactattatataaacaatagtgggagttttatatatgtaatctttcaggtggggaggctttaaattctgaagtctgtgtctttatgccaagaactgtatttactgtggttgtggacaaatgtgaaagtaactttatgcttaaataaattatagttgatttaaagatttgtttggcattgataataataaaatcagtagtttttctataactatggctctattaacttttttccttttaccaataactttgaggtgcaaaactcaaacttatgtgggtcttttgtgttcaattatgttatgacaaatgtgctctctttcttgtaaatagacatgagtggcccaaagcaacaaattaatacacttttaaaagtcaaaattgattatattttaaagataaccaggatattatctaatggtgaattgtagaattttgatcttcttattcactgagtttcttgcacggtttctttattgcttttttttccccgcctgttcttttgtaaggtatttactattttctgtggaggatattgagatgtactacaggataactgtagtgaatgatgtgtcatcattttgagctttggactcaatatctttagtgtttccctaaatcagatttgtaggtcatgttaagcttcttgcacattaatatgattatggaaggaaaggcagtgaagcataactaataaacatcataatacttaa

SEQ ID NO: 122775 - DNA, 3071 bp, Homo sapiens
  Payload ID: 4061
  Gene Symbol: CTAGE5
  Gene Name: CTAGE family, member 5
  Uniprot ID: O15320
  ENST ID: ENST00000396165
  CDS Start-End: 585-2912
aaaggagaaatagcaatcttgagttctgaaaagctaggccgcattttggtcctgaaaaatcacttgctgtgaacttgggccagtttttgattttttaaatggcataacagttcgttgctacaagaggttacatcaggaaaatttcctaaggatttaagattttgttcatctattgagttcttttgggtgatttgtttaggaggaagtatctgctcctttttgagttgcttcaccaaagtacttgagtgagaaggcagaatataatgagaatgatcatgctggcaaggaagacatatatatgagatgggttatcctttacacctacgtcagctaaaaccgtctcctacgaacaaatccagcacttggcactttattcgacggtcctaaaaatagagtcctaaatttagaaggcaaggtgctacttttagctcctcttctcggaggaaaacagcacgcaccgcgccaggccaaggtccacggggatttgatttagcatttgggtaactggccgctaatggaactgaagacagctgggcctaacaagtgcccaggtgactcaggttgtggcagcactgcctgaaggtatgagaccagattctaatctttatggttttccatgggaattggtgatatgtgcagctgttgttggattttttgctgttctcttttttttgtggagaagttttagatcggttaggagtcggctttatgtgggacgagagaaaaagcttgctctaatgctttctggactaattgaagaaaaaagtaaactacttgaaaaatttagccttgttcaaaaagagtatgaaggctatgaagtagagtcatctttaaaggatgccagctttgagaaggaggcaacagaagcacaaagtttggaggcaacctgtgaaaagctgaacaggtccaattctgaacttgaggatgaaatactctgtctagaaaaagagttaaaagaagagaaatccaaacattctgaacaagatgaattgatggcggatatttcaaaaaggatacagtctctagaagatgagtcaaaatccctcaaatcacaagtagctgaagccaaaatgaccttcaagatatttcaaatgaatgaagaacgactgaagatagcaataaaagatgctttgaatgaaaattctcaacttcaggaaagccagaaacagcttttgcaagaagctgaagtatggaaagaacaagtgagtgaacttaataaacagaaagtaacatttgaagactccaaagtacatgcagaacaagttctaaatgataaagaaagtcacatcaagactctgactgaacgcttgttaaagatgaaagattgggctgctatgcttggagaagacataacggatgatgataacttggaattagaaatgaacagtgaatcggaaaatggtgcttacttagataatcctccaaaaggagctttgaagaaactgattcatgctgctaagttaaatgcttctttaaaaaccttagaaggagaaagaaaccaaatttatattcagttgtctgaagttgataaaacaaaggaagagcttacagagcatattaaaaatcttcagactgaacaagcatctttgcagtcagaaaacacacattttgaaaatgagaatcagaagcttcaacagaaacttaaagtaatgactgaattatatcaagaaaatgaaatgaaactccacaggaaattaacagtagaggaaaattatcggttagagaaagaagagaaactttctaaagtagatgaaaagatcagccatgccactgaagagctggagacctatagaaagcgagccaaagatcttgaagaagaattggagagaactattcattcttatcaagggcagattatttcccatgagaaaaaagcacatgataattggttggcagctcggaatgctgaaagaaacctcaatgatttaaggaaagaaaatgctcacaacagacaaaaattaactgaaacagagcttaaatttgaacttttagaaaaagatccttatgcactcgatgttccaaatacagcatttggcagagagcattccccatatggtccctcaccattgggttggccttcatctgaaacaagagcttttctctctcctccaactttgttggagggtccactcagactctcacctttgcttccagggggaggaggaagaggctcacgaggcccagggaatcctctggaccatcagattaccaatgaaagaggagaatcaagctgtgataggttaaccgatcctcatagggctccctctgacactgggtctctgtcacctccatgggaccaggaccgtaggatgatgtttcctccgccaggacaatcatatcctgattcagcccttcctccacaaaggcaagacagattttgttctaattctggtagactgtctggaccagcagaactcagaagttttaatatgccttctttggataaaatggatgggtcaatgccttcagaaatggaatccagtagaaatgataccaaagatgatcttggtaatttaaatgtgcctgattcatctctccctgctgaaaatgaagccactggccctggctttgttcctccacctcttgctccaatcagaggtccattgtttccagtggatgcaagaggcccattcttgagaagaggacctcctttccccccacctcctccaggagccatgtttggagcttctcgagattattttccaccaggggatttcccaggtccaccacctgctccatttgcaatgagaaatgtctatccaccgaggggttttcctccttaccttcccccaagacctggatttttccccccacccccacattctgaaggtagaagtgagttcccctcaggtttgattccaccttcaaatgagcctgctactgaacatccagaaccacagcaagaaacctgacaatatttttgctctcttcaaaagtaattttgactgatctcattttcagtttaagtaactgctgttacttaagtgattacacttttgctcaaattgaagcttaatggaattataattctcaggatagtattttgtaaataaagatgatttaaatatgaa

SEQ ID NO: 122776 - DNA, 3441 bp, Homo sapiens
  Payload ID: 4061
  Gene Symbol: CTAGE5
  Gene Name: CTAGE family, member 5
  Uniprot ID: O15320
  ENST ID: ENST00000553352
  CDS Start-End: 733-3060
caaaagccttaggctgtgttgtgctgaaggtctgctgtggggagaagtaatgtggaaaggccatggtcagaagatcagggtctttggaggagataatataaataattacccttttttgagcacctgtctggcatgttcaaacagcattattctcattacacttaagagaagggacgcacagaggtagggtggggagattcaaactccaaacccaaatctctatcagtggtgttcaaaacttgtttttattttttgagacaggtcttactttgttgcccaggctggctttgaatcaaactttttatttttaaagctgcaaattgattttttcttcctgtagggaaattgtatattggggaactgattatactttacagataaaacctgaactggttgaaatcagggtaagagtacctgaaccctaggtcactcagtttctttctttggccttctcttattctcatccttggaaactttaagtcacctctgtagaactccagtttgaagataattgcatttcaccatactgctgttctttacttggcgatagtgattgaaagttgacaaaaaaatgtactctgatactttctgtttggtgttagtctggcagcccattttgtgttgaccacataaacttgtacctatgtttgtaatcaatatttttaccaaaagtacatttttaagaacttacttttctttatcttgaaggttgtggcagcactgcctgaaggtatgagaccagattctaatctttatggttttccatgggaattggtgatatgtgcagctgttgttggattttttgctgttctcttttttttgtggagaagttttagatcggttaggagtcggctttatgtgggacgagagaaaaagcttgctctaatgctttctggactaattgaagaaaaaagtaaactacttgaaaaatttagccttgttcaaaaagagtatgaaggctatgaagtagagtcatctttaaaggatgccagctttgagaaggaggcaacagaagcacaaagtttggaggcaacctgtgaaaagctgaacaggtccaattctgaacttgaggatgaaatactctgtctagaaaaagagttaaaagaagagaaatccaaacattctgaacaagatgaattgatggcggatatttcaaaaaggatacagtctctagaagatgagtcaaaatccctcaaatcacaagtagctgaagccaaaatgaccttcaagatatttcaaatgaatgaagaacgactgaagatagcaataaaagatgctttgaatgaaaattctcaacttcaggaaagccagaaacagcttttgcaagaagctgaagtatggaaagaacaagtgagtgaacttaataaacagaaagtaacatttgaagactccaaagtacatgcagaacaagttctaaatgataaagaaagtcacatcaagactctgactgaacgcttgttaaagatgaaagattgggctgctatgcttggagaagacataacggatgatgataacttggaattagaaatgaacagtgaatcggaaaatggtgcttacttagataatcctccaaaaggagctttgaagaaactgattcatgctgctaagttaaatgcttctttaaaaaccttagaaggagaaagaaaccaaatttatattcagttgtctgaagttgataaaacaaaggaagagcttacagagcatattaaaaatcttcagactgaacaagcatctttgcagtcagaaaacacacattttgaaaatgagaatcagaagcttcaacagaaacttaaagtaatgactgaattatatcaagaaaatgaaatgaaactccacaggaaattaacagtagaggaaaattatcggttagagaaagaagagaaactttctaaagtagatgaaaagatcagccatgccactgaagagctggagacctatagaaagcgagccaaagatcttgaagaagaattggagagaactattcattcttatcaagggcagattatttcccatgagaaaaaagcacatgataattggttggcagctcggaatgctgaaagaaacctcaatgatttaaggaaagaaaatgctcacaacagacaaaaattaactgaaacagagcttaaatttgaacttttagaaaaagatccttatgcactcgatgttccaaatacagcatttggcagagagcattccccatatggtccctcaccattgggttggccttcatctgaaacaagagcttttctctctcctccaactttgttggagggtccactcagactctcacctttgcttccagggggaggaggaagaggctcacgaggcccagggaatcctctggaccatcagattaccaatgaaagaggagaatcaagctgtgataggttaaccgatcctcatagggctccctctgacactgggtctctgtcacctccatgggaccaggaccgtaggatgatgtttcctccgccaggacaatcatatcctgattcagcccttcctccacaaaggcaagacagattttgttctaattctggtagactgtctggaccagcagaactcagaagttttaatatgccttctttggataaaatggatgggtcaatgccttcagaaatggaatccagtagaaatgataccaaagatgatcttggtaatttaaatgtgcctgattcatctctccctgctgaaaatgaagccactggccctggctttgttcctccacctcttgctccaatcagaggtccattgtttccagtggatgcaagaggcccattcttgagaagaggacctcctttccccccacctcctccaggagccatgtttggagcttctcgagattattttccaccaggggatttcccaggtccaccacctgctccatttgcaatgagaaatgtctatccaccgaggggttttcctccttaccttcccccaagacctggatttttccccccacccccacattctgaaggtagaagtgagttcccctcaggtttgattccaccttcaaatgagcctgctactgaacatccagaaccacagcaagaaacctgacaatatttttgctctcttcaaaagtaattttgactgatctcattttcagtttaagtaactgctgttacttaagtgattacacttttgctcaaattgaagcttaatggaattataattctcaggatagtattttgtaaataaagatgatttaaatatgaatcttatgagtaaattatttcaattttattttagacggtataactatttcaatttgattaatccactattatataaacaatagtgggagttttatatatgtaatctttcaggtggggaggctttaaattctgaagtctgtgtctttatgccaagaactgtatttactgtggttgtggacaaatgtgaaagtaactttatgcttaaataaattatagttgattt

SEQ ID NO: 122777 - DNA, 2869 bp, Homo sapiens
  Payload ID: 4061
  Gene Symbol: CTAGE5
  Gene Name: CTAGE family, member 5
  Uniprot ID: O15320
  ENST ID: ENST00000557038
  CDS Start-End: 269-2443
gaatctgaaatctttctcaaggatatgaggtgcctggtagaactttatttacatgttaggaaattttaacatgagcttttcaagaaatggaattgaaaagtccagaggaagaggttgtggcagcactgcctgaaggtatgagaccagattctaatctttatggttttccatgggaattggtgatatgtgcagctgttgttggattttttgctgttctcttttttttgtggagaagttttagatcggacgagagaaaaagcttgctctaatgctttctggactaattgaagaaaaaagtaaactacttgaaaaatttagccttgttcaaaaagagtatgaaggctatgaagtagagtcatctttaaaggatgccagctttgagaaggaggcaacagaagcacaaagtttggaggcaacctgtgaaaagctgaacaggtccaattctgaacttgaggatgaaatactctgtctagaaaaagagttaaaagaagagaaatccaaacattctgaacaagatgaattgatggcggatatttcaaaaaggatacagtctctagaagatgagtcaaaatccctcaaatcacaagtagctgaagccaaaatgaccttcaagatatttcaaatgaatgaagaacgactgaagatagcaataaaagatgctttgaatgaaaattctcaacttcaggaaagccagaaacagcttttgcaagaagctgaagtatggaaagaacaagtgagtgaacttaataaacagaaagtaacatttgaagactccaaagtacatgcagaacaagttctaaatgataaagaaagtcacatcaagactctgactgaacgcttgttaaagatgaaagattgggctgctatgcttggagaagacataacggatgatgataacttggaattagaaatgaacagtgaatcggaaaatggtgcttacttagataatcctccaaaaggagctttgaagaaactgattcatgctgctaagttaaatgcttctttaaaaaccttagaaggagaaagaaaccaaatttatattcagttgtctgaagttgataaaacaaaggaagagcttacagagcatattaaaaatcttcagactgaacaagcatctttgcagtcagaaaacacacattttgaaaatgagaatcagaagcttcaacagaaacttaaagtaatgactgaattatatcaagaaaatgaaatgaaactccacaggaaattaacagtagaggaaaattatcggttagagaaagaagagaaactttctaaagtagatgaaaagatcagccatgccactgaagagctggagacctatagaaagcgagccaaagatcttgaagaagaattggagagaactattcattcttatcaagggcagattatttcccatgagaaaaaagcacatgataattggttggcagctcggaatgctgaaagaaacctcaatgatttaaggaaagaaaatgctcacaacagacaaaaattaactgaaacagagcttaaatttgaacttttagaaaaagatccttatgcactcgatgttccaaatacagcatttggcagagagcattccccatatggtccctcaccattgggttggccttcatctgaaacaagagcttttctctctcctccaactttgttggagggtccactcagactctcacctttgcttccagggggaggaggaagaggctcacgaggcccagggaatcctctggaccatcagattaccaatgaaagaggagaatcaagctgtgataggttaaccgatcctcatagggctccctctgacactgggtctctgtcacctccatgggaccaggaccgtaggatgatgtttcctccgccaggacaatcatatcctgattcagcccttcctccacaaaggcaagacagattttgttctaattctggtagactgtctggaccagcagaactcagaagttttaatatgccttctttggataaaatggatgggtcaatgccttcagaaatggaatccagtagaaatgataccaaagatgatcttggtaatttaaatgtgcctgattcatctctccctgctgaaaatgaagccactggccctggctttgttcctccacctcttgctccaatcagaggtccattgtttccagtggatgcaagaggcccattcttgagaagaggacctcctttccccccacctcctccaggagccatgtttggagcttctcgagattattttccaccaggggatttcccaggtccaccacctgctccatttgcaatgagaaatgtctatccaccgaggggttttcctccttaccttcccccaagacctggatttttccccccacccccacattctgaaggtagaagtgagttcccctcaggtttgattccaccttcaaatgagcctgctactgaacatccagaaccacagcaagaaacctgacaatatttttgctctcttcaaaagtaattttgactgatctcattttcagtttaagtaactgctgttacttaagtgattacacttttgctcaaattgaagcttaatggaattataattctcaggatagtattttgtaaataaagatgatttaaatatgaatcttatgagtaaattatttcaattttattttagacggtataactatttcaatttgattaatccactattatataaacaatagtgggagttttatatatgtaatctttcaggtggggaggctttaaattctgaagtctgtgtctttatgccaagaactgtatttactgtggttgtggacaaatgtgaaagtaactttatgcttaaataaattatagttgatttaaagatttgtttggcattgataataataaaatcagtagtttttct

SEQ ID NO: 122778 - DNA, 527 bp, Homo sapiens
  Payload ID: 4061
  Gene Symbol: CTAGE5
  Gene Name: CTAGE family, member 5
  ENST ID: ENST00000554392
  CDS Start-End: 112-527
aaacagaagagtgcaggatatattagaatctgaaatctttctcaaggatatgaggtgcctggtagaactttatttacatgttaggaaattttaacatgagcttttcaagaaatggaattgaaaagtccagaggaagaggttgtggcagcactgcctgaaggtatgagaccagattctaatctttatggttttccatgggaattggtgatatgtgcagctgttgttggattttttgctgttctcttttttttgtggagaagttttagatcggttaggagtcggctttatgtgggacgagagaaaaagcttgctctaatgctttctggactaattgaagaaaaaagtaaactacttgaaaaatttagccttgttcaaaaagagtatgaaggctatgaagtagagtcatctttaaaggatgccagctttgagaaggaggcaacagaagcacaaagtttggagtttgttgaaggatcacaaatatcagaggcaacctgtgaaaagctgaacaggtccaattctgaacttga

SEQ ID NO: 122779 - DNA, 558 bp, Homo sapiens
  Payload ID: 4061
  Gene Symbol: CTAGE5
  Gene Name: CTAGE family, member 5
  ENST ID: ENST00000555716
  CDS Start-End: 105-558
agagtgcaggatatattagaatctgaaatctttctcaaggatatgaggtgcctggtagaactttatttacatgttaggaaattttaacatgagcttttcaagaaatggaattgaaaagtccagaggaagaggttgtggcagcactgcctgaaggtatgagaccagattctaatctttatggttttccatgggaattggtgatatgtgcagctgttgttggattttttgctgttctcttttttttgtggagaagttttagatcggttaggagtcggctttatgtgggacgagagaaaaagcttgctctaatgctttctggactaattgaagaaaaaagtaaactacttgaaaaatttagccttgttcaaaaagaggcaacctgtgaaaagctgaacaggtccaattctgaacttgaggatgaaatactctgtctagaaaaagagttaaaagaagagaaatccaaacattctgaacaagatgaattgatggcggatatttcaaaaaggatacagtctctagaagatgagtcaaaatccctcaaatcacaagtagctgaag

SEQ ID NO: 122780 - DNA, 2526 bp, Homo sapiens
  Payload ID: 4061
  Gene Symbol: CTAGE5
  Gene Name: CTAGE family, member 5
  Uniprot ID: O15320
  ENST ID: ENST00000556148
  CDS Start-End: 180-2369
cccgacaggccggggttactgtggcgaccacgagagcagctttggcgctatggaggagcccggggttacccctcaaccgtatttggggctgctcctggaggagctacgcagggttgtggcagcactgcctgaaggttaggagtcggctttatgtgggacgagagaaaaagcttgctctaatgctttctggactaattgaagaaaaaagtaaactacttgaaaaatttagccttgttcaaaaagagtatgaaggctatgaagtagagtcatctttaaaggatgccagctttgagaaggaggcaacagaagcacaaagtttggaggtagaaaatcaaatggcaacctgtgaaaagctgaacaggtccaattctgaacttgaggatgaaatactctgtctagaaaaagagttaaaagaagagaaatccaaacattctgaacaagatgaattgatggcggatatttcaaaaaggatacagtctctagaagatgagtcaaaatccctcaaatcacaagtagctgaagccaaaatgaccttcaagatatttcaaatgaatgaagaacgactgaagatagcaataaaagatgctttgaatgaaaattctcaacttcaggaaagccagaaacagcttttgcaagaagctgaagtatggaaagaacaagtgagtgaacttaataaacagaaagtaacatttgaagactccaaagtacatgcagaacaagttctaaatgataaagaaagtcacatcaagactctgactgaacgcttgttaaagatgaaagattgggctgctatgcttggagaagacataacggatgatgataacttggaattagaaatgaacagtgaatcggaaaatggtgcttacttagataatcctccaaaaggagctttgaagaaactgattcatgctgctaagttaaatgcttctttaaaaaccttagaaggagaaagaaaccaaatttatattcagttgtctgaagttgataaaacaaaggaagagcttacagagcatattaaaaatcttcagactgaacaagcatctttgcagtcagaaaacacacattttgaaaatgagaatcagaagcttcaacagaaacttaaagtaatgactgaattatatcaagaaaatgaaatgaaactccacaggaaattaacagtagaggaaaattatcggttagagaaagaagagaaactttctaaagtagatgaaaagatcagccatgccactgaagagctggagacctatagaaagcgagccaaagatcttgaagaagaattggagagaactattcattcttatcaagggcagattatttcccatgagaaaaaagcacatgataattggttggcagctcggaatgctgaaagaaacctcaatgatttaaggaaagaaaatgctcacaacagacaaaaattaactgaaacagagcttaaatttgaacttttagaaaaagatccttatgcactcgatgttccaaatacagcatttggcagagagcattccccatatggtccctcaccattgggttggccttcatctgaaacaagagcttttctctctcctccaactttgttggagggtccactcagactctcacctttgcttccagggggaggaggaagaggctcacgaggcccagggaatcctctggaccatcagattaccaatgaaagaggagaatcaagctgtgataggttaaccgatcctcatagggctccctctgacactgggtctctgtcacctccatgggaccaggaccgtaggatgatgtttcctccgccaggacaatcatatcctgattcagcccttcctccacaaaggcaagacagattttgttctaattctggtagactgtctggaccagcagaactcagaagttttaatatgccttctttggataaaatggatgggtcaatgccttcagaaatggaatccagtagaaatgataccaaagatgatcttggtaatttaaatgtgcctgattcatctctccctgctgaaaatgaagccactggccctggctttgttcctccacctcttgctccaatcagaggtccattgtttccagtggatgcaagaggcccattcttgagaagaggacctcctttccccccacctcctccaggagccatgtttggagcttctcgagattattttccaccaggggatttcccaggtccaccacctgctccatttgcaatgagaaatgtctatccaccgaggggttttcctccttaccttcccccaagacctggatttttccccccacccccacattctgaaggtagaagtgagttcccctcaggtttgattccaccttcaaatgagcctgctactgaacatccagaaccacagcaagaaacctgacaatatttttgctctcttcaaaagtaattttgactgatctcattttcagtttaagtaactgctgttacttaagtgattacacttttgctcaaattgaagcttaatggaattataattctcaggatagtattttgtaaataaagatgatttaaatatg

SEQ ID NO: 122781 - DNA, 2608 bp, Homo sapiens
  Payload ID: 4062
  Gene Symbol: CTAGE6
  Gene Name: CTAGE family, member 6
  Uniprot ID: Q86UF2
  ENST ID: ENST00000470691
  CDS Start-End: 39-2372
agtgttactgcggtgaccgccagagcagcctcgacgctatggaggagcctggtgctacccctcagccctacctggggctggtcctggaggagctacgcagagttgtggcagcactacctgagagtatgagaccagatgagaatccttatggttttccatcggaactggtggtatgtgcagctgttattggattttttgttgttctcctttttttgtggagaagttttagatcggttaggagtcggctttacgtgggaagagagcaaaaacttggtgcaacgctttctggactaattgaagaaaaatgtaaactacttgaaaagtttagccttattcaaaaagagtatgaaggctatgaagtagagtcatctttagaggatgccagctttgagaaggcggcagcagaagaagcacgaagtttggaggcaacctgtgaaaagctgaacaggtccaattctgaacttgaggatgaaatcctctgtctagaaaaagacttaaaagaagagaaatctaaacattctcaacaagatgaattgatggcggatatttcaaaaagtatacagtctctagaagatgagtcaaaatccctcaaatcacaaatagctgaagccaaaatcatctgcaagacatttaaaatgagtgaagaacgacgggctatagcaataaaagatgctttgaatgaaaattctcaacttcagacaagccataaacagctttttcagcaagaagctgaagtatggaaaggagaagtgagtgaacttaataaacagaaaataacatttgaagactccaaagtacacgcagaacaagttctgaatgataaagaaaatcacatcaagaccctgactggacacttgccaatgatgaaagatcaggctgctgtgcttgaagaagacacaacggatgatgataacctggaattagaagtgaacagtcaatgggaaaatggtgctaacttagatgatcctctgaaaggagctttgaagaaactgattcatgctgctaagttaaatgtttctttaaaaagcttagaaggagaaagaaaccacattattattcagttatctgaagtggacaaaacaaaggaagagcttacagagcatattaaaaatcttcagactcaacaagaatctttgcaatcagaaaacatatattttgaaagtgagaatcagaagcttcaacagaaacttaaaataatgactgaattctatcaagaagatgaaatgaaactctataggaaattaacagtggaggaaaattaccgaatagaggaagaagagaagctttctaaagtggaagaaaagctcagccgtgccactgaacagctggagacctatagaaagctagccaaagatcttgaagaagaattggagagaactgttcatttttatcaaaagcaggttatttcctacgagaaaagaggacatgataattggttggcagctcggactgctgaaagaaacctcagtgatttaaggaaagaaaatgctcacaacaaacaaaaattaactgaaacagagttgaaatttgaacttttagaaaaagatcctaatgcacttgatgtttcaaatacagcatttggcagagagcatgccccgaatggtcccgcaccattgggtcagcgttcatctgaaacgagagcttttctctctcctcaaactttgttggaggatccactgggactctcacctgtgcttccggagggaggaggaagaggcccaagaggcccagggaatcccctggaccatcagattaccaatgaaagaggagaaccaagctgtgacaggttaaccgatcctcacagggctccttctgacactgggtccctgtcatctccggtggaacaggactgtaagatgatgtttcctccaccaggacaatcatatcctgattcagctcttcctcctcaaagggaagacagattttattctaattctgaaagactgtctggatcagcagaacccagaagttttaaaatgacttctttggataaaatggatgggtcaatgccttcagaaatggaatccagtagaaatgatgccaaagatgatcttggtaatttaaatgtgcctgattcatctctccctgctgaaaatgaagcaactggccctggctttattcctccacctcttgctccagtcagaggaccattgtttccagtggatacaaggggcccgttcatgagaagaggacctcctttccccccacctcctccaggaaccatgtttggagcttctcgaggttattttccaccaagggatttcccaggtccaccacatgctccatttgcaatgagaaacatctacccaccgaggggtttacctccttactttcacccgagacctggattttaccccaaccccgcattctgaaggtagaagcgagttcccttcaggattgattccgcctttaatgctactgaacatccaggaccacaaaagaaacctgacaatattgttgctttcttcaaaagtaattttgactgatctcattttcagtttaagtaactgctattacttaagtgattgcacttttgctcaaattgaagtttaatggaattataattctcaggatagtattttgtaaataaagatgttttaaataggaa

SEQ ID NO: 122782 - DNA, 2588 bp, Homo sapiens
  Payload ID: 4063
  Gene Symbol: CTAGE8
  Gene Name: CTAGE family, member 8
  Uniprot ID: P0CG41
  ENST ID: ENST00000487179
  CDS Start-End: 39-2372
agtgttactgcggtgaccgccagagcagcctcgacgctatggaggagcctggtgctacccctcagccctacctggggctggtcctggaggagctacgcagagttgtggcagcactacctgagagtatgagaccagatgagaatccttatggttttccatcggaactggtggtatgtgcagctgttattggattttttgttgttctcctttttttgtggagaagttttagatcggttaggagtcggctttacgtgggaagagagcaaaaacttggtgcaacgctttctggactaattgaagaaaaatgtaaactacttgaaaagtttagccttattcaaaaagagtatgaaggctatgaagtagagtcatctttagaggatgccagctttgagaaggcggcagcagaagaagcacgaagtttggaggcaacctgtgaaaagctgaacaggtccaattctgaacttgaggatgaaatcctctgtctagaaaaagacttaaaagaagagaaatctaaacattctcaacaagatgaattgatggcggatatttcaaaaagtatacagtctctagaagatgagtcaaaatccctcaaatcacaaatagctgaagccaaaatcatctgcaagacatttaaaatgagtgaagaacgacgggctatagcaataaaagatgctttgaatgaaaattctcaacttcagacaagccataaacagctttttcagcaagaagctgaagtatggaaaggacaagtgagtgaacttaataaacagaaaataacatttgaagactccaaagtgcacgcagaacaagttctgaatgataaagaaaatcacatcaagaccctgactggacacttgccaatgatgaaagatcaggctgctgtgcttgaagaagacacaacggatgatgataacctggaattagaagtgaacagtcaatgggaaaatggtgctaacttagatgatcctctgaaaggagctttgaagaaactgattcatgctgctaagttaaatgtttctttaaaaagcttagaaggagaaagaaaccacattattattcagttatctgaagtggacaaaacaaaggaagagcttacagagcatattaaaaatcttcagactcaacaagcatctttgcaatcagaaaacatatattttgaaagtgagaatcagaagcttcaacagaaacttaaaataatgactgaattctatcaagaaaatgaaatgaaactctacaggaaattaacagtggaggaaaattaccgaatagaggaagaagagaagctttctagagtggaagaaaagatcagccgtgccactgaagggctggagacctatagaaagctagccaaagatcttgaagaagaattggagagaactgttcatttttatcaaaagcaggttatttcctacgagaaaagaggacatgataattggttggcagctcggactgctgaaagaaacctcagtgatttaaggaaagaaaatgctcacaacaaacaaaaattaactgaaacagagttgaaatttgaacttttagaaaaagatcctaatgcactcgatgtttcaaatacagcatttggcagagagcattccccatgtagtccctcaccattgggtcggccttcatctgaaacgagagcttttccctctcctcaaactttgttggaggatccactcagactctcacctgtgcttccagggggaggaggaagaggcccaagcagcccagggaatcccctggaccatcagattaccaatgaaagaggagaaccaagctatgacaggttaatcgatcctcacagggctccttctgacactgggtccctgtcatctccggtggaacaggaccgtaggatgatgtttcctccaccagggcaatcatatcctgattcaactcttcctccacaaagggaagacagattttattctaattctgaaagactgtctggaccagcagaacccagaagttttaaaatgacttctttggataaaatggataggtcaatgccttcagaaatggaatccagtagaaatgatgccaaagatgatcttggtaatttaaatgtgcctgattcatctctccctgctgaaaatgaagcaactggccctggctttattcctccacctcttgctccagtcagaggaccattgtttccagtggatacaaggggcccgttcatgagaagaggacctcctttccccccacctcctccaggaaccatgtttggagcttctcgaggttattttccaccaagggatttcccaggtccaccacatgctccatttgcaatgagaaacatctatccaccgaggggtttacctccttaccttcatccgagacctggattttaccccaaccccacattctgaaggtagaagcgagttcccttcaggattgattccgccttcaaaggagcctgctactggacatccagaaccacagcaagaaacctgacaatattgttgctttcttcaaaagtaattttgactgatctcattttcagtttaagtaactgctgttacttaagtgattgcacttttctcaaattgaagtttaatggaataatagttctcaggatagtattt

SEQ ID NO: 122783 - DNA, 2334 bp, Homo sapiens
  Payload ID: 4064
  Gene Symbol: CTAGE9
  Gene Name: CTAGE family, member 9
  Uniprot ID: A4FU28
  ENST ID: ENST00000314099
  CDS Start-End: 1-2334
atggaggagcctggtgctacccctcagccctacctggggctggtcctggaggagctaggcagagttgtggcagcactacctgagagtatgagaccagatgagaatccttatggttttccatcggaactggtggtatgtgcagctgttattggattttttgttgttctcctttttttgtggagaagttttagatcggttaggagtcggctttatgtgggaagagagcaaaaacttggtgcaacgctttctggactaattgaagaaaaatgtaaactacttgaaaagtttagccttattcaaaaagagtatgaaggctatgaagtagagtcatctttagaggatgccagctttgagaaggcggcagcagaagaagcacgaagtttggaggcaacctgtgaaaagctgagcaggtccaattctgaacttgaggatgaaatcctctgtctagaaaaagacttaaaagaagagaaatctaaacattctcaacaagatgaattgatggcggatatttcaaaaagtatacagtctctagaagatgagtcaaaatccctcaaatcacaaatagctgaagccaaaatcatctgcaagacatttaaaatgagtgaagaacgacgggctatagcaataaaagatgctttgaatgaaaattctcaacttcagacaagccataaacagctttttcagcaagaagctgaagtatggaaaggacaagtgagtgaacttaataaacagaaaataacatttgaagactccaaagtacacgcagaacaagttctgaatgataaagaaaatcacatcaagaccctgactggacacttgccaatgatgaaagatcaggctgctgtgcttgaagaagacacaacggatgatgataacctggaattaaaagtgaacagtcaatgggaaaatggtgctaacttagatgatcctccgaaaggagctttgaagaaactgattcatgctgctaagttaaatgtttctttaaaaagcttagaaggagaaagaaaccacattattattcagttatctgaagtggacaaaacaaaggaagagcttacagagcatattaaaaatcttcagactcaacaagcatctttgcaatcagaaaacatatattttgaaagtgagaatcagaagcttcaacagaaacttaaaataatgactgaattctatcaagaaaatgaaatgaaactctacaggaaattaacagtggaggaaaattaccgaatagaggaagaagagaagctttctagagtggaagaaaagatcagccatgccactgaagagctggagacctatagaaagctagccaaagatcttgaagaagaattggagagaactgttcatttttatcaaaagcaggttatttcctacgagaaaagaggacatgataattggttggcagctcggactgctgaaagaaacctcagtgatttaaggaaagaaaatgctcacaacaaacaaaaattaactgaaagagagttgaaatttgaacttttagaaaaagatcctaatgcactcgatgtttcaaatacagcatttggcagagagcattccccatgtagtccctcaccattgggtcggccttcatctgaaacgagagcttttccctctcctcaaactttgttggaggatccactcagactctcacctgtgcttccagggggaggaggaagaggcccaagcagcccagggaatcccctggaccatcagattaccaatgaaagaggagaaccaagctatgacaggttaatcgatcctcacagggctccttctgacactgggtccctgtcatctccggtggaacaggaccgtaggatgatgtttcctccaccagggcaatcatatcctgattcaactcttcctccacaaagggaagacagattttattctaattctgaaagactgtctggaccagcagaacccagaagttttaaaatgacttctttggataaaatggataggtcaatgccttcagaaatggaatccagtagaaatgatgccaaagatgatcttggtaatttaaatgtgcctgattcatctctccctgctgaaaatgaagcaactggccctggccttattcctccacctcttgctccaatcagcggtccattgtttccagtggatacaaggggcccattcatgagaagaggacctcctttccccccacctcctccaggaaccatgtttggagcttctcgaggttattttccaccaagggatttcccaggtccaccacatgctccatttgcaatgagaaacatctatccaccgaggggtttacctccttaccttcatccgagacctggattttaccccaaccccacattctga

SEQ ID NO: 122784 - DNA, 487 bp, Homo sapiens
  Payload ID: 4065
  Gene Symbol:
  Gene Name: CTB-102L5.4
  ENST ID: ENST00000587519
  CDS Start-End: 1-419
ggattctgaagaccactccagcgatatgttcaactatgaagaatactgcaccgccaacgcagtcactgggccttgccgtgcatccttcccacgctggtactttgacgtggagaggaactcctgcaataacttcatctatggaggctgccggggcaataagaacagctaccgctctgaggaggcctgcatgctccgctgcttccgccagcaggagaatcctcccctgccccttggctcaaaggccctggagcccacctcccagaagcccggtgtgggggcgggccacgggggagatcccaagctcagtccccacaaagttcagggccggtcggaggcaggggcaggtccgggtccaaagcaaggacaccacagctcttccgactccagcagcagctccagcgattcggacacggatgtgaagtcccacgctgctggctccaagcagcacgagagcatcccgggcaaggccaagaagcccaaagtgaag

SEQ ID NO: 122785 - DNA, 528 bp, Homo sapiens
  Payload ID: 4065
  Gene Symbol:
  Gene Name: CTB-102L5.4
  ENST ID: ENST00000591889
  CDS Start-End: 1-461
ccagcgatatgttcaactatgaagaatactgcaccgccaacgcagtcactgggccttgccgtgcatccttcccacgctggtactttgacgtggagaggaactcctgcaataacttcatctatggaggctgccggggcaataagaacagctaccgctctgaggaggcctgcatgctccgctgcttccgccagcaggagaatcctcccctgccccttggctcaaaggccctggagcccacctcccagaagcccggtgtgggggcgggccacgggggagatcccaagctcagtccccacaaagttcagggccggtcggaggcaggggcaggtccgggtccaaaggcctccaacttcagggggctgggtaaggggcgccgcctcactgccgcacctccatccagcaaggacaccacagctcttccgactccagcagcagctccagcgattcggacacggatgtgaagtcccacgctgctggctccaagcagcacgagagcatcccgggcaaggccaagaagcccaaagtgaa

SEQ ID NO: 122786 - DNA, 1558 bp, Homo sapiens
  Payload ID: 4066
  Gene Symbol:
  Gene Name: CTB-133G6.1
  Uniprot ID: I3L1I5
  ENST ID: ENST00000576789
  CDS Start-End: 410-1558
cctgcatgcgcagggctgaggggtgggagcagggctctctgcctccagaacccccatcctctgggctctttttaggcccctagattggcctgcagctgggagcagagtggcaagcatgcaggcaggcagttgagaaagaggaagtcgaggtgctattgggtcattctgtggttatcccaggctctacccagccagcggttcccttgggccagctcgaaacgctggccgtaggtcatgggagctgcaggagctgttagccaggctaggtgcctgcaggttgaagaactgagctctatctggctctgagcccaagtcatgtgtccagccttttgactctggagctgtggcttcagccaccaagagcagcagtggatcctggaaacctgagaacccagacttcttctctgccatgggggatgatcaggaggatgattttcccaggcggctcagcgagagtatggaggacctcagcctggatttgggggcccttcagggcagcgagtatctgcaggacctgggccttggggccccttcccacagccagcctggggagaccccagacagccgccccaccggtgaagaaccaggaagagattctcttttctccagcttggcagggtcccaagacctgtcaaggcggcgcagctgggaaaggtcgcggagctgctcagagagctggcggaggctcagcctcgatgcctcagctgtggatgaggaaccctgtctcccccgaacactggccagccttgctttgaacctgccaggaggagggctgaagacctggactcaagggtgtctctctgggggcgggacccccgcagagagcccaggcaaggaatgtgacagccccaagaaaagagggaggtcaaggtccgttcctgtgtccttctatgagatccgctctccggaaatctctccgggtttggaagtgcccactccacctgttcaaggcctggaacctccagtgctggagtgcatggaaaaagaccatgtggaaccagatcacgtgctgattgtccagcaggtgcttcaagaacttcgacagtaccatggggcccggcagagggcttgcatgtcagccagccccggaggagcccactcgaacctgacctggtttgaattcctgtcggagagcgaggacggtgctggcaagaacgagaagagtgacaagagtaccagtgtgaagcgcaggctgagctgcctccgcagtcgagtgaccaggcagaaggagaaggggaagagcccagcacatctgaaggacaagggccaggatgcacgagagaggcgggagtgtgtcaatgggcaccagctgttgcaagggaccttctccggcccctccagctgccccctgtgtggcaaacctttcttgagctcaggtaagtctggtggcccaatccatcctcctggagggcagccactttctcttcttcacgtcctttcaatcatactcctggggtctcttttgatgtgtgcatcctcgttctgttttgccctctcctcggcggctccctggagagaaccagggatcagtccctgggcacagggacccttgggctaa

SEQ ID NO: 122787 - DNA, 1803 bp, Homo sapiens
  Payload ID: 4067
  Gene Symbol:
  Gene Name: CTB-50L17.14
  ENST ID: ENST00000586020
  CDS Start-End: 55-309
ataaggccacctccgcaggccaggacaacccagaagcaaaagagcagagctaccatgtcctcttggagcagacagcgaccaaaaagggtgaccctgtttgcagcacgatgtctgaagaagaggcggctcagatccccagatccagtgtgtgggagcaggaccagcagaacgtggtgcagcgtgtggtggctctgcccctggtcagggccacgtgcaccgcggtctgcgatgtttacagtgcagccaaggacaggcacccgctgctgggctccgcctgccgcctggctgagaactgcgtgtgcggcctgaccacccgtgccctggaccacgcccagccgctgctcgagcacctgcagccccagctggccactatgaacagcctcgcctgcaggggcctggacaagctggaagagaagcttccctttctccagcaaccttcggagacggtaccccggacgactagacatggggacctccagtgggggcaggccagattagaggcgggagggagggagggatggtgacaaccaggcttttagttaactcaagaaaaaacagccaggttaaaataactgcaacgtgtgtgtgtgtgtgtgtgtgtgtgtgtgtgtgtgtgtgtatacatatatgtatatacgtatagtgtatatatgtatatatacgtataagtatatatgtatatatacgtataagtatatatgtatatgtgtatatatacatgtatatatgtatatgtgtgtatatgtgtatatatgtatatgtatgtgtgtatacatatgtattgctagtaagggcagttaactccctcaacaccctctgtgagggaagggttttatcacccattttataggggaaactgaggcacggagccaggtagaagtccagggatctttgagtcccagccccagggaactagggtggcagaaatggagctggagtcccacggtgcctggagtgggggggcccttccttccaggtggtgacctcagccaaggacgtggtggccagcagtgtcacgggtgtggtggacctggcccggaggggccggcgctggagcgtggagctgaagcgctccgtgagccatgctgtggatgttgtactggaaaaatcagaggagctggtggatcacttcctgcccatgacggaggaagagctcggtgaggacgacaccctcaaccctaacccctgagtcctgccccgtccccatcccctgtggtacagatcagagaggtctgagactcacccaaggtcacacagcagatcagcaggaaacatacaactcaaaaccaggcctgtcctccctcccggtcacttccacggcccctcaacctgcatcccgccaggagtcagaacacccagaccctaagggcatatagggcttttagacttgaggtcccaaactggtggcccccaaatgcctgtgcagcgtgttttaaatattttcattctttgcatgcatttaacaaccagattttgcattacatgtcccgattcttggcttgttttgaaaaaccagacacactgccaggcacagtggctcacgcctgtaatctcagcactttgggaggccaaggtgggcagatcatgaggtcaggagttcgagcccagcctggccaacatagtgaaatcccgtctctactaaaaatacaaaaaattagccaggcgtggtggcgtgtgcctgtattcccagatactcgggaggctgaggcaggagaatcacttgaacctgggaggtggaggttgcaatgagctgagatcgcgctattgcactccagcccaggccacagtgcgagactccgtttc

SEQ ID NO: 122788 - DNA, 581 bp, Homo sapiens
  Payload ID: 4068
  Gene Symbol:
  Gene Name: CTB-54O9.9
  ENST ID: ENST00000586012
  CDS Start-End: 1-234
ctgtccttcctgtgccggtacgtgcccgtggggctgctggagcggctcccacagaggatcaacgagcggccgccctactacctgggccgcgactacctggagacgctgatggccagccagaaggcagccgactggatccgcatcaggctccttgaacctgtatcatcccccagacccagagaaagaggtgtttccagccccaccagcaggtaccggcctcccctgagcccttgacgaggctgggagtgggtttgagtgtgcaggcccatcttgcccctgccccgtccctaagtgggagcctgaaggcatggcctctgctccccatgcttcacacaggtcccccagatgagccccaaagacaagctctgtgtcatccatcacccagccagggccccaaagcaatatctatgtcgtcccccaaaggggccccccaatggcaaggttcttgtggcatctcccaaacaggcccccaggcttgggctgggcccctcaggcagcagctgctctcagggcacccgcctgccgcccacaggtttccagatggccccatgcgggtgcttcttcgacccccgcatctatcg

SEQ ID NO: 122789 - DNA, 786 bp, Homo sapiens
  Payload ID: 4069
  Gene Symbol:
  Gene Name: CTB-60B18.6
  ENST ID: ENST00000591656
  CDS Start-End: 398-786
ctggagggaggaaggggaactgcatctgagagagagcagccaattgggtccgctgactctggccaggttcccgtgccgcgtccaacacccctcactccctgtctcactcccccacggagactcaatttactttccatgtccacattcccagtgcttgcggaagatatcccgctaagagagagacatgtcaaaggtagggtagatccacatttccgggcaccaaagatggagatgttccaggaaagactgcagggcccctgggcaccttccacctccttccaggccatcactggcatgagaaggggcagacccgtgtgagctgtggaaggaggcctctttctggaggagcgtgacccccagtaagcttcaggggctgctgctgttgctgctgctgagcatgggcgggacatgggcatccaaggagccgcttcggccacggtgccgccccatcaatgccaccctggctgtggagaaggagggctgccccgtgtgcatcaccgtcaacaccaccatctgtgccggctactgccccaccatgacccgcgtgctgcagggggtcctgccggccctgcctcaggtggtgtgcaactaccgcgatgtgcgcttcgagtccatccggctccctggctgcccgcgcggcgtgaaccccgtggtctcctacgccgtggctctcagctgtcaatgtgcactctgccgccgcagcaccactgactgcgggggtcccaaggaccaccccttgacctgtgatgacccccgcttccaggactcctcttcctcaaaggcccc

SEQ ID NO: 122790 - DNA, 406 bp, Homo sapiens
  Payload ID: 4069
  Gene Symbol:
  Gene Name: CTB-60B18.6
  ENST ID: ENST00000604577
  CDS Start-End: 175-406
gaaggggaactgcatctgagagagagcagccaattgggtccgctgactctggccaggttcccgtgccgcgtccaacacccctcactccctgtctcactcccccacggagactcaatttactttccatgtccacattcccagtgcttgcggaagatatcccgctaagagagagacatgtcaaaggggctgctgctgttgctgctgctgagcatgggcgggacatgggcatccaaggagccgcttcggccacggtgccgccccatcaatgccaccctggctgtggagaaggagggctgccccgtgtgcatcaccgtcaacaccaccatctgtgccggctactgccccaccatgacccgcgtgctgcagggggtcctgccggccctgcctcaggtggtgtgcaactacc

SEQ ID NO: 122791 - DNA, 851 bp, Homo sapiens
  Payload ID: 4070
  Gene Symbol:
  Gene Name: CTB-96E2.2
  ENST ID: ENST00000555059
  CDS Start-End: 1-447
ccagggcaagtggacgcagccatggctggccgcatctacatctcaggcatggcaccccgcccctccttggccaagaaacaaaggtttaggcatcgcaaccgcaaaggctaccgttcacaacgaggccacagccgtggccgcaaccagaactcccgccggccatcccgcgccacgtggctgtccttgttctccagtgaggagagcaacttgggagccaacaactatgatgactacaggatggactggcttgtgcctgccacctgtgaacccatccagagtgtcttcttcttctctggagacaagtactaccgagtcaatcttcgcacacgacggtggcagcgggttgggttcccaccggagaaagcggaccaccttcagcaaagggcagctactggagctggagagggcgtttgcagcatggccctaccccaacatcagcacccatgagcacctggcctgggtcacttgccttcctgaggccaaggtacaggtgtggttccagaagcgctgggccaaaataatcaagaacaggaagtcaggaattctaagccctgggtctgagtgcccccagagctcctgttctcttccagacaccctccagcagccctgggatccccaaatgccaggccaacctccaccctccagcggcacacctcagcgcacctcagtgtgtcgacatagctcctgtccagctcctggcttgagtccacggcagggctgggaaggggctaaagctgtagccccatggggatcagctggggcttcagaggtccacccttctttagagcgagctactccccagacttcactaggcagcctgtctgacctcatctatgccttggccattgtcg

SEQ ID NO: 122792 - DNA, 1100 bp, Homo sapiens
  Payload ID: 4071
  Gene Symbol:
  Gene Name: CTC-260F20.3
  ENST ID: ENST00000555938
  CDS Start-End: 13-834
gatactgcgagtatggcggcgtcaaaggtgaagcaggacatgcctccgccggggggctatgggcccatcgactacaaacggaacttgccgcgtcgaggactgtcgggctacagcatgctggccatagggattggaaccctgatctacgggcactggagcataatgaagtggaaccgtgagcgcaggcgcctacaaatcgaggacttcgaggctcgcatcgcgctgttgccactgttacaggcagaaaccgaccggaggaccttgcagatgcttcgggagaacctggaggaggaggccatcatcatgaaggacgtgcccgactggaaggcgttcccgttgcccgctctctcccggaagcagaggacggtgctggtcgtgtgtggcccggagcagaacggggcagtggggctggtctgtgcccggcacctgcgggtgtttgagtatgaacccaccatcttctaccccacacgctcgctggacctgctgcatcgggacctgaccacccagtgcgagaagatggacatccccttcctgagctacctgcccactgaggtgcagctcattaacgaagcctatgggctggtggtggatgccgtactgggccccggcgtggagccgggcgaggtcgggggcccctgcacccgcgcgctggccacgctcaagctgctgtccatccccctcgtgagcctggacatcccctcaggcatgccaggcagaggggggcacattggggcctggggggcttgggtggaggcccctgtgccccagctcctggtcgcccctgcctgtctgaacctcaatctccccagcttggatggacccacacttggctgaggctaagggtcacacccatccctctgatggggaagatcgaggctgccaccccaggtgaccccaggtctcctctttcctccaccccagtgcccagcccacatgccctctgcccacccctggcccagttgcctgggcagacgtgagctcactcggcaaaggccgcgcccgccctggctgccgccccatgcctgttggaaccattaggcgacaggcagacggaacaaacagccgctggccagccggaccctccgtgggggtggctggac

SEQ ID NO: 122793 - DNA, 443 bp, Homo sapiens
  Payload ID: 4072
  Gene Symbol:
  Gene Name: CTC-273B12.7
  ENST ID: ENST00000595676
  CDS Start-End: 151-443
gtccattaccaaagcctggaagttctcatcacctccaggtggactgcttggcagtgctaggaggtggactcaggacttcagaagcaacatttctggcctgacctggaaggtgaaggtgaagaacccccagacctgactccggaggagcggatggagctggagaacatccggcggcggaagcaggagctgctggtggagattcagcgcctgcgggaggagctcagtgaagccatgagcgaggtggaggggctggaggccaatgagggcagtaagaccttgcaacggaaccggaagatggcaatgggcaggaagaagttcaacatggaccccaagaaggggatccagttcttggtggagaatgaactgctgcagaacacacccgaggagatcgcccgcttcctgtacaagggcgaggggctgaacaagacagccatcggggacta

SEQ ID NO: 122794 - DNA, 3537 bp, Homo sapiens
  Payload ID: 4073
  Gene Symbol:
  Gene Name: CTC-281F24.5
  ENST ID: ENST00000634965
  CDS Start-End: 1-3537
atgagccgggagactcgccgtggggccttgcccaggctgcgccggggagagcaggcggctaagatgccgggtcgctgcgtggggcccagcaggtcggggcggggggttcggcggccgtgggggaagagacggggcgcagggacgtcccgaggccgtggagcaaggcgccgggcgaagccctcggagtgggagacgcgctgtgtgagtgcagaaaggccacagggccgtcagcggccatgggggacgagacaagcggcggagacagccgacgccgccggggcgaatgaggctttgggagctcctgggaccccaggctccatcgaggctgcaagggaccctggggctgtgtgggtgaacggggctgtgggggagcccgaggtggtggggcttgccggggctgtgtgggtgaccgggtctggggaggaggagaccgaagatagaagtccccggggctgcgagagaaaaggtcgcccgggatctctgggccatgagagcattctgcacctgtggctgaaggtgcaggctatgagggccgcctcgggatgtggggaaggaagtagagtcgagctccatcccgtgcctgcaggagagggacctgtcgaaaggggtgttcctggccgagcttcctgggtagagacaagccgcggcggtcttacagggccctgggtgaaggaacaggcaagggggatccctcgggccccctcagggcccacagctctgggcttaggggcagcttacgagagagccttaggcttctgtggacagggacaggctgggagggtgcctcctgcgagtgtgcctggggctttggcgtcaagttctgaaatggccccgcacctgtggaggggagaagctgtgggggttcctgagactggggaggagataggctatgggtttgtctcaggcccttgtgaaaaagaacagactatgggcgagcctgggaccgtggggtggactggggctgtgggagcgcccagagccatggagggagagctcggctgtggcggtgctgcaggtctgtgggggagaggacagtccccgcagattcctggggctctgacacatgaagcagtctgtggggccacccctggcgtatgggggaggggacaggctgtgggggtgtccgatgctgtggaggaggagcctacttctgtgggtgccgcaggtgtgtgttacaggagacaggctgtggaggagacagactctgtgggtatgcccggcccgtggggcacaggatactctgttggggtgccctgtgctgctgaagaggaaactagatgtggaggtgacccagggttcagggaaaggggacagcctgtgtgggtggagacaggctctgggggtgatccagggtcacggggagctgcgcagactgcagagtcatcatgtcctggggagcaggcagcaggttctgggggtgccccaggcctgtgggggatacaacaggctacaggggtacccagggccttggggaaggacacgggctgtgtgagtgtcccagggctgtggggagcgggacagatggtaagggtgccccaggctgtggtggtacctggagccctgggagaagagctgagccacagcgggggcctgggcctgtgggacggacagcaagctcttggggggcccccagccgaggcagtgcctgggcttggagaggagacctgtagtgggaatgttctgagcccgtgggaaaggaggcaggctgtgggggagccagagagtctggggcctccagctttaggggtccctgggtcagtggatcaggaggctggctgtggagatgttgcatgtcagtgtgggaggaggcaggctgtgggggtgtctgagacggtgggcatacccagggcagcagatgtgccccggcaggggtgtgccgcagcaggggtcctcatggcaatgggtgtgcccggctctggaaaggtgcctgccagagtgcctgctgctgtgtgggcgtctggtcctgtgtgtcaggaaggcagctctagagacattttgaacctgtgggaaaggactcgggctgccagaatatctgtggcttcggggggacccgtggctcgggaggagctgtggtctggcggggaggaatccgtggcttcagggggacccgtggctcaggaggagctgtggtcaggcggggaggaatccgtggcttcagggggacacgtggctcgggagaagctgtggtctggcggggaggattgtggttctggggccttcccgggcccatgggggaggagacagactattggggttcctgtggtgcctgaggggcctgggcttgggggggagactgactctgggggtatcccaagaccctggggacagagacagagggtcagggctcctgtggccaccgaagtccttctggctcctagggtgcctggttctgtggagctggagcctggtgatggaggcttttcaggcttgtcagggaggcagcaaactgcaggaatgcctggcactgtggggctgtctgcagctagtggggtgcccgtggctcccagggtgcctaggcctgtgcaagaggaaactggctcagaattgtggggtgaaagagagacagtgggcggacctgcagatgccaagggtcccacaaggatggaggtgcccacctcgaccaggatgcctgggcccatggcggagaagactggctctgggggtgtctcaggtttgttgggaggcagacagactacaggagtgtccatggctgtggggctgctggggtctgtgggggaggggaccatctttgagcatgtctctggcctgtctggaagaaggcagactgctgggaggcctgtggctgctagaggttccatggccgtgggagtgcccacagctcccgggcttccagggccaatggtaggggatacgggctctggggatgacggctcaggcatatggggaaggagactggccactgaggggcccacagctgccagggttcctggacctgtggagggggagacaggctctgaaggtgtctcaggcctgtggagaaggagacacggtggagccattcccgaggccgggagggtgcctctgcctctgggggtgcttgcagctgtaggagctcccatggcagggcgtgcgcctgctgcggtgtgggtgactgggtcctcaggagcagaagcggacgtgggtgtctcaggtctgaccgtgctgaggagacagtccacagggggagtgggggcttcagaggatgagacaggaggtgggaatattttgggactggccgggggcagccaggctgtggggacatctcacacctgtgtgcctggggccaggttatggagctgtccaaggtctttgggggaagaaacagcctatgagaatgctctaggcatgtcagggacaagaacagctgtgggggtaccctcagtttcaagggaggaaataggccttggccatttcagagaccacctacagccaagtgggaggaggctggctggaggagtgtctgcagtcagagtgagagggagcaatttgggagagagttatgtgggggaggctagattgaggggggcgttccagtag

SEQ ID NO: 122795 - DNA, 575 bp, Homo sapiens
  Payload ID: 4074
  Gene Symbol:
  Gene Name: CTC-326K19.6
  ENST ID: ENST00000451973
  CDS Start-End: 1-114
aacagctccctgagcctccatggagggctcagctccggcctcaggctccgctgtaaggcctggaacgtccacggggcccagagtggctctgtcttccagctgctaccagggtgaagatctgcaggaaggaagctcgcaagagggcagcagctgagcaggacgtgccctccaccctgggacccatctcccagaaatcttcccaaggctgcagacaccgacggatttgctttgggagccagagtagctgccgccaccagagtccggagccatgagcgggtttaattttggaggcactggggcccctacaggcgggttcacgtttggcactgcaaagacggcaacaaccacacctgctacagggttttctttctccacctctggcactggagggtttaattttggggctcccttccaaccagccacaagtaccccttccaccggcctgttctcacttgccacccagactccggccacacagacgacaggcttcacttttggaacagcgactcttgcttcggggggaactggattttctttggggatcggtgcttcaaagctcaacttgagcaacacag

SEQ ID NO: 122796 - DNA, 1967 bp, Homo sapiens
  Payload ID: 4075
  Gene Symbol:
  Gene Name: CTC-360G5.8
  ENST ID: ENST00000599996
  CDS Start-End: 1-1765
agggggcggggctgagggacgcagtgcctgggcggtaggcccggtgggcggggctggagaagagggcttcagaggctgggaggtggagcatggcgggaacggctgggccatagaaaagaacctaacaccggtgcctggggctccttcgcagacctgcttcgtgacctctttcgaatggtgctccaagaggcagcttgtggacctggtgatggaaggggtgtggcaggagctgctggacagcgcccagattgagatctgtgtggctgactggtggggcgctcgagagaactgcggctgcgtctaccagctccgggtccgccttctggatgtgtatgaaaaggaagtggtcaagttctcagcctcacctgacccggtccttcagtggactgagaggggctgccgacaggtctcccacgtcttcaccaactttggcaagggcatccgctacgtatcttttgagcagtacgggagagacatctcgacatggcaggagctgaggcagctgcaggagcagatccggagcctggaggaagagaaggcagctgtgactgaggcagtgcgggccctgctggcaaaccaggacagtggtgaagtgcagcaggaccccaagtaccagggtctgcgggcacgtggccgggagatccggaaggagcttgttcacctgtaccccagggaggcccagcttgaggagcagttctacctgcaggcgctgaagctgcccaaccagacccacccagacgtgcccgtcggggatgagagccaggctcgagtgctccacatggtcggagacaagccagttttctccttccaacctcggggccacctggaaattggcgagaaactcgacatcatccgtcagaagcgcctgtcccacgtgtctggccaccggtcctattacctgcgcggggctggagccctcctgcagcacggcctggtcaacttcacattcaacaagcttctccgccggggcttcacccccatgacggtgccagaccttctccgcggagcagtgtttgaaggctgtgggatgacaccaaatgccaacccatcccaaatttacaacatcgaccctgcccgcttcaaagatctcaacctggctggaacagcggaggtggggcttgcaggctacttcatggaccacaccgtggccttcagggacctgccagtcaggatggtttgctccagcacctgctaccgggcagagacaaacacgggacaggaaccccgggggctgtatcgagtacaccacttcaccaaggtggagatgtttggggtgacaggccctgggctggagcagagctcacagctgctggaggagttcctgtcccttcagatggagatcttgacagagctgggcttgcacttccgggtcctggatatgcccacccaagaactgggcctccccgcctaccgcaagtttgacattgaggcctggatgccaggccgaggccgctttggagaggtcaccagtgcttccaactgcacagacttccagagccgccgcctccacatcatgttccagaccgaggctggggagctgcagtttgcccacacggtgaacgccaccgcctgtgctgtcccccgccttctcatcgcgctcctggagagtaaccagcagaaggacggctcagtgctcgtgccccctgccctccagtcctacctcggcactgatcggatcacagcccctacccacgtgcctctccagtacatcggccccaaccagccccggaagcctgggctgcctggccagcctgctgtaagctaagaacccacccacagcagccctcgggggtgtcactgcttcctggagttcaggagaccccggacacctgggacctgtgttgctgagcccgtcctgacatctgtgttcttcctgtcagctccacgcccgggcccctggaccacggggtccacctctcctctgtccttgctgcctcagagtcagtcactgaccctgttatcattga

SEQ ID NO: 122797 - DNA, 1967 bp, Homo sapiens; identical to SEQ ID NO: 122796
  Payload ID: 4075
  Gene Symbol:
  Gene Name: CTC-360G5.8
  ENST ID: ENST00000634460
  CDS Start-End: 1-1765

SEQ ID NO: 122798 - DNA, 727 bp, Homo sapiens
  Payload ID: 4076
  Gene Symbol:
  Gene Name: CTC-398G3.6
  ENST ID: ENST00000585656
  CDS Start-End: 1-566
gccgaaaggcgcggggccggccgcgactcacggagtcggaccgggcccggcgacggctcgagtcccggaagaagtacgacgtgcggcgcgtgtacctgggcgaggcgcacgggccctgggtggacctgcggcgccgcagcggctggagcgacgccaagctcgccgcctacctcatctctctggagcgcggccagcggagcggccgccacgggaagccttgggagcaggtccccaaaaagccaaagcggaagaaaaggcggcgacgcaacgtgaactgcctgaagaacgtggtgatctggtacgaggaccacaagcaccgctgcccgtacgagccgcacctggcggagctagaccccacttttggcctgtacaccacggccgtgtggcagtgcgaagctggccaccgctacttccaggacctgcattcgcccctgaagcccctcagcgactcagaccctgacagtgacaaagcagatactgggggccatggagtctcaggtgggggggggcccggccggcccggccctgcccaacgggccactccttggtacaaatggagccactgacgacagcaagaccaacctcatcgtcaactacctgccccagaacatgacccaggatgagttcaagagtctcttcggcagcattggcgacatcgagtcctgcaagttggttcgggacaagatcacagggcagagccttggctacgggtttgtgaactattctg

SEQ ID NO: 122799 - DNA, 222 bp, Homo sapiens
  Payload ID: 4077
  Gene Symbol:
  Gene Name: CTC-429P9.4
  ENST ID: ENST00000593459
  CDS Start-End: 1-189
ggagacatcctgctgttcgggacgttgctgatgaatgccggggcggtgctgaactttaagctgaaaaagaaggacacgcagggctttggggaggagtccagggagcccagcacagatccggaacatggtggcggtgctggaagtcatctccagcctggagaaataccctattaccaaagaggcacttgaggaaacacgacttgggaagctcatcaacgacgt

SEQ ID NO: 122800 - DNA, 400 bp, Homo sapiens
  Payload ID: 4077
  Gene Symbol:
  Gene Name: CTC-429P9.4
  ENST ID: ENST00000595505
  CDS Start-End: 6-155
taacgatgatcggagacatcctgctgttcgggacgttgctgatgaatgccggggcggtgctgaactttaagctgaaaaagaaggacacgcagggctttggggaggagtccagggagcccagcacaggctgttcggctcttgaatcccagcgatgaaaccaggaactcactttcccgggatgccgagtctccattcctccattcctgatgacttcaagaatgtttttgaccagaaaaccgacaaccttcccagaaagtccaagctcgtggtgggtggaaaagtgttcgccgagatccggaacatggtggcggtgctggaagtcatctccagcctggagaaataccctattaccaaagaggcacttgaggaaacacgacttgggaagctcatcaacgacgtc

SEQ ID NO: 122801 - DNA, 479 bp, Homo sapiens
  Payload ID: 4077
  Gene Symbol:
  Gene Name: CTC-429P9.4
  ENST ID: ENST00000594509
  CDS Start-End: 1-222
ggagacatcctgctgttcgggacgttgctgatgaatgccggggcggtgctgaactttaagctgaaaaagaaggacacgcagggctttggggaggagtccagggagcccagcacaggtgacaacatccgggaattcttgctgagcctcagatactttcgaatcttcatcgccctgtggaacatcttcatgatgttctgcatgattgtgctgttcggctcttgaatcccagcgatgaaaccaggaactcactttcccgggatgccgagtctccattcctccattcctgatgacttcaagaatgtttttgaccagaaaaccgacaaccttcccagaaagtccaagctcgtggtgggtggaaaagtgttcgccgagatccggaacatggtggcggtgctggaagtcatctccagcctggagaaataccctattaccaaagaggcacttgaggaaacacgacttgggaagctcatcaacgacgt

SEQ ID NO: 122802 - DNA, 548 bp, Homo sapiens
  Payload ID: 4077
  Gene Symbol:
  Gene Name: CTC-429P9.4
  ENST ID: ENST00000593991
  CDS Start-End: 1-222
ggagacatcctgctgttcgggacgttgctgatgaatgccggggcggtgctgaactttaagctgaaaaagaaggacacgcagggctttggggaggagtccagggagcccagcacaggtgacaacatccgggaattcttgctgagcctcagatactttcgaatcttcatcgccctgtggaacatcttcatgatgttctgcatgattgtgctgttcggctcttgaatcccagcgatgaaaccaggaactcactttcccgggatgccgagtctccattcctccattcctgatgacttcaagaatgtttttgaccagaaaaccgacaaccttcccagaaagtccaagctcgtgatactatttttctatctactggggataccaaaaagagccagtgcccttgaggaaccaagtcatgtcagtgcttcttagtttttaaaaagtggatccggaacatggtggcggtgctggaagtcatctccagcctggagaaataccctattaccaaagaggcacttgaggaaacacgacttgggaagctcatcaacgacgtc

SEQ ID NO: 122803 - DNA, 437 bp, Homo sapiens
  Payload ID: 4077
  Gene Symbol:
  Gene Name: CTC-429P9.4
  ENST ID: ENST00000601636
  CDS Start-End: 11-202
gacgttgctgatgaatgccggggcggtgctgaactttaagctgaaaaagaaggacacgcagggctttggggaggagtccagggagcccagcacaggtgacaacatccgggaattcttgctgagcctcagatactttcgaatcttcatcgccctgtggaacatcttcatgatgttctgcatgattgtgctgttcggctcttgaatcccagcgatgaaaccaggaactcactttcccgggatgccgagtctccattcctccattcctgatgacttcaagaatgtttttgaccagaaaaccgacaaccttcccagaaagtccaagctcgtgatccggaacatggtggcggtgctggaagtcatctccagcctggagaaataccctattaccaaagaggcacttgaggaaacacgacttgggaagctcatcaacgacgtcc

SEQ ID NO: 122804 - DNA, 956 bp, Homo sapiens
  Payload ID: 4077
  Gene Symbol:
  Gene Name: CTC-429P9.4
  ENST ID: ENST00000600705
  CDS Start-End: 6-155
taacgatgatcggagacatcctgctgttcgggacgttgctgatgaatgccggggcggtgctgaactttaagctgaaaaagaaggacacgcagggctttggggaggagtccagggagcccagcacaggctgttcggctcttgaatcccagcgatgaaaccaggaactcactttcccgggatgccgagtctccattcctccattcctgatgacttcaagaatgtttttgaccagaaaaccgacaaccttcccagaaagtccaagctcgtggtgggtggaaaagtgttcgccgagatccggaacatggtggcggtgctggaagtcatctccagcctggagaaataccctattaccaaagaggcacttgaggtgagtatcccagaccccagcatttgggagggcagaacggggggcaggggatggtaccaaccaggtccttccgcagcttctgggagcatcagtgtctttgcttcggaggaccaagagaggcggtgtgccctcacagctcgtgcctcgcgatcttgctctcccacgggcactgcagagaccaagtggtgttactcccatcctacatgcccagcacacttcgtgggcacgtggggacatcaggagaggtgtgcttggaggaggctccagtgagaggcaccatccccaaccctccacttgaagcggaccctctgtgctgtcgcctcggccacagcaccctctcacccaggaagcctctctggcagtgtccttacagtggccttgatggtccacagccccctgacaccaggagcctgggtgacagcactgctgagaagccacctgggaccctgaaggtctgggaactaggtttgagaatttatattgtcacaaaggaccggaaatccccagaagttttgtgtcagggaagctggcagtttagggctcagtgggaaccgggtcatttcactgtcagggccacttcccaccattt

SEQ ID NO: 122805 - DNA, 6393 bp, Homo sapiens
  Payload ID: 4078
  Gene Symbol:
  Gene Name: CTC-432M15.3
  ENST ID: ENST00000514667
  CDS Start-End: 63-5018
gctgtaggagcaggggcctagcaagcgcccagcggagcgacccctgcctggccgtggctagcatggcccctacgctgttccagaagctcttcagcaagaggaccgggctgggcgcgcccggccgcgacgcccgggacccagattgcgggttcagttggcctttaccagagtttgatccaagccagattcgactgattgtatatcaagactgtgaaagacgagggagaaatgttttgtttgactccagtgttaagagaagaaatgaggacatatcagtatcggacttaaatactatttattcttatcttcatggaatggaaatattatcaaatctcagggaacatcagcttagattaatgtctgcaagagcacgctatgagagatacagtggcaatcaggttctcttttgttcagaaacgattgccagatgttggtatatcctactttctggatctgtgcttgtgaaaggctccatggtcttgcctccttgcagttttggtaagcagtttggaggaaaaagaggatgtgattgtcttgtattagagccttcagaaatgattgtggtagagaatgccaaagataatgaagatagtattctacaaagagaaattcctgccagacaatcccgaagaagatttcggaaaattaactataaaggagagcgccaaaccattactgatgatgtggaggttaacagctatctttctcttccagctgatcttaccaagatgcatctcacagaaaaccctcatccacaggtgactcatgtgtcttctagtcagtctggttgtagcattgccagtgactctggaagcagcagtttatctgatatctatcaggctacggagagtgaggtaggagatgtagatttgacacgtcttccagaaggacctgttgattctgaggatgacgaagaggaagatgaagagattgatcgaacagatccattgcaggggcgagatcttgttcgagaatgtcttgaaaaagaacctgcagacaaaactgatgatgacattgaacaattgctggagtttatgcaccagctccctgcatttgcaaacatgaccatgtctgtaaggagagaactctgctcagtgatgatttttgaagtggtagagcaggctggagctattattcttgaagatgggcaagagcttgactcatggtatgttattttaaacggcactgtggaaatcagtcatccagatggaaaagttgaaaatttgtttatgggaaatagttttggaattactcccactctggataagcagtacatgcatggaattgtcaggactaaagtagatgattgtcagtttgtctgcatagcccagcaagattattggagaattttaaaccatgtggaaaaaaatacccataaagttgaggaagagggagaaattgttatggtacatgagcatcgggaactagaccggagtggaaccaggaaaggacacattgtgatcaaggcaacacctgagcgtctcataatgcatttaatagaagaacattccatcgtggatccaacttatatagaagattttctattaacttacaggacatttcttgaaagtcctttggatgttgggatcaaactattggaatggtttaagatcgacagcttaagagataaggtgacacggattgtattattatgggtaaataatcattttaatgattttgaaggtgaccctgctatgactcgatttctagaggaatttgaaaaaaatctggaagatacaaagatgaatggtcatctccggttattgaatattgcctgtgctgcaaaggctaagtggagacaggttgtgctgcaaaaggcttcccgcgagtcccctctacaattcagccttaatggagggagtgagaagggatttggtatttttgttgaaggagtagaacctggtagcaaagctgctgattcaggactgaaacgtggtgatcagattatggaagtaaatggacaaaactttgagaatattacatttatgaaagccgttgaaattttgaggaataatactcatcttgcacttactgtgaagaccaacatttttgtgttcaaagagttactttttaggactgaacaagagaaatctggtgttcctcatattcccaaaattgctgaaaaaaaaagtaatcgccattctatccagcatgtgccaggagatattgaacagacatcacaggagaaaggaagtaagaaagttaaagcaaatactgtttcaggtggaagaaacaaaatcaggaagattttggataaaacacgatttagtatcttgcctccaaagctatttagtgatggaggcctaagccaatcacaagatgacagcattgtgggaacaaggcactgtaggcatagtctggctataatgcccatccctggaacactctcatccagcagccctgatctcctgcagcctaccaccagtatgttggatttttccaatccttcagatatccctgatcaagttataagagttttcaaagtggatcagcaaagttgctacattatcatcagtaaagacaccacagctaaagaagtagtttttcatgctgttcatgaatttggtttgaccggtgcatccgacacatattctctctgtgaagtttctgttactcctgagggtgtcataaaacagagaagacttccagatcagttctccaaattagctgatagaattcaactcaatggaaggtattacttaaaaaataacatggaaacagaaaccttatgttcagatgaagatgctcaagaactagttaaggaaagccagctatccatgctgcagctcagtaccattgaggtggccacccagctgtcaatgagggactttgatttgtttcgtaatattgaaccgactgagtacatcgatgacctttttaagttaaattccaaaacaggaaatactcatttgaagaggtttgaggacattgtaaaccaagagacattctgggttgcctcagaaattttaactgaagcaaatcagctcaaacgaatgaagattattaagcattttattaaaattgcacttcattgtcgagaatgtaagaacttcaattccatgtttgcaataataagtggcttgaacctggcatctgtagcaagactcagaggaacttgggaaaagttaccaagcaaatacgagaaacatcttcaagatctacaagacatttttgatccatctagaaacatggcaaagtatagaaatattcttagtagtcaaagtatgcagcctccaattattccactcttccctgttgtcaagaaagatatgacatttctacatgaaggaaatgactccaaagtagatggtttagtaaactttgagaagttaagaatgatttccaaggaaatccgccaagttgttcgaatgacttctgctaacatggacccagctatgatgtttcgacagaggtcactgagtcaaggaagcacaaattcaaacatgctggatgttcagggaggtgctcacaaaaaaagggcacgccgcagctctctgcttaatgccaagaagctatatgaggatgcccaaatggcaaggaaggtgaagcagtatctttccagtctcgatgtagagacagatgaggagaagttccagatgatgtcattacagtgggagcctgcatatggtaccttgaccaagaatttaagtgagaaaagatcagccaaatcatctgaaatgtctccagtgcctatgaggtcagctggccaaacaactaaagcccacttgcatcaaccccacagagtaagccaggtgcttcaggtgccagctgttaatttgcaccccatcaggaagaagggacaaacaaaagaccctgcactgaatacaagtttacctcagaaagttttaggaacaactgaagaaataagtggtaagaagcatacagaagacactatttctgtggcgtcatctttacattctagtcctcctgcatctcctcaaggctcccctcacaaaggttacacacttattccatcagctaaatctgacaacttgtctgactccagccatagtgagatttcttcacggtccagcatcgtgagcaattgttctgttgactccatgtctgcagctctacaggatgaacggtgttcctctcaggccctggcagtccctgaatccactggggcattggaaaagacagagcacgcttcagggataggagatcatagtcaacatggccctgggtggacactcttgaagccatctctaatcaagtgtttagctgtctcatcgtctgtgagcaatgaagagatttctcaagagcatatcattatagaagcagctgacagtggtcgtggaagttggacttcgtgttcaagcagctcccatgacaacttccaaagccttccaaacccaaaaagctgggattttttgaactcttacagacatacccatttggatgaccccattgctgaagttgaacccactgactctgagccctattcctgttctaaaagctgctctagaacttgtgggcagtgtaaaggaagcctagagagaaagagttggacctcctccagttctctgtctgacacgtatgaaccaaactatgggacagttaaacagagagtattggagagcaccccagctgagtcatctgaaggcttggaccccaaggatgccactgacccagtttataaaactgtcacttcaagtacagaaaagggcttgattgtgtactgtgtcacctcacccaagaaggacgataggtatagggagccacctcccactcctccaggatatttggggatttctttagcggacctaaaggaaggaccccacacacacctaaaacctccagattatagtgtggcagtgcagaggtcaaagatgatgcataacagcctctctagactgccaccagcttctctcagtagcaacctcgtggcctgtgttccatcgaagattgtaactcagcctcagaggcataatttgcagccattccatcctaaactaggagatgtgactgatgcagatagcgaagcagatgaaaatgaacaagtttcagcagtctagcctttggatgacctatttgaaaaccactgaaagtcgtggaggaatgggcaagaaccacctcatgattctgcaggccattgctaacgaacagctcattgctacaaccagtccagaggttttattccctctactccgagcaatgaaatagacctgagttatgcttcctttcatttaatttctgcagataaatagtttcctgagcaatggatgctatgcctggataccagtctccactttgcacgccggaactgccttgggaccacagttacagaaaaaatgtaaactcagagtgatccttgtgtatattgctatagatttttctttaacaagctattttaaagataatggcattattatttccaagccatagcttgggctgaaggacaaattgaaattgtctgccaataccaaggatattcttgtatatttgaaaaataacttattatttgaattgttgtggttttgtttgtatttgagagctcttgttagctgatattcatgtttgaggtcataaaattgtctctggtctgaccaaacagaagtcatctttacagaggtgatatgcttgatctacacagagatgtgacttgatctgtagcaccaatgcaatgtaggtctcagtttgagagaaataggaagccctttgcagttgaggtgttaggaacctgctggtcatggtgtggaaggccaaatgaagctgccacagggtttcttgtcagtcctttgggaaatgggagggagtagtttggggaggagggtgggaaccctaatttccacagaatgaaattttgatgttaaatgacatgtatacaaattcttccttaagtgaaagttatgctgcatcgaattgtaactgaaagtatagatccaacaaatagagactgggttctagagagttctggtctatagaaacccaaaactaaaatctctcataactcaagtatggaatactttttttaaagaaattcttatcatgggtgttgtaataatgaagacgaatttgactttatgcagtgttctgcagcatgcctcccccacatctcatagcaccaggttgtgtctgacctgacataccctgcagctctcagctggctgcagtaacattttgtgggagaaagaggagctggagttacagaaatgattgtctcttggttctcagtttttagcccttgagaggacatacttttccagcctcatgggtatggcactcttaattaaaatttcagtgactgtttactggatgaggcagatttttcacatttttgcaaattaaatatattttatatatattaagtttaattttttcagtttttttaatgtaaaagcaagtgaaattttaataaacttctgtaattaccaaaaaaaaaaaaaaaaa

SEQ ID NO: 122806 - DNA, 1960 bp, Homo sapiens
  Payload ID: 4079
  Gene Symbol:
  Gene Name: CTC-435M10.3
  ENST ID: ENST00000540732
  CDS Start-End: 128-1567
aaagcgcaaggtcccagcgccccttggatcctcggtggcagggtccgggcaagtgtcattgcgagggttcaggaagccccggcctgtgatcgtgagcggaaacccctcctggagtttccccaaagccatggacagccctagtcttcgtgagcttcaacagcctctgctggagggcacagaatgtgagacccctgcccagaagcctggcaggcatgagctggggtcccccttaagagagatagcctttgccgagtccctgaggggtttgcagttcctgtcaccgcctcttccctccgtgagcgctggcctgggggaaccaaggccccctgatgttgagcacccccccaggcagcagcagcagttttcatctctggatgacaagccccagttcccaggggcctcggcggagtttatagataagttggaattcatccagcccaacgtcatctctggaatccccatctaccgcgtcatggaccggcaaggccagatcatcaaccccagcgaggacccccacctgccgaaggagaaggtgctgaagctctacaagagcatgacactgcttaacaccatggaccgcatcctctatgagtctcagcggcagggccggatctccttctacatgaccaactatggtgaggagggcacgcacgtggggagtgccgccgccctggacaacacggacctggtgtttggccagtaccgggaggcaggtgtgctgatgtatcgggactaccccctggaactattcatggcccagtgctatggcaacatcagtgacttgggcaaggggcgccagatgcctgtccactacggctgcaaggaacgccacttcgtcactatctcctctccactggccacgcagatccctcaggcggtgggggcggcgtacgcagccaagcgggccaatgccaacagggtcgtcatctgttacttcggcgagggggcagccagtgagggggacgcccatgccggcttcaacttcgctgccacacttgagtgccccatcatcttcttctgccggaacaatggctacgccatctccacgcccacctctgagcagtatcgcggcgatggcattgcagcacgaggccccgggtatggcatcatgtcaatccgcgtggatggtaatgatgtgtttgccgtatacaacgccacaaaggaggcccgacggcgggctgtggcagagaaccagcccttcctcatcgaggccatgacctacaggatcgggcaccacagcaccagtgacgacagttcagcgtaccgctcggtggatgaggtcaattactgggataaacaggaccaccccatctcccggctgcggcactatctgctgagccaaggctggtgggatgaggagcaggagaaggcctggaggaagcagtcccgcaggaaggtgatggaggcctttgagcaggccgagcggaagcccaaacccaaccccaacctactcttctcagacgtgtatcaggagatgcccgcccagctccgcaagcagcaggagtctctggcccgccacctgcagacctacggggagcactacccactggatcacttcgataagtgagacctgctcagcccacccccacccatcctcagctaccccgagaggtagccccactctaaggggagcagggggacctgacagcacaccactgtcttccccagtcagctccctctaaaatactcagcggccagggcggctgccactcttcacccctgctcctcccggctgttacattgtcaggggacagcatctgcagcagttgctgaggctccgtcagccccctcttcacctgttgttacagtgccttctcccaggggctgggtgagggcacattcaggactagaagcccctctgggcatggggtggacatggcaggtcagcctgtggaacttgcgcaggtgcgagtggccagcagaggtcacgaataaactgcatctctgcgcctggctctct

SEQ ID NO: 122807 - DNA, 389 bp, Homo sapiens
  Payload ID: 4080
  Gene Symbol:
  Gene Name: CTC-454I21.3
  ENST ID: ENST00000588873
  CDS Start-End: 1-362
ccctggctccagaggatcatggcagctcctatgagggatcagtgtccttcagggatgtggctatcgatttcagcagagaggaatggcggcacctggacccttctcagagaaacctgtaccgggatgtgatgctggagacctacagccacctgctctcagtaggatatcaagttcctgaagcagaggtggtcatgttggagcaaggaaaggaaccatgggcactgcagggtgagaggccacgtcagagctgcccagtgacacaccgactccccctcccttccaccatgactaaaagcttcctggacctcaccagaagccaagcagacactagtgctatgctcgtacagcctccagaagcatgagctaagtaaatctctttttattataaa

SEQ ID NO: 122808 - DNA, 965 bp, Homo sapiens
  Payload ID: 4080
  Gene Symbol:
  Gene Name: CTC-454I21.3
  ENST ID: ENST00000585860
  CDS Start-End: 144-590
gttcttgggtgtctctggggagtccctgggccagaccttcctccagactccagcccacctcttcggagcagctctgctgagttcacagatgaccactaaacttcaggcaccctagacaaaaagggttgagatccagtgtggccatgccagctagttggacctcaccccagaaatcctcagccctggctccagaggatcatggcagctcctatgagggatcagtgtccttcagggatgtggctatcgatttcagcagagaggaatggcggcacctggacctttctcagagaaacctgtaccgggatgtgatgctggagacctacagccacctgctctcagtagggtatcaagttcctaaaccagaggtggtcatgttggagcaaggaaaggaaccatgggcactgcagggtgagaggccacgtcacagctgcccaggtttctgggtgtctctggggagcccctgggccagattttcctctagactccagcccatctcttcagagcagctctgcttgagttcacagatgactgccaagcttcagacaccctacagaaaaagggttgagacccagtgtggccatgccagctaattggacctcacctcagaaatcctcagccctggctccagaggatcatggcagctcctatgagtgttaaccttgatgcctgaaagaactggaaattatgaagatagattcagaagtcaaatatgttaactaactgcattgaagagtagaagaaaacaatagcctagtaggtttttactgggattagtgaaacaactgctatgttctcagcaacccactccaaagccaaagtcaaaactaaaattgtaaaatatctcaaaaacaataaaaatggtatatatatatcagaagctctggtatatagcaaaactgtactaaaaataatttagaaaaataatttatctcatgcaaatgaataaaaaaatctaaatgaaaagg

SEQ ID NO: 122809 - DNA, 575 bp, Homo sapiens
  Payload ID: 4080
  Gene Symbol:
  Gene Name: CTC-454I21.3
  ENST ID: ENST00000590245
  CDS Start-End: 216-386
gaaggctatttcgccgctggcgtcaggactattttcacgttttaatgccgagaggtctctgtgacgattttggttcttgggtgtctctggggagtccctgggccagaccttcctccagactccagcccacctcttcggagcagctctgctgagttcacagatgaccactaaacttcaggcaccctagacaaaaagggttgagatccagtgtggccatgccagctagttggacctcaccccagaaatcctcagccctggctccagaggatcatggcagctcctatgaggtatataggtaccattttcaaagaaatgatgttctgagccctataagcacaatcaatatgcatcacaagagacaaactgtaatctctgaatgcagttaaatgaagaaatcaacaagggggacagagttttgctcttgttgcccaggctggagtgcagtggcacaatcttggctcaccgcaacctctgcctcctgggttcaagcgattctcctgcctcagcctcccgagtagctgagattacaggcatgcaccaccacgcccagggatcagtgtccttcagggatgtgg

SEQ ID NO: 122810 - DNA, 573 bp, Homo sapiens
  Payload ID: 4081
  Gene Symbol:
  Gene Name: CTC-479C5.12
  ENST ID: ENST00000573493
  CDS Start-End: 1-233
cgcagctctacggtgtgcatccccatggctcctacagccgtctgcccttcacagccctgggctctggtcaggacgcggccctggcggtgctagaagaccggttccagccgaacatgacggtgagcggcctctgtccccgactttgtggtcgctggtgggatgtgcacccgggagctgggggagcacaggaccctggcccagtgcgggtggctaaggcttgtcggaggaggtgaccactgaaggctggaggctgctcaggggctgctggtggaagccgtcaccgccgggatcttgggtgacctgggctccgggggcaatgtggacgcatgtgtgatcacaaagactggcgccaagctgctgcggacactgagctcacccacagagcccgtgaagaggtctggccgctaccactttgtgcctggaaccacagctgtcctgacccagacagtgaagccactaaccctggagctagtggaggaaactgtgcaggctatggaggacagcagcggcttccacttctgcggtggttctctcatcagccagtcctgggtggtcactgctgcccactgcaat

SEQ ID NO: 122811 - DNA, 1185 bp, Homo sapiens
  Payload ID: 4082
  Gene Symbol:
  Gene Name: CTC-479C5.6
  ENST ID: ENST00000574912
  CDS Start-End: 142-513
ccttaggtgacttcacagggtagtgatgacctcacaagcttccaaagtttccatggcagcgtgactacacacctgcgtcctagagaagcctccctaccatttctctgtaagataccaatctgtttggttggctgagagagaatgactgaccggatcctctatattgtctctaacatgtcctctgtcccctgggagggcagcgcagcagctgcagtgcctgccacttctcctcccacacctgggcactaccatgttctctaccgagggtgtggagaaactcaggtaggctggcatggggagacgtactgcctggttggtggctaccgggtccatggggatgctcctttggccaccccaacaaaggctgaagcagagaagccagcccccaggcgtgctcccaagagacgtcaagctacgatagagtcagataaagacctgggttgctctagccccaaaattcggcgcttggagcatcgtggcaggagactgaccccacagaagcttgctggctgagccatttgggagaaaggacaaatgtttagctgtctaagacagctaatgcctcttctgcggtgacctcccctgcccaccactgcagatagagcctgagtcattctgcctatgccttcctcatccagaagcccccttccatgctaactacccatggccaaggagcctcagaaactgtggtttaaaatgagaggttgctttgaacatcccaaggctgaagacggcctggaagaaaacctgatgttcctctactcatctctccagagtccctttttgggcagaagatagaaatagtctgcactctgctagccgaggagtcaagtgcagagagggagtgcagcatagcccagtaagggcttgatctaccagatgggtctttgctttgagtcactgccagcaactaccagcacaaaccaggagggccaggacttgctgaaactggaagcagcagcccatggctagtcacagcaggagaaagcctcctgcttggcatctcaggaggtagaagaaagagacctggggagacctgccacctacagcaagaacaataaggaggaagttgagcaacatccccctgaagctcacatgttactttatttcctgcccattatggccccagtgaggtccctactgctcaatttaaaaaaaaattaaaaaaattatttttccataaca

SEQ ID NO: 122812 - DNA, 1643 bp, Homo sapiens
  Payload ID: 4083
  Gene Symbol:
  Gene Name: CTC-487M23.8
  ENST ID: ENST00000506997
  CDS Start-End: 83-214
tcggaaactcagagccgggttcctcccgggtttctgccgggtttctccctgcggctcctgggttgttgagactcttgtgaagatggcttgcgctgccgcgcggtccccggccgaccaggacaggtttatttgtatctatcctgcttatttaaataataagaagaccatcgcagagggaaggcgaatccccataagtaagtgtttatgtttttaactgttcaggctgttgaaaatcctacagctacagagattcaagatgtatgttcagcagttggacttaacgtatttcttgaggttaagaatgtctgaggggtcaggcggtgctggcaagatggctgcacttgagaagatgacgtttcccaagaagatgacatttccagagaaaccaagccacaaaaagtacagggccgccctgaagaaggagaaacgaaagaaacgtcggcaggaacttgctcgactgagagactcaggactctcacaggaggaggaagaggacacttttattgaagaacaacaactagaagaagagaagctattggaaagagagagggaaagattacatgaggagtggttgctgagggagcagaaggcacaagaagaattcagaataaagaaggaaaaggaagaggcggctaaaaaatggctagaagaacaagagagaaagttaaaggaacaatggaaagaacagcagaggaaagagagagaagaggaggagcagaaacaacaggagaagaaagaaaaagaggaagctgtgcagaagatgctggatcaggctgaaaatgatttagaaaatagtaccacatggcaaaacccagaaccacccgtggatttcagagtaatggagaaggatcgagctaattgtcccttctacagtaaaacaggagcttgcagatttggagacagatgttcacgtaaacataatttcccaacatctagtcctacccttcttattaagagcatgtttacaacgtttggaatggagcagtgcaggagggatgactatgaccctgacgcaagcctggagtacagcgaggaagaaacctaccaacagttcctagatttctatgaggatgtgttgcccgagttcaagaacgtggggaaagtgattcagttcaaggtcagctgcaatttggaacctcacctgaggggcaatgtatatgttcagtaccagtcggaagaagaatgccaagcagccctttctctgtttaacggacgatggtatgcaggacgacagctgcaatgtgaattctgcccagtgacccggtggaaaatggcgatttgtggtttatttgaaatacaacaatgtccaagaggaaaacactgcaactttcttcatgtgttcagaaatcccaacaatgaattctgggaagctaatagagacatctacttgtcttcagatcagactggctcctcctttggcaagaactccgagaggagggagaagatgggccaccacgaccactactacagcaggcagcggggaaggagaaaccctagtccagaccacacctacaaaagaaatggggaatccgagagaaaaaagagtagtcatagggggaagaaatctcacaaacgcacatcaaagagtcgggagaggcacaattcaccaagcagaggaagaaataggcaccgcagctgggacc

SEQ ID NO: 122813 - DNA, 575 bp, Homo sapiens
  Payload ID: 4084
  Gene Symbol:
  Gene Name: CTC-490E21.12
  ENST ID: ENST00000601627
  CDS Start-End: 1-200
gggtggaaggccatgaaccaggctgtcgaagcattggtgccctcatggcccatgtggacgccgtcatccgccactgcgcagggcggctgggcagctatgtcatcaacgggcgcaccaagctcagggagaaatacagccctgtgttcactgtgtacatgggtcccggccagtggtggttttatgtggacacgaagcagtgaaggaagccttgatagaccaagcggatgagttcagtggccgtggagaactggcttcaataaagcaaaacttccaaggtcatggtgtagctctggccaatggagaacgatggaggattctccgacgcttctccctgaccatccttcgggacttcgggatgggaaagcagagcattaaggagcgaattcaggaggaggccagctacctactggaggagttccagaagaccaagctaagattcacgaagagattaaccaggtgattggaccacaccggctcccaagggtggatgaccgggtcaagatgccctacacagatgtcgttatccatgaaatacagagactggtagacatcgtgcccatgggtgtcccccacaa

SEQ ID NO: 122814 - DNA, 561 bp, Homo sapiens
  Payload ID: 4085
  Gene Symbol:
  Gene Name: CTC-512J12.6
  ENST ID: ENST00000588212
  CDS Start-End: 85-561
actggacgcacgctgcgggcgacattgtttgggacgctgggttctgcttttccagaatcctgccctttccaaaaggaagacggtatgattaagttccagatggtgacattcaaggatgttgctgtggtcttcactgaggaggagctggggctgctggactctgtccagaggaagctgtaccgagatgtgatgctggagaacttcaggaacctgctcttagtagcacatcagcccttcaagccagacctaatatcccagctggagagagaagaaaagcttttgatggtggagacagaaaccccaagagatggatgttcaggaaggaagaatcaacaaaagatggagagtattcaggaagtaacagtaagctacttttcccccaaagagctttcctcccgtcagacctggcaacaaagtgcaggtgggttaatcaggtgtcaagatttcctgaaagtttttcaagggaagaattctcagttgcaagaacaaggtaattccctcggccaggtttgggcaggaataccagttcagatttctgaagataagaactatatattcact

SEQ ID NO: 122815 - DNA, 1766 bp, Homo sapiens
  Payload ID: 4086
  Gene Symbol:
  Gene Name: CTC-534A2.2
  ENST ID: ENST00000510585
  CDS Start-End: 463-1215
gggaggccgcgtattgttacctaggggtggtttcttttcctgcagtcgcgatgtgtgattgcagatggaaaacaaagtattttatgcctacgtttctaagatagaagaaatggacttgttgaaaagaagccagtttgtaaaggacacagtaggagaatttaaggtaccaccaccagagagaggttgagagtgcgtttgacttttggttttgccaaacgcgaggttttccgtttccttccggggcaagttgaacctgtccagcccccgtaggctgtgggtcaaaagtgccggtcaaaatggaagtgaatccccctaaacaggagcacctgctggcgctaaaaggtcctgtttccctctgatttggcaagagagacaatcttgcaataataaattaacattctagctctgaggagttcaactaagaaattttctcatcactaagagtaactggattactgcagaatgactacagaagtaatattacattatcgaccatgtgagagtgatcccacacaactgccaaaaattgcagaaaaagcaattcaagactttcctactcgtccgctatcaagatttataccttggtttccatatgatgggtccaagcttccactcagacctaaaagatcaccacctgtgatttctgaagaggcagctgaagatgtgaaacagtacttaaccatttcagaacatgatgctaagtcacacagttatgattgcacagtagatctattggagtttcaacctagcttgaaaaagcagcatttaacctggtcacacacactgaaggaacagactaattctggaaatctgggtaaacaatcagaaaagggaaaacagcacaagaggagatcttggagtatttcccttcccagcaataattgtactaaaaacgtttctcctttgtctaaaaaattgcaagatagtttaaaggcactaaatttacactcactttatagagcaagatggacaatagaacacactatttgtaacagccaaactctggaagacatttggacaaaactcaatcaaattattaggcacaatgaacttccatcttgtaatgctacaattcagaggcatttaggccaaatatgggtgttctgtgatattatgtattgtgaatatgtgggaagtcttcttaaaggaagattagctcttactggaaaaattaatttatttgtgcataaatatggtgttatttttagtatgtaatgaattccactgattgtcaaaaagaatattctgaatgaaatgaatatggattgaaatagataaaataatttttacaggttttaaaatttttaatgactttttagaattcctaggcttgtcaattaagtcaagaaattgctgagttctgcttattggcagccttcttttaaatgtgataaattattgtttacactgaatttgaaggtaaaaatgttctgttccttttgttacaaactgtgattgaattagtcatgaattaagttgtatagtttggattttggttaatctctaaaatctaattttactgtatttttttccttacctcaagtgtaattttttaaaaaataaaactcgaaacaattctctttggagtgctatttatgtggcatgaatgtagttcaaagtgggagactagtctagatttataatgatgtttccaaagatatgtaataacaattgataggctgttttcaaacaacgatacaaaatgtatactttgcctaaaacgataatgtatcctgttttgaaggaaagtatcaaatgttgaatga

SEQ ID NO: 122816 - DNA, 332 bp, Homo sapiens
  Payload ID: 4086
  Gene Symbol:
  Gene Name: CTC-534A2.2
  ENST ID: ENST00000514404
  CDS Start-End: 319-332
gatgcctgtgttagcgagattgtctcttactgtggaactttgtaatgtttagtgatacagtgatgggacctgtaagcttaacctgagcaaatgatctagactaaaatggagattaaaatggattgttactcgtggagaagagggaaaagaagaaaagcaactaattgtcgtgttctttatctcacaatctcacttcaagtcctgtttccctctgatttggcaagagagacaatcttgcaataataaattaacattctagctctgaggagttcaactaagaaattttctcatcactaagagtaactggattactgcagaatgactacagaagt

SEQ ID NO: 122817 - DNA, 694 bp, Homo sapiens
  Payload ID: 4087
  Gene Symbol:
  Gene Name: CTC-554D6.1
  ENST ID: ENST00000520401
  CDS Start-End: 1-284
tgacaaacttgacttttggagatgtagccaacaaggctacgctatgctctatgaaaggctgcatgagagcacttgtggcccaactaaaatctgaaagtgaagacttacagcaggttattgcgagtgttttgaggaatttgtcttggcgagcagatgtaaatagtaaaaagacgttgcgagaagttggaagtgtgaaagcattgatggaatgtgctttagaagttaaaaagatggctctacaaaaacaattccatggtttatttgtatctatcctgcttatttaaataataagaagaccatcgcagagggaaggcgaatccccataagtaaggctgttgaaaatcctacagctacagagattcaagatgtatgttcagcagttggacttaacgtatttcttgagaaaaataaaatgtactctagagaatggaatcgtgatgtccaatacagaggcagagtccgggtccagctcaaacaggaagatgggagcctctgccttgtacagttcccatcacgtaagtcagtaatgttgtatgcagcagaaatgatacctaaactaaaaacaaggacacaaaaaacaggaggtgctgaccaaagtcttcaacaaggagagggaagtaaaaaagggaaaggaaagaaaaagaagtaacctagtatcagcatcaagtatgtggtactactgtaagagacatga

SEQ ID NO: 122818 - DNA, 3538 bp, Homo sapiens
  Payload ID: 4088
  Gene Symbol: CTDP1
  Gene Name: CTD (carboxy-terminal domain, RNA polymerase II, polypeptide A) phosphatase, subunit 1
  Uniprot ID: Q9Y5B0
  ENST ID: ENST00000075430
  CDS Start-End: 103-2706
ggaactacagcgtcgccgcctgggttgtgtcgccgcggtaggcgctgcgctctgagcgcagcgcaggccccgtaccgaccgcccgcccgccctctgtccgcgatggaggtgccggccgcgggtcgcgttcctgccgagggcgccccgacggcggctgtggccgaggtgcgctgcccggggcccgcgccgctgcgcctgctggagtggagggtggcggcgggcgcggccgtgcgcatcggctcggtgctggccgtgttcgaggccgccgcctccgcgcagtcctccggggcctctcagtcccgtgtagcctccgggggctgcgtgcgccccgcgcggccggaacgcaggctgaggtcggagcgcgcgggcgtggtgcgggagctgtgcgcgcagccgggccaggtggtcgccccaggagcggttctggtgaggttggaaggatgcagccacccggttgtcatgaaaggcctgtgtgctgaatgtggccaagacctcacccagttgcagagtaagaacgggaagcagcaggtgccgctgtccacggcgaccgtgtccatggtgcacagcgtgccggagttgatggtgagctccgagcaagctgaacagctgggaagagaagaccagcagcgactgcaccgaaaccggaagctggtgctcatggtggacttggaccagacgttgattcacacaaccgagcagcactgtcagcagatgtcgaataaaggcatctttcacttccagctgggccggggtgagcccatgctgcacacgcgcctgcgtccacactgcaaggacttcctggagaagatcgccaagctgtacgagctgcacgtcttcaccttcggcagccggctgtacgcacacaccatcgcaggctttttagaccccgagaagaagcttttttctcaccgaatattatcaagggatgaatgtattgacccattttctaaaacgggaaaccttagaaatctctttccttgtggagactcaatggtttgcattattgatgatcgagaagatgtctggaagtttgcccccaatctgataactgtgaagaaatatgtatacttccagggcacgggtgatatgaatgcgccccctgggtcccgagaatctcagacgagaaagaaagtaaatcattctcgaggcactgaggtctcagagccatctccgcccgtgagagaccctgagggggtaacgcaggcccctggagtggagcccagcaatggcctggagaagcctgcacgggagctgaacggcagcgaggccgccaccccgcgggactcaccccgccccgggaagccagacgagagggacatctggccccctgcccaggcccccaccagcagccaagagctggcaggcgctcctgagccccagggatcctgtgcgcagggtggccgggtggcaccgggacagcggcctgcccagggtgccacgggcactgacctggactttgacttatccagcgacagcgagagcagcagtgagtccgagggcacgaagtcctcctcctccgcctctgatggcgaaagcgaggggaaaagaggccggcagaagccgaaggctgccccagagggagccggggcgctggcacagggcagttccctggagccggggcggcctgcagcaccgagtctccccggagaggccgagcctggcgcgcatgccccggacaaggagcctgagctgggtgggcaggaggagggcgagcgggatggcctctgcggcctgggcaacggctgtgccgacaggaaggaggcggagaccgagtcacagaacagcgagctgtcgggggtcactgcgggtgagtccctggaccagagcatggaggaggaggaggaggaggacacggatgaggatgaccacctcatctacctggaggagatcctggtccgtgtacacactgactactatgccaagtatgaccgctacctcaacaaggagatcgaggaggcgccggacatccgcaagatcgtgccggagctcaagagcaaggtgctggcagacgtggccataattttcagtgggctacacccgacaaacttcccgatagagaagacgcgggagcattaccacgccacggcgctgggagcgaagatcctcactcggctggtgctgagccccgacgcccctgacagggccacgcacctgatcgccgcgcgagctggcacagagaaggtgctgcaggcacaggagtgcggacacctgcacgtggtcaaccctgactggctgtggagctgcctggagcgctgggacaaggtggaggagcagctcttcccgctcagggacgatcacaccaaggcacagagggagaacagccctgcggcctttcccgaccgggagggtgtgccccccaccgccttgttccacccgatgccggttcttcccaaggcccagcctggccccgaggttcggatctacgactccaacacggggaagctcatcaggacgggcgcccgggggcccccagcaccctccagctccctacccatccgccaggagccctcttccttcaggtggacgacatccttggagaaggcagcgacgacagcgacagcgagaagaggaggcctgaggagcaggaggaggagccccagccccggaagccagggacccgcagggagcggacgctcggggcacctgcgtccagcgagaggagcgcggcagggggccgggggcccagaggccacaagaggaagctgaatgaagaggacgccgccagcgagtccagcagggagtccagcaacgaggatgagggcagcagctccgaggccgacgagatggccaaggcgctggaggcggagctcaacgacctcatgtgagcgcgggcagcgggcagggactgaagcctgaccgacctccagcagcactcggacgtccccggaccagccctcagtctcggtccacgctgctttcttcccaaaggacatgtatatttgcagagctccacatacagaaacacattattttgcagaaataggtgtttttaagaagttttactacaggaatgtctacttttgtaagtgacaggtgttaaaggcccaggtgtgctgtgccaaagagctcagcagaggctcacgtggcccaggctggtgcgcccgctgtctcggtaaggggcgggttggtgtgttttccccttgtgtaccagagcacattccttaggggacggctttgggggtcccacgagacatggactaggagtttaagcaggacagtgtgcgtgcacgagctccgagcccagcacagacatgcctggaacccccgccgcctgctgctccctcctagggaacccatttccggggaacgccgtgactgtcgggcagcctggagcttcctgcagcctcctacgcagggtccacgccacgtggcctgggctgccatcctgccgtcctcccactggcatcctggcaagggggcgttgcttttcctgggcggccttttatgtcttggagacacctgatgtaaagtttctgtaaatctatttcatatctgacccaccaaacagatttctctttaataaaaatcctttttgtaa

SEQ ID NO: 122819 - DNA, 3380 bp, Homo sapiens
  Payload ID: 4088
  Gene Symbol: CTDP1
  Gene Name: CTD (carboxy-terminal domain, RNA polymerase II, polypeptide A) phosphatase, subunit 1
  ENST ID: ENST00000299543
  CDS Start-End: 132-2660
ggacagaaaaccccaggatggaagatccctactgaggtttcattctgttcctctgattgtacagaaagggctgctttggcctagacagagcggttctggtgaggttggaaggatgcagccacccggttgtcatgaaaggcctgtgtgctgaatgtggccaagacctcacccagttgcagagtaagaacgggaagcagcaggtgccgctgtccacggcgaccgtgtccatggtgcacagcgtgccggagttgatggtgagctccgagcaagctgaacagctgggaagagaagaccagcagcgactgcaccgaaaccggaagctggtgctcatggtggacttggaccagacgttgattcacacaaccgagcagcactgtcagcagatgtcgaataaaggcatctttcacttccagctgggccggggtgagcccatgctgcacacgcgcctgcgtccacactgcaaggacttcctggagaagatcgccaagctgtacgagctgcacgtcttcaccttcggcagccggctgtacgcacacaccatcgcaggctttttagaccccgagaagaagcttttttctcaccgaatattatcaagggatgaatgtattgacccattttctaaaacgggaaaccttagaaatctctttccttgtggagactcaatggtttgcattattgatgatcgagaagatgtctggaagtttgcccccaatctgataactgtgaagaaatatgtatacttccagggcacgggtgatatgaatgcgccccctgggtcccgagaatctcagacgagaaagaaagtaaatcattctcgaggcactgaggtctcagagccatctccgcccgtgagagaccctgagggggtaacgcaggcccctggagtggagcccagcaatggcctggagaagcctgcacgggagctgaacggcagcgaggccgccaccccgcgggactcaccccgccccgggaagccagacgagagggacatctggccccctgcccaggcccccaccagcagccaagagctggcaggcgctcctgagccccagggatcctgtgcgcagggtggccgggtggcaccgggacagcggcctgcccagggtgccacgggcactgacctggactttgacttatccagcgacagcgagagcagcagtgagtccgagggcacgaagtcctcctcctccgcctctgatggcgaaagcgaggggaaaagaggccggcagaagccgaaggctgccccagagggagccggggcgctggcacagggcagttccctggagccggggcggcctgcagcaccgagtctccccggagaggccgagcctggcgcgcatgccccggacaaggagcctgagctgggtgggcaggaggagggcgagcgggatggcctctgcggcctgggcaacggctgtgccgacaggaaggaggcggagaccgagtcacagaacagcgagctgtcgggggtcactgcgggtgagtccctggaccagagcatggaggaggaggaggaggaggacacggatgaggatgaccacctcatctacctggaggagatcctggtccgtgtacacactgactactatgccaagtatgaccgctacctcaacaaggagatcgaggaggcgccggacatccgcaagatcgtgccggagctcaagagcaaggtgctggcagacgtggccataattttcagtgggctacacccgacaaacttcccgatagagaagacgcgggagcattaccacgccacggcgctgggagcgaagatcctcactcggctggtgctgagccccgacgcccctgacagggccacgcacctgatcgccgcgcgagctggcacagagaaggtgctgcaggcacaggagtgcggacacctgcacgtggtcaaccctgactggctgtggagctgcctggagcgctgggacaaggtggaggagcagctcttcccgctcagggacgatcacaccaaggcacagagggagaacagccctgcggcctttcccgaccgggagggtgtgccccccaccgccttgttccacccgatgccggttcttcccaaggcccagcctggccccgaggttcggatctacgactccaacacggggaagctcatcaggacgggcgcccgggggcccccagcaccctccagctccctacccatccgccaggagccctcttccttcagagcggttccgccaccccagccgcagatgtttggtgaagagctgcctgacgctcaggacggagagcagcctggcccttctagaagaaagcgacagcccagtatgtctgagacaatgccgctgtacactctttgtaaggaggatttagagagtatggacaaagaggtggacgacatccttggagaaggcagcgacgacagcgacagcgagaagaggaggcctgaggagcaggaggaggagccccagccccggaagccagggacccgcagggagcggacgctcggggcacctgcgtccagcgagaggagcgcggcagggggccgggggcccagaggccacaagaggaagctgaatgaagaggacgccgccagcgagtccagcagggagtccagcaacgaggatgagggcagcagctccgaggccgacgagatggccaaggcgctggaggcggagctcaacgacctcatgtgagcgcgggcagcgggcagggactgaagcctgaccgacctccagcagcactcggacgtccccggaccagccctcagtctcggtccacgctgctttcttcccaaaggacatgtatatttgcagagctccacatacagaaacacattattttgcagaaataggtgtttttaagaagttttactacaggaatgtctacttttgtaagtgacaggtgttaaaggcccaggtgtgctgtgccaaagagctcagcagaggctcacgtggcccaggctggtgcgcccgctgtctcggtaaggggcgggttggtgtgttttccccttgtgtaccagagcacattccttaggggacggctttgggggtcccacgagacatggactaggagtttaagcaggacagtgtgcgtgcacgagctccgagcccagcacagacatgcctggaacccccgccgcctgctgctccctcctagggaacccatttccggggaacgccgtgactgtcgggcagcctggagcttcctgcagcctcctacgcagggtccacgccacgtggcctgggctgccatcctgccgtcctcccactggcatcctggcaagggggcgttgcttttcctgggcggccttttatgtcttggagacacctgatgtaaagtttctgtaaatctatttcatatctgacccaccaaacagatttctctttaataaaaatcctttttgtaagttctct

SEQ ID NO: 122820 - DNA, 3228 bp, Homo sapiens
  Payload ID: 4088
  Gene Symbol: CTDP1
  Gene Name: CTD (carboxy-terminal domain, RNA polymerase II, polypeptide A) phosphatase, subunit 1
  ENST ID: ENST00000591598
  CDS Start-End: 1-2400
gcctccgggggctgcgtgcgccccgcgcggccggaacgcaggctgaggtcggagcgcgcgggcgtggtgcgggagctgtgcgcgcagccgggccaggtggtcgccccaggagcggttctggtgaggttggaaggatgcagccacccggttgtcatgaaaggcctgtgtgctgaatgtggccaagacctcacccagttgcagagtaagaacgggaagcagcaggtgccgctgtccacggcgaccgtgtccatggtgcacagcgtgccggagttgatggtgagctccgagcaagctgaacagctgggaagagaagaccagcagcgactgcaccgaaaccggaagctggtgctcatggtggacttggaccagacgttgattcacacaaccgagcagcactgtcagcagatgtcgaataaaggcatctttcacttccagctgggccggggtgagcccatgctgcacacgcgcctgcgtccacactgcaaggacttcctggagaagatcgccaagctgtacgagctgcacgtcttcaccttcggcagccggctgtacgcacacaccatcgcaggctttttagaccccgagaagaagcttttttctcaccgaatattatcaagggatgaatgtattgacccattttctaaaacgggaaaccttagaaatctctttccttgtggagactcaatggtttgcattattgatgatcgagaagatgtctggaagtttgcccccaatctgataactgtgaagaaatatgtatacttccagggcacgggtgatatgaatgcgccccctgggtcccgagaatctcagacgagaaagaaagtaaatcattctcgaggcactgaggtctcagagccatctccgcccgtgagagaccctgagggggtaacgcaggcccctggagtggagcccagcaatggcctggagaagcctgcacgggagctgaacggcagcgaggccgccaccccgcgggactcaccccgccccgggaagccagacgagagggacatctggccccctgcccaggcccccaccagcagccaagagctggcaggcgctcctgagccccagggatcctgtgcgcagggtggccgggtggcaccgggacagcggcctgcccagggtgccacgggcactgacctggactttgacttatccagcgacagcgagagcagcagtgagtccgagggcacgaagtcctcctcctccgcctctgatggcgaaagcgaggggaaaagaggccggcagaagccgaaggctgccccagagggagccggggcgctggcacagggcagttccctggagccggggcggcctgcagcaccgagtctccccggagaggccgagcctggcgcgcatgccccggacaaggagcctgagctgggtgggcaggaggagggcgagcgggatggcctctgcggcctgggcaacggctgtgccgacaggaaggaggcggagaccgagtcacagaacagcgagctgtcgggggtcactgcgggtgagtccctggaccagagcatggaggaggaggaggaggaggacacggatgaggatgaccacctcatctacctggaggagatcctggtccgtgtacacactgactactatgccaagtatgaccgctacctcaacaaggagatcgaggaggcgccggacatccgcaagatcgtgccggagctcaagagcaaggtgctggcagacgtggccataattttcagtgggctacacccgacaaacttcccgatagagaagacgcgggagcattaccacgccacggcgctgggagcgaagatcctcactcggctggtgctgagccccgacgcccctgacagggccacgcacctgatcgccgcgcgagctggcacagagaaggtgctgcaggcacaggagtgcggacacctgcacgtggtcaaccctgactggctgtggagctgcctggagcgctgggacaaggtggaggagcagctcttcccgctcagggacgatcacaccaaggcacagagggagaacagccctgcggcctttcccgaccgggagggtgtgccccccaccgccttgttccacccgatgccggttcttcccaaggcccagcctggccccgaggttcggatctacgactccaacacggggaagctcatcaggacgggcgcccgggggcccccagcaccctccagctccctacccatccgccaggagccctcttccttcagagcggttccgccaccccagccgcagatgtttggtgaagagctgcctgacgctcaggacggagagcagcctggcccttctagaagaaagcgacagcccagtatgtctgagacaatgccgctgtacactctttgtaaggaggatttagagagtatggacaaagagaggccacaagaggaagctgaatgaagaggacgccgccagcgagtccagcagggagtccagcaacgaggatgagggcagcagctccgaggccgacgagatggccaaggcgctggaggcggagctcaacgacctcatgtgagcgcgggcagcgggcagggactgaagcctgaccgacctccagcagcactcggacgtccccggaccagccctcagtctcggtccacgctgctttcttcccaaaggacatgtatatttgcagagctccacatacagaaacacattattttgcagaaataggtgtttttaagaagttttactacaggaatgtctacttttgtaagtgacaggtgttaaaggcccaggtgtgctgtgccaaagagctcagcagaggctcacgtggcccaggctggtgcgcccgctgtctcggtaaggggcgggttggtgtgttttccccttgtgtaccagagcacattccttaggggacggctttgggggtcccacgagacatggactaggagtttaagcaggacagtgtgcgtgcacgagctccgagcccagcacagacatgcctggaacccccgccgcctgctgctccctcctagggaacccatttccggggaacgccgtgactgtcgggcagcctggagcttcctgcagcctcctacgcagggtccacgccacgtggcctgggctgccatcctgccgtcctcccactggcatcctggcaagggggcgttgcttttcctgggcggccttttatgtcttggagacacctgatgtaaagtttctgtaaatctatttcatatctgacccaccaaacagatttctctttaataaaaatcctttttgtaa

SEQ ID NO: 122821 - DNA, 489 bp, Homo sapiens
  Payload ID: 4088
  Gene Symbol: CTDP1
  Gene Name: CTD (carboxy-terminal domain, RNA polymerase II, polypeptide A) phosphatase, subunit 1
  ENST ID: ENST00000590635
  CDS Start-End: 254-489
tcagtagctgtgctctgaccccagaaggggatatgtttccgtagcaccgaagtgtccagccatgtttgaatctacccttgtgttctgggatgggcgggcaagtggacacgcgtgtgcgcctggctctgaaaaccccaggatggaagatccctactgaggtttcattctgttcctctgattgtacagaaagggctgctttggcctagacagagcggttctggtgaggttggaaggatgcagccacccggttgtcatgaaaggcctgtgtgctgaatgtggccaagacctcacccagttgcagagtaagaacgggaagcagcaggtgccgctgtccacggcgaccgtgtccatggtgcacagcgtgccggagttgatggtgagctccgagcaagctgaacagctgggaagagaagaccagcagcgactgcaccgaaaccggaagctggtgctcatggtggacttggaccagacgttgattcacacaaccga

SEQ ID NO: 122822 - DNA, 5866 bp, Homo sapiens
  Payload ID: 4088
  Gene Symbol: CTDP1
  Gene Name: CTD (carboxy-terminal domain, RNA polymerase II, polypeptide A) phosphatase, subunit 1
  Uniprot ID: Q9Y5B0
  ENST ID: ENST00000613122
  CDS Start-End: 148-3033
ggaagtcggcgcgggctaggcgacgggtggaagccggtaccgagaggaactacagcgtcgccgcctgggttgtgtcgccgcggtaggcgctgcgctctgagcgcagcgcaggccccgtaccgaccgcccgcccgccctctgtccgcgatggaggtgccggccgcgggtcgcgttcctgccgagggcgccccgacggcggctgtggccgaggtgcgctgcccggggcccgcgccgctgcgcctgctggagtggagggtggcggcgggcgcggccgtgcgcatcggctcggtgctggccgtgttcgaggccgccgcctccgcgcagtcctccggggcctctcagtcccgtgtagcctccgggggctgcgtgcgccccgcgcggccggaacgcaggctgaggtcggagcgcgcgggcgtggtgcgggagctgtgcgcgcagccgggccaggtggtcgccccaggagcggttctggtgaggttggaaggatgcagccacccggttgtcatgaaaggcctgtgtgctgaatgtggccaagacctcacccagttgcagagtaagaacgggaagcagcaggtgccgctgtccacggcgaccgtgtccatggtgcacagcgtgccggagttgatggtgagctccgagcaagctgaacagctgggaagagaagaccagcagcgactgcaccgaaaccggaagctggtgctcatggtggacttggaccagacgttgattcacacaaccgagcagcactgtcagcagatgtcgaataaaggcatctttcacttccagctgggccggggtgagcccatgctgcacacgcgcctgcgtccacactgcaaggacttcctggagaagatcgccaagctgtacgagctgcacgtcttcaccttcggcagccggctgtacgcacacaccatcgcaggctttttagaccccgagaagaagcttttttctcaccgaatattatcaagggatgaatgtattgacccattttctaaaacgggaaaccttagaaatctctttccttgtggagactcaatggtttgcattattgatgatcgagaagatgtctggaagtttgcccccaatctgataactgtgaagaaatatgtatacttccagggcacgggtgatatgaatgcgccccctgggtcccgagaatctcagacgagaaagaaagtaaatcattctcgaggcactgaggtctcagagccatctccgcccgtgagagaccctgagggggtaacgcaggcccctggagtggagcccagcaatggcctggagaagcctgcacgggagctgaacggcagcgaggccgccaccccgcgggactcaccccgccccgggaagccagacgagagggacatctggccccctgcccaggcccccaccagcagccaagagctggcaggcgctcctgagccccagggatcctgtgcgcagggtggccgggtggcaccgggacagcggcctgcccagggtgccacgggcactgacctggactttgacttatccagcgacagcgagagcagcagtgagtccgagggcacgaagtcctcctcctccgcctctgatggcgaaagcgaggggaaaagaggccggcagaagccgaaggctgccccagagggagccggggcgctggcacagggcagttccctggagccggggcggcctgcagcaccgagtctccccggagaggccgagcctggcgcgcatgccccggacaaggagcctgagctgggtgggcaggaggagggcgagcgggatggcctctgcggcctgggcaacggctgtgccgacaggaaggaggcggagaccgagtcacagaacagcgagctgtcgggggtcactgcgggtgagtccctggaccagagcatggaggaggaggaggaggaggacacggatgaggatgaccacctcatctacctggaggagatcctggtccgtgtacacactgactactatgccaagtatgaccgctacctcaacaaggagatcgaggaggcgccggacatccgcaagatcgtgccggagctcaagagcaaggtgctggcagacgtggccataattttcagtgggctacacccgacaaacttcccgatagagaagacgcgggagcattaccacgccacggcgctgggagcgaagatcctcactcggctggtgctgagccccgacgcccctgacagggccacgcacctgatcgccgcgcgagctggcacagagaaggtgctgcaggcacaggagtgcggacacctgcacgtggtcaaccctgactggctgtggagctgcctggagcgctgggacaaggtggaggagcagctcttcccgctcagggacgatcacaccaaggcacagagggagaacagccctgcggcctttcccgaccgggagggtgtgccccccaccgccttgttccacccgatgccggttcttcccaaggcccagcctggccccgaggttcggatctacgactccaacacggggaagctcatcaggacgggcgcccgggggcccccagcaccctccagctccctacccatccgccaggagccctcttccttcagagcggttccgccaccccagccgcagatgtttggtgaagagctgcctgacgctcaggacggagagcagcctggcccttctagaagaaagcgacagcccagtatgtctgagacaatgccgctgtacactctttgtaaggaggatttagagagtatggacaaagaggtggacgacatccttggagaaggcagcgacgacagcgacagcgagaagaggaggcctgaggagcaggaggaggagccccagccccggaagccagggacccgcagggagcggacgctcggggcacctgcgtccagcgagaggagcgcggcagggggccgggggcccagaggccacaagaggaagctgaatgaagaggacgccgccagcgagtccagcagggagtccagcaacgaggatgagggcagcagctccgaggccgacgagatggccaaggcgctggaggcggagctcaacgacctcatgtgagcgcgggcagcgggcagggactgaagcctgaccgacctccagcagcactcggacgtccccggaccagccctcagtctcggtccacgctgctttcttcccaaaggacatgtatatttgcagagctccacatacagaaacacattattttgcagaaataggtgtttttaagaagttttactacaggaatgtctacttttgtaagtgacaggtgttaaaggcccaggtgtgctgtgccaaagagctcagcagaggctcacgtggcccaggctggtgcgcccgctgtctcggtaaggggcgggttggtgtgttttccccttgtgtaccagagcacattccttaggggacggctttgggggtcccacgagacatggactaggagtttaagcaggacagtgtgcgtgcacgagctccgagcccagcacagacatgcctggaacccccgccgcctgctgctccctcctagggaacccatttccggggaacgccgtgactgtcgggcagcctggagcttcctgcagcctcctacgcagggtccacgccacgtggcctgggctgccatcctgccgtcctcccactggcatcctggcaagggggcgttgcttttcctgggcggccttttatgtcttggagacacctgatgtaaagtttctgtaaatctatttcatatctgacccaccaaacagatttctctttaataaaaatcctttttgtaagttctcttctcgtgggtgtgtggcagcggtgagcacccgcctcctccctcgctgggatccagctccttagctgtgaaacagaaacgaaaaaattcccacggacaggaccgtgtggaacggcagaaatggaaaccgcagaactgcgagcgtgatgatctcagggtttcgcctctgagcataagaaccaggcttgtagctggtattttaaaacggttaagtgtgaagaattactctcttgcattattttcatccttcccttttgtttgtttgggatgcgggggcccgagagctacaggtaggtgctgggctatggccgccgccaggacccctcccggccagcagcctcggctcacgtcccctcctcctcccagcatcagtcccgcagcgtggcggtgggaggctgcacctcgaggccacggcccttctccaaaagcacacactcctgctttccgacggcaccctcccctgaccacagctcgggaggtggcacgtgtgagaactctccatccacaggatgtggctctcgcgggacctccaggctcaggctgtctccgctgggtgtgggacctttcctgtggggttttcgatggaggttggctggggagggaggcatcctcagtgggtagaggaccccagggtcctggtgctgctgtcgtcaagatgcggcgacatggtggcagaggaaaggcaccgttacccagcagcacgccagccccgggtgactgtttcctgtactaactaggttatttgcagcgccgagtgaagaggcagcttcaccacccaacccacctgtgggttctccggggtctgcagtctgaggaggctgcaggatgaccagacgccggtcagggagttcctcctgtccagagaagcaggaggtgaactgggcccacctcaggtccgatttcgccacgagcaagaatgtaagatgaattggacagaaaacaaaaatagatgtacaagttgatacccaaagaaagcagaagattctacagtttatagggaggggcacaaaacgtgcagggagtaatgtgccggggggtgggggcaggggccgatgaacgaggccttgatgctgtgtggagacctctgggaaaggctgggagaccttccctccttccacagtggtttctccctgaaggcgattctgcgtgtggttggtcctgctgggaccaaggtggccccttgttctgctcttggccgagtcccctctggcttcatgggggtgttaatgaggctctgcaaggcctccttaaacacagtgtggaaatacaggtggtgctgcaggggcagcgagaacggggacctctgctgctgggtctggcctaggggtgaagaggacgggaggagggtggcgtggtagctggctgcgcggggcctggtgacgggaggggccggaccgcatgcagcattcaggaccagcgtggccctgggtgttcgcctgttctgaccgtgtggtcgagtgaacagagcatgcaggggagatgcagcaggttctccccgacgcggaagagcaaggggtccccggttcctggaggagcagcgggattgccccaggctctgggatcgcccacgggggcagcgggccagcacccccagccgcatctctgcacagccgtgctgcacaccttctccgtcacgtgttggaggtgggtctcagcaccagcacatccacattgatagcttaaaatgggacttttctcccgcctgtctcactgttggcccgcccccatgcagcggtggggaccccactgcagggactccaagagccccatcctgtcctcggctccagcctccatcagcaccagccgtgtccttgcagccctgactggagcaactcccaaactctgctgcccggcaggtcttctgaccctgcccgcggtgatggcaccctctggaaggctggcccaggacggcacctccatgctggcagcccctgagtgtagtgtgtgttctacacaaaagagccaggaagtcatctgtgatcattgtttaagggactgtgattaacgtttatgaaatgttctgtgctatgcgaagaaaccactgaatgttagggaaaatattaaatactgaataattatacaactgttccaaataaagtcttaagaagaaacttg

SEQ ID NO: 122823 - DNA, 2519 bp, Homo sapiens
  Payload ID: 4088
  Gene Symbol: CTDP1
  Gene Name: CTD (carboxy-terminal domain, RNA polymerase II, polypeptide A) phosphatase, subunit 1
  ENST ID: ENST00000632932
  CDS Start-End: 103-2519
ggaactacagcgtcgccgcctgggttgtgtcgccgcggtaggcgctgcgctctgagcgcagcgcaggccccgtaccgaccgcccgcccgccctctgtccgcgatggaggtgccggccgcgggtcgcgttcctgccgagggcgccccgacggcggctgtggccgaggtgcgctgcccggggcccgcgccgctgcgcctgctggagtggagggtggcggcgggcgcggccgtgcgcatcggctcggtgctggccgtgttcgaggccgccgcctccgcgcagtcctccggggcctctcagtcccgtgtagcctccgggggctgcgtgcgccccgcgcggccggaacgcaggctgaggtcggagcgcgcgggcgtggtgcgggagctgtgcgcgcagccgggccaggtggtcgccccaggagcggttctggtgaggttggaaggatgcagccacccggttgtcatgaaaggcctgtgtgctgaatgtggccaagacctcacccagttgcagagtaagaacgggaagcagcaggtgccgctgtccacggcgaccgtgtccatggtgcacagcgtgccggagttgatggtgagctccgagcaagctgaacagctgggaagagaagaccagcagcgactgcaccgaaaccggaagctggtgctcatggtggacttggaccagacgttgattcacacaaccgagcagcactgtcagcagatgtcgaataaaggcatctttcacttccagctgggccggggtgagcccatgctgcacacgcgcctgcgtccacactgcaaggacttcctggagaagatcgccaagctgtacgagctgcacgtcttcaccttcggcagccggctgtacgcacacaccatcgcaggctttttagaccccgagaagaagcttttttctcaccgaatattatcaagggatgaatgtattgacccattttctaaaacgggaaaccttagaaatctctttccttgtggagactcaatggtttgcattattgatgatcgagaagatgtctggaagtttgcccccaatctgataactgtgaagaaatatgtatacttccagggcacgggtgatatgaatgcgccccctgggtcccgagaatctcagacgagaaagaaagtaaatcattctcgaggcactgaggtctcagagccatctccgcccgtgagagaccctgagggggtaacgcaggcccctggagtggagcccagcaatggcctggagaagcctgcacgggagctgaacggcagcgaggccgccaccccgcgggactcaccccgccccgggaagccagacgagagggacatctggccccctgcccaggcccccaccagcagccaagagctggcaggcgctcctgagccccagggatcctgtgcgcagggtggccgggtggcaccgggacagcggcctgcccagggtgccacgggcactgacctggactttgacttatccagcgacagcgagagcagcagtgagtccgagggcacgaagtcctcctcctccgcctctgatggcgaaagcgaggggaaaagaggccggcagaagccgaaggctgccccagagggagccggggcgctggcacagggcagttccctggagccggggcggcctgcagcaccgagtctccccggagaggccgagcctggcgcgcatgccccggacaaggagcctgagctgggtgggcaggaggagggcgagcgggatggcctctgcggcctgggcaacggctgtgccgacaggaaggaggcggagaccgagtcacagaacagcgagctgtcgggggtcactgcgggtgagtccctggaccagagcatggaggaggaggaggaggaggacacggatgaggatgaccacctcatctacctggaggagatcctggtccgtgtacacactgactactatgccaagtatgaccgctacctcaacaaggagatcgaggaggcgccggacatccgcaagatcgtgccggagctcaagagcaaggtgctggcagacgtggccataattttcagtgggctacacccgacaaacttcccgatagagaagacgcgggagcattaccacgccacggcgctgggagcgaagatcctcactcggctggtgctgagccccgacgcccctgacagggccacgcacctgatcgccgcgcgagctggcacagagaaggtgctgcaggcacaggagtgcggacacctgcacgtggtcaaccctgactggctgtggagctgcctggagcgctgggacaaggtggaggagcagctcttcccgctcagggacgatcacaccaaggcacagagggagaacagccctgcggcctttcccgaccgggagggtgtgccccccaccgccttgttccacccgatgccggttcttcccaaggcccagcctggccccgaggttcggatctacgactccaacacggggaagctcatcaggacgggcgcccgggggcccccagcaccctccagctccctacccatccgccaggagccctcttccttcag

SEQ ID NO: 122824 - DNA, 2564 bp, Homo sapiens
  Payload ID: 4088
  Gene Symbol: CTDP1
  Gene Name: CTD (carboxy-terminal domain, RNA polymerase II, polypeptide A) phosphatase, subunit 1
  ENST ID: ENST00000632301
  CDS Start-End: 148-2564
ggaagtcggcgcgggctaggcgacgggtggaagccggtaccgagaggaactacagcgtcgccgcctgggttgtgtcgccgcggtaggcgctgcgctctgagcgcagcgcaggccccgtaccgaccgcccgcccgccctctgtccgcgatggaggtgccggccgcgggtcgcgttcctgccgagggcgccccgacggcggctgtggccgaggtgcgctgcccggggcccgcgccgctgcgcctgctggagtggagggtggcggcgggcgcggccgtgcgcatcggctcggtgctggccgtgttcgaggccgccgcctccgcgcagtcctccggggcctctcagtcccgtgtagcctccgggggctgcgtgcgccccgcgcggccggaacgcaggctgaggtcggagcgcgcgggcgtggtgcgggagctgtgcgcgcagccgggccaggtggtcgccccaggagcggttctggtgaggttggaaggatgcagccacccggttgtcatgaaaggcctgtgtgctgaatgtggccaagacctcacccagttgcagagtaagaacgggaagcagcaggtgccgctgtccacggcgaccgtgtccatggtgcacagcgtgccggagttgatggtgagctccgagcaagctgaacagctgggaagagaagaccagcagcgactgcaccgaaaccggaagctggtgctcatggtggacttggaccagacgttgattcacacaaccgagcagcactgtcagcagatgtcgaataaaggcatctttcacttccagctgggccggggtgagcccatgctgcacacgcgcctgcgtccacactgcaaggacttcctggagaagatcgccaagctgtacgagctgcacgtcttcaccttcggcagccggctgtacgcacacaccatcgcaggctttttagaccccgagaagaagcttttttctcaccgaatattatcaagggatgaatgtattgacccattttctaaaacgggaaaccttagaaatctctttccttgtggagactcaatggtttgcattattgatgatcgagaagatgtctggaagtttgcccccaatctgataactgtgaagaaatatgtatacttccagggcacgggtgatatgaatgcgccccctgggtcccgagaatctcagacgagaaagaaagtaaatcattctcgaggcactgaggtctcagagccatctccgcccgtgagagaccctgagggggtaacgcaggcccctggagtggagcccagcaatggcctggagaagcctgcacgggagctgaacggcagcgaggccgccaccccgcgggactcaccccgccccgggaagccagacgagagggacatctggccccctgcccaggcccccaccagcagccaagagctggcaggcgctcctgagccccagggatcctgtgcgcagggtggccgggtggcaccgggacagcggcctgcccagggtgccacgggcactgacctggactttgacttatccagcgacagcgagagcagcagtgagtccgagggcacgaagtcctcctcctccgcctctgatggcgaaagcgaggggaaaagaggccggcagaagccgaaggctgccccagagggagccggggcgctggcacagggcagttccctggagccggggcggcctgcagcaccgagtctccccggagaggccgagcctggcgcgcatgccccggacaaggagcctgagctgggtgggcaggaggagggcgagcgggatggcctctgcggcctgggcaacggctgtgccgacaggaaggaggcggagaccgagtcacagaacagcgagctgtcgggggtcactgcgggtgagtccctggaccagagcatggaggaggaggaggaggaggacacggatgaggatgaccacctcatctacctggaggagatcctggtccgtgtacacactgactactatgccaagtatgaccgctacctcaacaaggagatcgaggaggcgccggacatccgcaagatcgtgccggagctcaagagcaaggtgctggcagacgtggccataattttcagtgggctacacccgacaaacttcccgatagagaagacgcgggagcattaccacgccacggcgctgggagcgaagatcctcactcggctggtgctgagccccgacgcccctgacagggccacgcacctgatcgccgcgcgagctggcacagagaaggtgctgcaggcacaggagtgcggacacctgcacgtggtcaaccctgactggctgtggagctgcctggagcgctgggacaaggtggaggagcagctcttcccgctcagggacgatcacaccaaggcacagagggagaacagccctgcggcctttcccgaccgggagggtgtgccccccaccgccttgttccacccgatgccggttcttcccaaggcccagcctggccccgaggttcggatctacgactccaacacggggaagctcatcaggacgggcgcccgggggcccccagcaccctccagctccctacccatccgccaggagccctcttccttcag

SEQ ID NO: 122825 - DNA, 2213 bp, Homo sapiens
  Payload ID: 4088
  Gene Symbol: CTDP1
  Gene Name: CTD (carboxy-terminal domain, RNA polymerase II, polypeptide A) phosphatase, subunit 1
  ENST ID: ENST00000632450
  CDS Start-End: 1-2213
gcctccgggggctgcgtgcgccccgcgcggccggaacgcaggctgaggtcggagcgcgcgggcgtggtgcgggagctgtgcgcgcagccgggccaggtggtcgccccaggagcggttctggtgaggttggaaggatgcagccacccggttgtcatgaaaggcctgtgtgctgaatgtggccaagacctcacccagttgcagagtaagaacgggaagcagcaggtgccgctgtccacggcgaccgtgtccatggtgcacagcgtgccggagttgatggtgagctccgagcaagctgaacagctgggaagagaagaccagcagcgactgcaccgaaaccggaagctggtgctcatggtggacttggaccagacgttgattcacacaaccgagcagcactgtcagcagatgtcgaataaaggcatctttcacttccagctgggccggggtgagcccatgctgcacacgcgcctgcgtccacactgcaaggacttcctggagaagatcgccaagctgtacgagctgcacgtcttcaccttcggcagccggctgtacgcacacaccatcgcaggctttttagaccccgagaagaagcttttttctcaccgaatattatcaagggatgaatgtattgacccattttctaaaacgggaaaccttagaaatctctttccttgtggagactcaatggtttgcattattgatgatcgagaagatgtctggaagtttgcccccaatctgataactgtgaagaaatatgtatacttccagggcacgggtgatatgaatgcgccccctgggtcccgagaatctcagacgagaaagaaagtaaatcattctcgaggcactgaggtctcagagccatctccgcccgtgagagaccctgagggggtaacgcaggcccctggagtggagcccagcaatggcctggagaagcctgcacgggagctgaacggcagcgaggccgccaccccgcgggactcaccccgccccgggaagccagacgagagggacatctggccccctgcccaggcccccaccagcagccaagagctggcaggcgctcctgagccccagggatcctgtgcgcagggtggccgggtggcaccgggacagcggcctgcccagggtgccacgggcactgacctggactttgacttatccagcgacagcgagagcagcagtgagtccgagggcacgaagtcctcctcctccgcctctgatggcgaaagcgaggggaaaagaggccggcagaagccgaaggctgccccagagggagccggggcgctggcacagggcagttccctggagccggggcggcctgcagcaccgagtctccccggagaggccgagcctggcgcgcatgccccggacaaggagcctgagctgggtgggcaggaggagggcgagcgggatggcctctgcggcctgggcaacggctgtgccgacaggaaggaggcggagaccgagtcacagaacagcgagctgtcgggggtcactgcgggtgagtccctggaccagagcatggaggaggaggaggaggaggacacggatgaggatgaccacctcatctacctggaggagatcctggtccgtgtacacactgactactatgccaagtatgaccgctacctcaacaaggagatcgaggaggcgccggacatccgcaagatcgtgccggagctcaagagcaaggtgctggcagacgtggccataattttcagtgggctacacccgacaaacttcccgatagagaagacgcgggagcattaccacgccacggcgctgggagcgaagatcctcactcggctggtgctgagccccgacgcccctgacagggccacgcacctgatcgccgcgcgagctggcacagagaaggtgctgcaggcacaggagtgcggacacctgcacgtggtcaaccctgactggctgtggagctgcctggagcgctgggacaaggtggaggagcagctcttcccgctcagggacgatcacaccaaggcacagagggagaacagccctgcggcctttcccgaccgggagggtgtgccccccaccgccttgttccacccgatgccggttcttcccaaggcccagcctggccccgaggttcggatctacgactccaacacggggaagctcatcaggacgggcgcccgggggcccccagcaccctccagctccctacccatccgccaggagccctcttccttcag

SEQ ID NO: 122826 - DNA, 489 bp, Homo sapiens; identical to SEQ ID NO: 122821
  Payload ID: 4088
  Gene Symbol: CTDP1
  Gene Name: CTD (carboxy-terminal domain, RNA polymerase II, polypeptide A) phosphatase, subunit 1
  ENST ID: ENST00000632905
  CDS Start-End: 254-489

SEQ ID NO: 122827 - DNA, 2638 bp, Homo sapiens
  Payload ID: 4089
  Gene Symbol: CTDSP1
  Gene Name: CTD (carboxy-terminal domain, RNA polymerase II, polypeptide A) small phosphatase 1
  Uniprot ID: Q9GZU7
  ENST ID: ENST00000273062
  CDS Start-End: 337-1122
cgcctagccgcgccggtcccagaagtggcgaaagccgcagccgagtccaggtcacgccgaagccgttgcccttttaagggggagccttgaaacggcgcctgggttccatgtttgcatccgcctcgcgggaaggaaactccatgttgtaacaaagtttcctccgcgccccctccctccccctcccccctagaacctggctcccctcccctccggagctcgcggggatccctccctcccacccctcccctcccccccgcgccccgattccggccccagccgggggggaggccgggcgcccgggccagagtccggccggagcggagcgcgcccggccccatggacagctcggccgtcattactcagatcagcaaggaggaggctcggggcccgctgcggggcaaaggtgaccagaagtcagcagcttcccagaagccccgaagccggggcatcctccactcactcttctgctgtgtctgccgggatgatggggaggccctgcctgctcacagcggggcgcccctgcttgtggaggagaatggcgccatccctaagcagaccccagtccaatacctgctccctgaggccaaggcccaggactcagacaagatctgcgtggtcatcgacctggacgagaccctggtgcacagctccttcaagccagtgaacaacgcggacttcatcatccctgtggagattgatggggtggtccaccaggtctacgtgttgaagcgtcctcacgtggatgagttcctgcagcgaatgggcgagctctttgaatgtgtgctgttcactgctagcctcgccaagtacgcagacccagtagctgacctgctggacaaatggggggccttccgggcccggctgtttcgagagtcctgcgtcttccaccgggggaactacgtgaaggacctgagccggttgggtcgagacctgcggcgggtgctcatcctggacaattcacctgcctcctatgtcttccatccagacaatgctgtaccggtggcctcgtggtttgacaacatgagtgacacagagctccacgacctcctccccttcttcgagcaactcagccgtgtggacgacgtgtactcagtgctcaggcagccacggccagggagctagtgagggtgatggggccaggacctgcccctgaccaatgatacccacacctcctcccaggaagactgcccaggcctttgttaggaaaacccatgggccgccgccacactcagtgccatggggaagcgggcgtctcccccaccagccccaccaggcggtgtaggggcagcaggctgcactgaggaccgtgagctccaggccccgtgtcagtgccttcaaacctcctcccctattctcaggggacctggggggccctgcctgctgctccctttttctgtctctgtccatgctgccatgtttctctgctgccaaattgggccccttggccccttccggttctgcttcctgggggcagggttcctgccttggacccccagtctgggaacggtggacatcaagtgccttgcatagagccccctcttccccgcccagctttcccaggggcacagctctaggctgggaggggagaaccagcccctccccctgccccacctcctcccttgggactgagagggcccctaccaacctttgcctctgccttggagggaggggaggtctgttaccactggggaaggcagcaggagtctgtccttcaggccccacagtgcagcttctccagggccgacagctgagggctgctccctgcatcatccaagcaatgacctcagacttctgccttaaccagccccggggcttggctcccccagctctgagcgtgggggcataggcaggaccccccttgtggtgccatataaatatgtacatgtgtatatagatttttaggggaaggagagagggaagggtcagggtagagacacccctcccttgcccctttcctgggcccagaagttggggggagggagggaaaggatttttacattttttaaactgctattttctgaatggaacaagctgggccaaggggcccaggccctgtcctctgtccctcacacccctttgctccgttcattcattcaaaaaaacatttcttgagcaccttctgtgcccagcatatgctaggcccaccagctaagtgtgtgtggggggtctctacgccagctcatcagtgcctccttgcccatccttcaccggtgcctttgggggatctgtaggaggtgggaccttctgtggggtttggggatctccaggaagcccgaccaagctgtccccttcccctgtgccaacccatctcctacagccccctgcctgatcccctgctggctgggggcagctcccaggatatcctgccttccaactgtttctgaagcccctcctcctaacatggcgattccggaggtcaaggccttgggctctccccagggtctaacggttaaggggacccacataccagtgccaagggggatgtcaagtggtgatgtcgttgtgctcccctcccccagagcgggtgggcggggggtgaatatggttggcctgcatcaggtggccttcccatttaagtgccttctctgtgactgagagccctagtgtgatgagaactaaagagaaagccagaccccta

SEQ ID NO: 122828 - DNA, 1109 bp, Homo sapiens
  Payload ID: 4089
  Gene Symbol: CTDSP1
  Gene Name: CTD (carboxy-terminal domain, RNA polymerase II, polypeptide A) small phosphatase 1
  Uniprot ID: Q9GZU7
  ENST ID: ENST00000443891
  CDS Start-End: 76-858
tgagattagggggcgcagccagagcaggcctaggaaaacgccagcagcgtgtggcgatcacggtgatgaagcgcaatggtggccgccccgtgggctacccaggagcaggaggagggccgagggatccagcccggggaccggggtgaccagaagtcagcagcttcccagaagccccgaagccggggcatcctccactcactcttctgctgtgtctgccgggatgatggggaggccctgcctgctcacagcggggcgcccctgcttgtggaggagaatggcgccatccctaagaccccagtccaatacctgctccctgaggccaaggcccaggactcagacaagatctgcgtggtcatcgacctggacgagaccctggtgcacagctccttcaagccagtgaacaacgcggacttcatcatccctgtggagattgatggggtggtccaccaggtctacgtgttgaagcgtcctcacgtggatgagttcctgcagcgaatgggcgagctctttgaatgtgtgctgttcactgctagcctcgccaagtacgcagacccagtagctgacctgctggacaaatggggggccttccgggcccggctgtttcgagagtcctgcgtcttccaccgggggaactacgtgaaggacctgagccggttgggtcgagacctgcggcgggtgctcatcctggacaattcacctgcctcctatgtcttccatccagacaatgctgtaccggtggcctcgtggtttgacaacatgagtgacacagagctccacgacctcctccccttcttcgagcaactcagccgtgtggacgacgtgtactcagtgctcaggcagccacggccagggagctagtgagggtgatggggccaggacctgcccctgaccaatgatacccacacctcctcccaggaagactgcccaggcctttgttaggaaaacccatgggccgccgccacactcagtgccatggggaagcgggcgtctcccccaccagccccaccaggcggtgtaggggcagcaggctgcactgaggaccgtgagctccaggccccgtgtcagtgccttcaaacctcctcccctattctcaggggacctggggggcc

SEQ ID NO: 122829 - DNA, 842 bp, Homo sapiens
  Payload ID: 4089
  Gene Symbol: CTDSP1
  Gene Name: CTD (carboxy-terminal domain, RNA polymerase II, polypeptide A) small phosphatase 1
  ENST ID: ENST00000428361
  CDS Start-End: 1-788
gtttgaactcagaggaggctcagagacgcggggcggggcctggcgcctttggggcgctcctgttcgctcgaggtgaccagaagtcagcagcttcccagaagccccgaagccggggcatcctccactcactcttctgctgtgtctgccgggatgatggggaggccctgcctgctcacagcggggcgcccctgcttgtggaggagaatggcgccatccctaagaccccagtccaatacctgctccctgaggccaaggcccaggactcagacaagatctgcgtggtcatcgacctggacgagaccctggtgcacagctccttcaagccagtgaacaacgcggacttcatcatccctgtggagattgatggggtggtccaccaggtctacgtgttgaagcgtcctcacgtggatgagttcctgcagcgaatgggcgagctctttgaatgtgtgctgttcactgctagcctcgccaagtacgcagacccagtagctgacctgctggacaaatggggggccttccgggcccggctgtttcgagagtcctgcgtcttccaccgggggaactacgtgaaggacctgagccggttgggtcgagacctgcggcgggtgctcatcctggacaattcacctgcctcctatgtcttccatccagacaatgctgtaccggtggcctcgtggtttgacaacatgagtgacacagagctccacgacctcctccccttcttcgagcaactcagccgtgtggacgacgtgtactcagtgctcaggcagccacggccagggagctagtgagggtgatggggccaggacctgcccctgaccaatgatacccacacctcctcc

SEQ ID NO: 122830 - DNA, 818 bp, Homo sapiens
  Payload ID: 4089
  Gene Symbol: CTDSP1
  Gene Name: CTD (carboxy-terminal domain, RNA polymerase II, polypeptide A) small phosphatase 1
  ENST ID: ENST00000452977
  CDS Start-End: 1-764
ctcggggcccgctgcggggcaaaggtgaccagaagtcagcagcttcccagaagccccgaagccggggcatcctccactcactcttctgctgtgtctgccgggatgatggggaggccctgcctgctcacagcggggcgcccctgcttgtggaggagaatggcgccatccctaagaccccagtccaatacctgctccctgaggccaaggcccaggactcagacaagatctgcgtggtcatcgacctggacgagaccctggtgcacagctccttcaagccagtgaacaacgcggacttcatcatccctgtggagattgatggggtggtccaccagccccctcactggcccgccccccaggtctacgtgttgaagcgtcctcacgtggatgagttcctgcagcgaatgggcgagctctttgaatgtgtgctgttcactgctagcctcgccaagtacgcagacccagtagctgacctgctggacaaatggggggccttccgggcccggctgtttcgagagtcctgcgtcttccaccgggggaactacgtgaaggacctgagccggttgggtcgagacctgcggcgggtgctcatcctggacaattcacctgcctcctatgtcttccatccagacaatgctgtaccggtggcctcgtggtttgacaacatgagtgacacagagctccacgacctcctccccttcttcgagcaactcagccgtgtggacgacgtgtactcagtgctcaggcagccacggccagggagctagtgagggtgatggggccaggacctgcccctgaccaatgatacccacacctcctcc

SEQ ID NO: 122831 - DNA, 586 bp, Homo sapiens
  Payload ID: 4089
  Gene Symbol: CTDSP1
  Gene Name: CTD (carboxy-terminal domain, RNA polymerase II, polypeptide A) small phosphatase 1
  ENST ID: ENST00000431127
  CDS Start-End: 1-586
ggaggcgccgaccccctcggaggcacagagaggacggccggcacttccaagagtcgcttggcgcccgcggggagagtcgtgcgcctagtgggcacgcaccaccccgcaaagcctcgccgccccgacgaggctgcgtcccccagcgtggctgggccggggtgggggggtctgtcttctccttttccccgtgtggacctcaggatctggacgctgcccccaggtctgcccaccctcgcctgggtctggctgccccggaactgagggcaaggtggaaaggtgaccagaagtcagcagcttcccagaagccccgaagccggggcatcctccactcactcttctgctgtgtctgccgggatgatggggaggccctgcctgctcacagcggggcgcccctgcttgtggaggagaatggcgccatccctaagaccccagtccaatacctgctccctgaggccaaggcccaggactcagacaagatctgcgtggtcatcgacctggacgagaccctggtgcacagctccttcaagccagtgaacaacgcggacttcatcatccctgtggagattgatggggtggtccaccaggt

SEQ ID NO: 122832 - DNA, 4795 bp, Homo sapiens
  Payload ID: 4090
  Gene Symbol: CTDSP2
  Gene Name: CTD (carboxy-terminal domain, RNA polymerase II, polypeptide A) small phosphatase 2
  Uniprot ID: O14595
  ENST ID: ENST00000398073
  CDS Start-End: 305-1120
ccatttcctcctcttgttttcgctccggattctccatgttggacccaaactgaggagcccggagctgccgctgggggatcggggccgggggcacccgggggagccgctgcccgggccgcccgccctttgtacaggccgcctcccttcccggtccggggaggaaacgagaggggggatgtgaacagctgtggaagtcggagtctcgggagccggagcgggcccccgcccaggccccccagcccagcccagcccgcgcgcccgcccgtcctcccgcccagccagcccgggcccgcgggattgttagatggaacacggctccatcatcacccaggcgcggagggaagacgccctggtgctcaccaagcaaggcctggtctccaagtcctctcctaagaagcctcgtggacgtaacatcttcaaggcccttttctgctgttttcgcgcccagcatgttggccagtcaagttcctccactgagctcgctgcgtataaggaggaagcaaacaccattgctaagtcggatctgctccagtgtctccagtaccagttctaccagatcccagggacctgcctgctcccagaggtgacagaggaagatcaaggaaggatctgtgtggtcattgacctcgatgaaacccttgtgcatagctcctttaagccaatcaacaatgctgacttcatagtgcctatagagattgaggggaccactcaccaggtgtatgtgctcaagaggccttatgtggatgagttcctgagacgcatgggggaactctttgaatgtgttctcttcactgccagcctggccaagtatgccgaccctgtgacagacctgctggaccggtgtggggtgttccgggcccgcctattccgtgagtcttgcgtgttccaccagggctgctacgtcaaggacctcagccgcctggggagggacctgagaaagaccctcatcctggacaactcgcctgcttcttacatattccaccccgagaatgcagtgcctgtgcagtcctggtttgatgacatggcagacactgagttgctgaacctgatcccaatctttgaggagctgagcggagcagaggacgtctacaccagccttgggcagctgcgggccccttagcctgccctgcttccaagcgacggccatcccagtaggggactttcccacactgtgcctttacgatcagcgtgacagagtagaagctggagtgcctcaccacacggcccggaaacagcgggaagtaactggaaagagctttaggacagcttagatgccgagtgggcgaatgccagaccaatgatacccagagctacctgccgccaacttgttgagatgtgtgtttgactgtgagagagtgtgtgtttgtgtgtgtgttttgccatgaactgtggccccagtgtatagtgtttcagtgggggagaagctgaaagaccaagactcttcccaagttagcttgtctcctctcctgtcaccctaagagccactgagttgtgtagggatgaagactattgaagactccattgccaaaccatggcctttcctcagtgttgtaaggcctatgccaaggataaaggaagggtatgcctttgggtactccaggcacacacctttctgaaatccttctccagccagctgctgcagacaaaagatcacatttctgggaagatgagaacttgtttccagaccagcatccagtggccatcaggtcttgtggcccaaaggctatgcttgcctccggctgagtgcctgggataggccttttctatgtctccccaaggctggggtgctgagcctgccttcctcaccacctagccatagtctcaaacctgtggggaaggaggttttctccctgcccgggaagaggacagataactgatttccgttcttttgactgtgttttaaaattctctttctaaacacagagtgttgggcctggtttgtttctgacaaagttacagtcctgggcctgtaatgaatgtcggcggcgctggggttgcagggaaaagacaaatcctcaaagcgtggacgtgtgtccccatggcttgtggatcagctaagctcgggatcatttccataagtctgcttttcagggattctctgctggtgctggtgcaaggacttctgttccaaaggctgggaaaaactaagctgtcccagcccctcccatttcttgggcagggctcttttcctgttgtgtcttcccccagggcctgtcctgtaccgagctctgtctgttccagccttcatccttcctggctgttgcttttcctcttaagggcctcagaactcttgctcttcctgggctgagggggaatgagtgttcttgccatttgccagcctaatgcgcatgctttctgcctctggtaacaggagtgagtgagcccctcagacctgcactctgggtgtctcctgctttcaaaggttcttaatagtgaatgctttaaaattaaagtcatcacgaaatggaagttttcccagggtggaaaataagaggaagtgctgctgtaattgggagcacaaggggcctcccaaaaaggagccccacctcagcatcactgccttaatcgtggcctccctggggtgggtggggttctctcctccctccctccctcctcctggggtgggagggcgctcctgttcccatctctgtgttccctggaggcaggtatcacaaagcatttgtgaattgctttaggtgcagggacaccacccactcaggactcttccccatcatcccttccattgccacaccctagatccagcctcaggaactaacaagttttgagaaaagcaggtagtagagcagcagcttcgtgctctcagcggtggctggctggcatttttctctagcgttgtggtgccaccttcccttcttgtcccaaggttataaggccttgtctttctctttggaatcataaagtggaacagagtccccagaactcatgtggccatttccgccagcatcactccccggtgcctatggggtcccggtgtacctaaagggagaaggaccccatgtgctagccagaaatatactgtctcttgaaggaaagcaggagctcagactcttagagccagctgtggcttcggacccaaggcctgacctaggctgctatcctaatattgcaggaggggcctctcttccaagccccaccctaagggttagcccttggccaaatcttttgccgtctaggcccagccaggcttttctgactaaataagcaataagaggctctaagctgactgagttgcaaggaccctttccgccctcccttggatctccatgtttttccagatggcggaagagcatgtgccaccccctttcctaacagacttgtccaagtgcttggcgtgggacccatgaccaaagcccaggatggcttggtgggagtgtccctgctgcatctgcatgaagcccctgctttttaggcctcactcccatcagaaccctgcctgcccacctgcaactcccccccaacaatgccattcccacttgccccagagaagctactcggccaaacctagccagggtctgttcttgtggaccagagccagcctagtcattatttgctgtcgggtttccagtttcaccgtgtgttagggtgagggatgattgtaaaatttgctcctcaaaggaatcaggccagactcaattttggagggcaagacagggaggaggccgcttcatcccagactctcttctagggcttcccaccatcagcccctcccacttgagactggtctttgggaggcaataggccaccatgcctggtcagcaccaattcaagccatgccaggaatctgcctacctgccaggttcagttcttttaaggtgcctcttcagggacacagtgtgtctctctgattgggcttctaaatcaaaagcctgatgttcgtgtccctctcatagggggagctttggacacaggaccagtttggaaaagggtcaggtaagggtttccactctgcacattgtagagggaacactctgtaggcccatgggtcccttactagagaggttgagtgaatttgccttcagttaacatgggaccttctgtttagcttcctcttgcttcccaaagattttaagcattttgtaaatgtataaactcacctctggtaacagtggcccagacgctgctttgtgctaaaagcatgggaaatgtaaaggcagtctttctctgggaaatggatgctattctattctgctgcccctacctgttcctgaggcctcatttagaaagaaaatcccctcagaaggctgtctggcacccagtgtcctagccaggccaagtatatgagaaaggtaagtccattttccccttcaggtcctcagtggattacttaaccactgctgtccctcggtccctttttcctaaacgggtttagttctgtcttttttctccttttttctaaatgctggtaaatatttacattcagccagggaagaggaggccagaggtcgggccagctgccccattcttttaacgttgtagggcctgcccatggagcggaccctcctctttgggcctcgtgagcttttttgcttatcatgttccatttcgtgccgctttcccccttcaagatgccatttggagggtaggggatctgcttcccactgtgactgggctatgggattctgactaccttgcttacagattcatggtttgataaatttgttgtattcaaaaacttgaaatgcaggacgccattaagtgtctgtttatatttttggaatatttgtattacttacaattaattaataaaagtgggtttaaaaaacctttccaggaa

SEQ ID NO: 122833 - DNA, 988 bp, Homo sapiens
  Payload ID: 4090
  Gene Symbol: CTDSP2
  Gene Name: CTD (carboxy-terminal domain, RNA polymerase II, polypeptide A) small phosphatase 2
  ENST ID: ENST00000547701
  CDS Start-End: 488-847
gaaaaagtgcgagttctctgtgggcagcggctggcggcccccgccttccagagcgtcaggtggaggcgcgagggggcccgcaggccctcgcgggggcctggtctccaagtcctctcctaagaagcctcgtggacgtaacatcttcaaggcccttttctgctgttttcgcgcccagcatgttggccagtcaagttcctccactgagctcgctgcgtataaggaggaagcaaacaccattgctaagtcggatctgctccagtgtctccagtaccagttctaccagatcccagggacctgcctgctcccagaggtgacagaggaagatcaaggaaggatctgtgtggtcattgacctcgatgaaacccttgtgcatagctcctttaagccaatcaacaatgctgacttcatagtgcctatagagattgaggggaccactcaccaggtgtatgtgctcaagaggccttatgtggatgagttcctgagacgcatgggggaactctttgaatgtgttctcttcactgccagcctggccaagtatgccgaccctgtgacagacctgctggaccggtgtggggtgttccgggcccgcctattccgtgagtcttgcgtgttccaccagggctgctacgtcaaggacctcagccgcctggggagggacctgagaaagaccctcatcctggacaactcgcctgcttcttacatattccaccccgagaatgcagtgcctgtgcagtcctggtttgatgacatggcagacactgagttgctgaacctgatcccaatctttgaggagctgagcggagcagaggacgtctacaccagccttgggcagctgcgggccccttagcctgccctgcttccaagcgacggccatcccagtaggggactttcccacactgtgcctttacgatcagcgtgacagagtagaagctggagtgcctcaccacacggcccggaaacagcgggaagtaactggaaagagctttag

SEQ ID NO: 122834 - DNA, 1368 bp, Homo sapiens
  Payload ID: 4090
  Gene Symbol: CTDSP2
  Gene Name: CTD (carboxy-terminal domain, RNA polymerase II, polypeptide A) small phosphatase 2
  ENST ID: ENST00000548823
  CDS Start-End: 270-566
atgttggacccaaactgaggagcccggagctgccgctgggggatcggggccgggggcacccgggggagccgctgcccgggccgcccgccctttgtacaggccgcctcccttcccggtccggggaggaaacgagaggggggatgtgaacagctgtggaagtcggagtctcgggagccggagcgggcccccgcccaggccccccagcccagcccagcccgcgcgcccgcccgtcctcccgcccagccagcccgggcccgcgggattgttagatggaacacggctccatcatcacccaggcgcggagggaagacgccctggtgctcaccaagcaaggcctggtctccaagtcctctcctaagaagcctcgtggacgtaacatcttcaagaccctcatcctggacaactcgcctgcttcttacatattccaccccgagaatgcagtgcctgtgcagtcctggtttgatgacatggcagacactgagttgctgaacctgatcccaatctttgaggagctgagcggagcagaggacgtctacaccagccttgggcagctgcgggccccttagcctgccctgcttccaagcgacggccatcccagtaggggactttcccacactgtgcctttacgatcagcgtgacagagtagaagctggagtgcctcaccacacggcccggaaacagcgggaagtaactggaaagagctttaggacagcttagatgccgagtgggcgaatgccagaccaatgatacccagagctacctgccgccaacttgttgagatgtgtgtttgactgtgagagagtgtgtgtttgtgtgtgtgttttgccatgaactgtggccccagtgtatagtgtttcagtgggggagaagctgaaagaccaagactcttcccaagttagcttgtctcctctcctgtcaccctaagagccactgagttgtgtagggatgaagactattgaagactccattgccaaaccatggcctttcctcagtgttgtaaggcctatgccaaggataaaggaagggtatgcctttgggtactccaggcacacacctttctgaaatccttctccagccagctgctgcagacaaaagatcacatttctgggaagatgagaacttgtttccagaccagcatccagtggccatcaggtcttgtggcccaaaggctatgcttgcctccggctgagtgcctgggataggccttttctatgtctccccaaggctggggtgctgagcctgccttcctcaccacctagccatagtctcaaacctgtggggaaggaggttttctccctgcccgggaagaggacagataactgatttccgttcttttgactgtgttttaaaattctctttctaaacaca

SEQ ID NO: 122835 - DNA, 544 bp, Homo sapiens
  Payload ID: 4090
  Gene Symbol: CTDSP2
  Gene Name: CTD (carboxy-terminal domain, RNA polymerase II, polypeptide A) small phosphatase 2
  ENST ID: ENST00000550144
  CDS Start-End: 1-544
cttcaaggcccttttctgctgttttcgcgcccagcatgttggccagtcaagttcctccactgagctcgctgcgtataaggaggaagcaaacaccattgctaagtcggatctgctccagtgtctccagtaccagttctaccaggtacgtgactctggcctgatcccagggacctgcctgctcccagaggtgacagaggaagatcaaggaaggatctgtgtggtcattgacctcgatgaaacccttgtgcatagctcctttaagccaatcaacaatgctgacttcatagtgcctatagagattgaggggaccactcaccaggtgtatgtgctcaagaggccttatgtggatgagttcctgagacgcatgggggaactctttgaatgtgttctcttcactgccagcctggccaagtatgccgaccctgtgacagacctgctggaccggtgtggggtgttccgggcccgcctattccgtgagtcttgcgtgttccaccagggctgctacgtcaaggacctcagccgcctggggagggacctgagaaag

SEQ ID NO: 122836 - DNA, 797 bp, Homo sapiens
  Payload ID: 4090
  Gene Symbol: CTDSP2
  Gene Name: CTD (carboxy-terminal domain, RNA polymerase II, polypeptide A) small phosphatase 2
  ENST ID: ENST00000549039
  CDS Start-End: 1-378
ccaatcaacaatgctgacttcatagtgcctatagagattgaggggaccactcaccaggtgtatgtgctcaagaggccttatgtggatgagttcctgagacgcatgggggaactctttgaatgtgttctcttcactgccagcctggccaagggctgctacgtcaaggacctcagccgcctggggagggacctgagaaagaccctcatcctggacaactcgcctgcttcttacatattccaccccgagaatgcagtgcctgtgcagtcctggtttgatgacatggcagacactgagttgctgaacctgatcccaatctttgaggagctgagcggagcagaggacgtctacaccagccttgggcagctgcgggccccttagcctgccctgcttccaagcgacggccatcccagtaggggactttcccacactgtgcctttacgatcagcgtgacagagtagaagctggagtgcctcaccacacggcccggaaacagcgggaagtaactggaaagagctttaggacagcttagatgccgagtgggcgaatgccagaccaatgatacccagagctacctgccgccaacttgttgagatgtgtgtttgactgtgagagagtgtgtgtttgtgtgtgtgttttgccatgaactgtggccccagtgtatagtgtttcagtgggggagaagctgaaagaccaagactcttcccaagttagcttgtctcctctcctgtcaccctaagagccactgagttgtgtagggatgaagactattgaagactccattgccaaaccatggcctt

SEQ ID NO: 122837 - DNA, 900 bp, Homo sapiens
  Payload ID: 4090
  Gene Symbol: CTDSP2
  Gene Name: CTD (carboxy-terminal domain, RNA polymerase II, polypeptide A) small phosphatase 2
  ENST ID: ENST00000551594
  CDS Start-End: 110-418
cggagtctcgggagccggagcgggcccccgcccaggccccccagcccagcccagcccgcgcgcccgcccgtcctcccgcccagccagcccgggcccgcgggattgttagatggaacacggctccatcatcacccaggcgcggagggaagacgccctggtgctcaccaagcaaggcctggtctccaagtcctctcctaagaagcctcgtggacgtaacatcttcaaggcccttttctgctgttttcgcgcccagcatgttggccagtcaagttcctccactgagctcgctgcgtataaggaggaagcaaacaccattgctaagtcggatctgctccagtgtctccagtaccagttctaccagatctcagcaacctggcttggttttagatcccagggacctgcctgctcccagaggtgacagaggaagatcaaggaaggatctgtgtggtcattgacctcgatgaaacccttgtgcatagctcctttaagccaatcaacaatgctgacttcatagtgcctatagagattgaggggaccactcaccaggtgtatgtgctcaagaggccttatgtggatgagttcctgagacgcatgggggaactctttgaatgtgttctcttcactgccagcctggccaagtatgccgaccctgtgacagacctgctggaccggtgtggggtgttccgggcccgcctattccgtgagtcttgcgtgttccaccagggctgctacgtcaaggacctcagccgcctggggagggacctgagaaagaccctcatcctggacaactcgcctgcttcttacatattccaccccgagaatgcagtgcctgtgcagtcctggtttgatgacatggcagacactgagttgctgaacctgatcccaatctttgaggagctg

SEQ ID NO: 122838 - DNA, 952 bp, Homo sapiens
  Payload ID: 4090
  Gene Symbol: CTDSP2
  Gene Name: CTD (carboxy-terminal domain, RNA polymerase II, polypeptide A) small phosphatase 2
  ENST ID: ENST00000622025
  CDS Start-End: 1-849
atggaacacggctccatcatcacccaggcgcggagggaagacgccctggtgctcaccaagcaaggcctggtctccaagtcctctcctaagaagcctcgtggacgtaacatcttcaaggcccttttctgctgttttcgcgcccagcatgttggccagtcaagttcctccactgagctcgctgcgtataaggaggaagcaaacaccattgctaagtcggatctgctccagtgtctccagtaccagttctaccagatcccagggacctgcctgctcccagaggtgacagaggaagatcaaggaaggatctgtgtggtcattgacctcgatgaaacccttgtgcatagctcctttaagccaatcaacaatgctgacttcatagtgcctatagagattgaggggaccactcaccaggtgtatgtgctcaagaggccttatgtggatgagttcctgagacgcatgggggaactctttgaatgtgttctcttcactgccagcctggccaagtatgccgaccctgtgacagacctgctggaccggtgtggggtgttccgggcccgcctattccgtgagtcttgcgtgttccaccagggctgctacgtcaaggacctcagccgcctggggagggacctgagaaagaccctcatcctggacaactcgcctgcttcttacatattccaccccgagaatgcagtgcctgtgcagtcctggtttgatgacatggcagacactgagttgctgaacctgatcccaatctttgaggagctgagcggagcagaggacgtctacaccagccttggggctgcgggccccttagcctgccctgcttccaagcgacggccatcccagtaggggactttcccacactgtgcctttacgatcagcgtgacagagtagaagctggagtgcctcaccacacggcccggaaacagcgggaagtaactggaaagagctt

SEQ ID NO: 122839 - DNA, 6828 bp, Homo sapiens
  Payload ID: 4091
  Gene Symbol: CTDSPL2
  Gene Name: CTD (carboxy-terminal domain, RNA polymerase II, polypeptide A) small phosphatase like 2
  Uniprot ID: Q05D32
  ENST ID: ENST00000260327
  CDS Start-End: 564-1964
ggaaaaaccgtccttcgggtccccgcctctccactcctaacgctttactccctactccccctgcgaccactacacagccggctacggaggcccctaatgtacaaatatcccccaggcccttgctcatcctgataggttttgtcctttcttaatcgacccagtactaaggccttgtgttcagtttttctccaggattcagactagagagtttcttccggcgtaaggaacttcaacgctcttcacggaagtaaaagtgtttttttggttgttgttgccgttgtggctgcccgcattccttccctcccacctcgcggaattgtggcgggagggggaggaggaagtcagggcgcctgcgcggagaggccgctttccatccgggtccctgtccgtgcggtgcagcaggtcggtaggcgggaaatggcgactggctgaaggagctggttctgttgctgctgcggggtaagcgggaaagacaccacacattgcgcagtcgggaccatcgccggagcctgaggacacttctctgtcgtcacagttagttttacatgtggcacccataaaagatgaggctgagaacacggaaagcttctcagcagtcaaatcaaatccaaacacaacgcactgccagagcaaagaggaaatattcagaggttgatgatagcctgccttcaggaggagaaaaaccatcgaagaatgaaaccggcttgttgtcttcaattaaaaaatttattaaaggaagcacacctaaggaagagagagaaaatccttcaaaacggagtagaattgaacgtgatatagataacaatttgatcacgtcaacaccaagagcaggagaaaaacctaacaaacagatatctcgagtaagacggaaaagtcaagtaaatggagaagctggtagttatgaaatgacaaatcaacatgtaaaacaaaatggaaaattagaagataatccttcctctggcagtcctccaaggactactttgttggggaccatattttcacctgtcttcaactttttttcaccagcaaataaaaatggaacgtcaggatcagattctccaggacaggctgtggaagctgaagaaatagtaaaacaacttgatatggaacaggtggatgagatcactaccagtactactacatcaactaatggagcagcttactcaaatcaagcagttcaagtgagaccatcactaaacaatggtttagaagaagcagaagaaacagttaatcgtgatatcccaccccttacagcaccagtaactccagatagtggttattcatcagcccacgcggaggccacctatgaagaagactgggaagtatttgacccctattatttcatcaaacatgtcccgccactgacagaagaacaactaaataggaaacctgctcttccgttgaaaacaagaagcacaccggaattctccctagttttagacttggatgaaacactagtgcattgtagtctaaatgagctagaagatgcagcacttacttttccagtccttttccaagatgtcatttatcaggtttatgtgagattaagaccatttttcagggaattcctggaacgaatgtctcagatgtatgagatcattctttttactgcttctaagaaggtgtatgcagacaagttactgaacatactagaccctaaaaagcaactggtcaggcaccggcttttccgtgaacattgtgtttgtgtacaaggaaactatataaaggacttaaatattcttggaagagatctttcaaaaactataataattgacaactcaccacaagcctttgcatatcagctttctaatggaatccctatagaaagttggtttatggataaaaatgacaatgaactcctaaaattgattccattcctggagaagcttgtagaactgaatgaagatgttcgaccacacatcagagacagatttcgcttgcatgatttgctgcccccagattaagtacaaagacttgtcaaatcactgaagggggagagaatgcaggacccttttggactaagacaaaaacattgccattactgttgaaattttgcatttttgtaccccgtcttgcttttcttatctttggtgcccaataataattaagggttacagaaagagactttatctatctcagatcgaatacatatagtaggtaggctaaaacagaagagtctttagaactagtgcaactccagtgaaattttttatgtacaggacatctgcagtttataaagaattctgtttctgccaccagcagtttgacctgtagtcacacaggattttatgataataacagagatgaaaatggacttttattttctctctgtttggtgctctaagtgggtttgtagccacttttctgttactttatgattctcatttcaacaggaatggccagtaaaagttgttttatttttcctgttaaggtttataacctttttacatttttgacctgtattagattagaatttcattatgcattccttttagttgaggcgcttcatagttttctggagatagtcaatttttagttttttattatacatttgaatggccgttttcctgctttgtctgcctgcacattgtatatttgtttaaaaatattctctacttttagtctatgtaagtttcatttagaaagacatgcatttatattttgtttctgtaatattctactgtaggtgaaatcttttcaaaaatcaagagactgggtagataagaatatatgaatgactaatatacaaaagatttaaaccattgtgatggcgtatattctcaaatggtaatatcttgcaatggcacacagatttaatggataaaggtatacctcagacttcactgtgctcacaaatctttgaggagaaagtttggtcacctgtttggcttgatttagttactgctgcctttggttttctccaggaatgaagtattcagcacagtgactcagtatttttagttattttgcatgggctggtagtacctctgttatgctctcagttacaatcaatttaaaactgtataacagtcttggtacctaacagtagctatgcataatcctgtggcacagtacactcccaagccaccaatgcagttaatatgctctcatagtggtttttctatgctatatgaaaatagtcttcaagccttggttctctaatgcagctaccacaagaggttgatatttttatagtggcgtgtaatctccttttcgggaggctttttatggaaggtagaatttgtaaaagttcgtatgctttgcctctcaactgcattaacatgccacaggctcagactgtttttgtgtaaaggatgtcaaagaacggcactttttctaaagagaagtttgatattttgtatgcttgttaagaaagtacagtattggaaattaaaggtggacaactgataattgaggagtatgtcaattaattttttatgtatattacctgtttacttgtacaacttactgtacaaattacatgcagcttcattttcaaatgaatccttaaaataaggaaatctttttaggaaaacatttaatttttgtatttttgattttaaaggcatgagttatgtcaattttcagtgtattaatgaagattttaacttttcatcaggttgagtgttttcttactatattatctgttgtgtatgtagttagcatattgtgtcactgaactgtttaaaaatctagcatgtagagcaagcctgttttgtggaaaatccttattcattaaaaaaataatcatggcagattttctgcaaaaaaaaaacaaaagcatttgcaattcagaatactgatttttttaattttatttaaagaaaggtattttgcttgcaggaaaaaaatactacagattcattttaatgagaatctttgaaatgtatttatctttagggcatctgggcatctttatgctgtttgtcttctgtctttcttgaaataaaatgtacatacgttacctttacatatgctcttgctcaaaattgtgaacctagttacatttctccctgctcccttcctttttatgctcaaacagcgaaacccaaaacttaaaagatctgaactttcagcatgcattctgattgctgaaagatttcctgatttagtgcattctcaaaagggctttcccataatctaaagggaaatgtaagcacctatactcttgtgcctgtgggcacttcaataataaaaaccaactttttaaactaatcatcttttatcaatgataaagttgttttcagtcccacactaggagagttcctttaagtcagctgatcaagcataagatacttccgtaaagaaataaactaagaaaattttttatggcttgagaaaattccttgaggccaaattaatatatttttctttgttattttatttgagtcattttaaatttgttaatacaaaatttaagataatttacagagacaatttatccagcttccttctaccttaatacaatgttttgtcttcccattatcctctcttttctttatctgttggtagatgtaaaaaacttccatttagttaatcggaggtgtgtattttttaaattgaaatgtgcccagccccttcagctcacacaggaaacatgaactcttaaaaaactgactagtaaatgcaggagaggtggatacctgatgagacacagcgaaagtgacctgtatacacattacaactctggagtacatattaaagtcgtgctatttccagtggtaaatgtctgacttttaagacattcttttaaatatttgtatcattgttaggatgttttaatcagttgttttttaattccatgtaatatatgtagccctcatcagatttatatcaccatatttctccttgtgtcctaagagaattgatgacaattcgtaaccataaattgttttatattagctagtatgtatatttatttttacccaatggctttatctgtttcccaaaatttgtttgggatttgttgaaagcattgtgtaacttctataaacggctattttcttgtaactgtcagtgaaatgaatgtgtacattgttttcttgtatttctctgggttgttttttgtttttttttccaagggttaacatagaatgttttttttaaaaaattatctttggccaatgactttttcatctagatcttactttcattcaaccttctaaagaagttcgtttctcattgttttgttctgtcaacttgcctgaaaaacagagacttcatctcatcaatgaagaaagcatttcattattcctacagatctttcctgcgagcacagaattcttcataaggaccagatctcttccatgtctgtgtcaatcacataaagctaaaatgtaaaggacattgaagcctttatttaattgtactaatatgatggtgttatatactacatcattagctagttaaggttttctgacctgacttctctttgtcttcctaggtatttatttgttatcttttaatcttgtgtatctaaattaacttagttaatagttacccaccgaataactatgccaagcaactagtaaagaatgtttattttatttccccttataggggaagagtggactgggaacaaaaatgtatgggccaaaaggccttagggttgtcattcattgactttcttattcctctcatgagctataattgagtatagtatttttttagtgctgatgtcattacttctcatgtcttcccctgagttgaaagcctacgacaaacatgtataaaatacatttaagaattttcagaatatgaaccacaaaactcagtatcttatatttaaatgctacttaagttattattggaatccaagtctcactaactagggtacatttttataaaatgtttctctgtatcttgaattgaaattacttgcccagaggcaagagttctggggatataacatgatttgagatcttttttaaaaaagggtggggcggcgggggagagagcgacaagtttatactagtttatgcttttgatattagtattttaagatacatcagttgatcccgaaacctgaccattagaattactctgaggagcttttaaaatagattcctggagcctacccctggaaaattgtctcgctggatctcgagaggggcctgagagttctggctttttttttttgtttggttggttttgttttgttttgttttgttttttctttaaagctctcctggtgattctaatagccagtattgggtaatcaatgttttagctaaatgtgacactggtttgagagtaggcaacaaaattaaagttcaccagacatctctttgtggtagagtttttttttttttaaactgggaccagatttcacagagcttattcaagatacatggaggaataataaagaagattaaggctactgctcattatcatttttgtctttcatattttttaagggtttgcatttctaggacttggaatagttgaccatatacatagctaaaggacatgtccctgaatgagaccattatatatattatctgtaaaatatttcactatttttttattttataaatctttgtagaaataagcaatgaaatactactttcatcttttgaaatgggatttttcaaggcagtgtccttttggcattaaggtaggggggagttaatattctctctgccttgtttccacgtgaatcaatattaaagtcatggacattttaaaatctcaatttaatttcttcttatttactatgcagtatagccgtgaacaagtaatgtagatttagttttctcatcttcaaatgccctgatcaccctacctcacagggttgttgtggggataaataaaacttttatggaagca

SEQ ID NO: 122840 - DNA, 1895 bp, Homo sapiens
  Payload ID: 4091
  Gene Symbol: CTDSPL2
  Gene Name: CTD (carboxy-terminal domain, RNA polymerase II, polypeptide A) small phosphatase like 2
  Uniprot ID: Q05D32
  ENST ID: ENST00000558966
  CDS Start-End: 126-1526
gccgccgctgcttccaatctcagtcctcctcctcttccagggccgtctgccgggatctcctccccttctaaacctggtcctccagcggctctggcgccttgttttacatgtggcacccataaaagatgaggctgagaacacggaaagcttctcagcagtcaaatcaaatccaaacacaacgcactgccagagcaaagaggaaatattcagaggttgatgatagcctgccttcaggaggagaaaaaccatcgaagaatgaaaccggcttgttgtcttcaattaaaaaatttattaaaggaagcacacctaaggaagagagagaaaatccttcaaaacggagtagaattgaacgtgatatagataacaatttgatcacgtcaacaccaagagcaggagaaaaacctaacaaacagatatctcgagtaagacggaaaagtcaagtaaatggagaagctggtagttatgaaatgacaaatcaacatgtaaaacaaaatggaaaattagaagataatccttcctctggcagtcctccaaggactactttgttggggaccatattttcacctgtcttcaactttttttcaccagcaaataaaaatggaacgtcaggatcagattctccaggacaggctgtggaagctgaagaaatagtaaaacaacttgatatggaacaggtggatgagatcactaccagtactactacatcaactaatggagcagcttactcaaatcaagcagttcaagtgagaccatcactaaacaatggtttagaagaagcagaagaaacagttaatcgtgatatcccaccccttacagcaccagtaactccagatagtggttattcatcagcccacgcggaggccacctatgaagaagactgggaagtatttgacccctattatttcatcaaacatgtcccgccactgacagaagaacaactaaataggaaacctgctcttccgttgaaaacaagaagcacaccggaattctccctagttttagacttggatgaaacactagtgcattgtagtctaaatgagctagaagatgcagcacttacttttccagtccttttccaagatgtcatttatcaggtttatgtgagattaagaccatttttcagggaattcctggaacgaatgtctcagatgtatgagatcattctttttactgcttctaagaaggtgtatgcagacaagttactgaacatactagaccctaaaaagcaactggtcaggcaccggcttttccgtgaacattgtgtttgtgtacaaggaaactatataaaggacttaaatattcttggaagagatctttcaaaaactataataattgacaactcaccacaagcctttgcatatcagctttctaatggaatccctatagaaagttggtttatggataaaaatgacaatgaactcctaaaattgattccattcctggagaagcttgtagaactgaatgaagatgttcgaccacacatcagagacagatttcgcttgcatgatttgctgcccccagattaagtacaaagacttgtcaaatcactgaagggggagagaatgcaggacccttttggactaagacaaaaacattgccattactgttgaaattttgcatttttgtaccccgtcttgcttttcttatctttggtgcccaataataattaagggttacagaaagagactttatctatctcagatcgaatacatatagtaggtaggctaaaacagaagagtctttagaactagtgcaactccagtgaaattttttatgtacaggacatctgcagtttataaagaattctgtttctgccaccagcagtttgacctgtagtcacacaggattttatgataataacagagatgaaaatggacttttattttctctctgtt

SEQ ID NO: 122841 - DNA, 4255 bp, Homo sapiens
  Payload ID: 4091
  Gene Symbol: CTDSPL2
  Gene Name: CTD (carboxy-terminal domain, RNA polymerase II, polypeptide A) small phosphatase like 2
  Uniprot ID: Q05D32
  ENST ID: ENST00000558373
  CDS Start-End: 13-1197
cacccataaaagatgaggctgagaacacggaaagcttctcagcagtcaaatcaaatccaaacacaacgcactgccagagcaaagaggaaatattcagaggttgatgatagcctgccttcaggaggagaaaaaccatcgaagaatgaaaccggcttgttgtcttcaattaaaaaatttattaaaggaagcacacctaaggaagagagagaaaatccttcaaaacggagtagaattgaacgtgatatagataacaatttgatcacgtcaacaccaagagcaggagaaaaacctaacaaacagatatctcgagtaagacggaaaagtcaagtaaatggagaagctggtagttatgaaatgacaaatcaacatgtaaaacaaaatggaaaattagaagataatccttcctctggcagtcctccaaggactactttgttggggaccatattttcacctgtcttcaactttttttcaccagcaaataaaaatgcaccagtaactccagatagtggttattcatcagcccacgcggaggccacctatgaagaagactgggaagtatttgacccctattatttcatcaaacatgtcccgccactgacagaagaacaactaaataggaaacctgctcttccgttgaaaacaagaagcacaccggaattctccctagttttagacttggatgaaacactagtgcattgtagtctaaatgagctagaagatgcagcacttacttttccagtccttttccaagatgtcatttatcaggtttatgtgagattaagaccatttttcagggaattcctggaacgaatgtctcagatgtatgagatcattctttttactgcttctaagaaggtgtatgcagacaagttactgaacatactagaccctaaaaagcaactggtcaggcaccggcttttccgtgaacattgtgtttgtgtacaaggaaactatataaaggacttaaatattcttggaagagatctttcaaaaactataataattgacaactcaccacaagcctttgcatatcagctttctaatggaatccctatagaaagttggtttatggataaaaatgacaatgaactcctaaaattgattccattcctggagaagcttgtagaactgaatgaagatgttcgaccacacatcagagacagatttcgcttgcatgatttgctgcccccagattaagtacaaagacttgtcaaatcactgaagggggagagaatgcaggacccttttggactaagacaaaaacattgccattactgttgaaattttgcatttttgtaccccgtcttgcttttcttatctttggtgcccaataataattaagggttacagaaagagactttatctatctcagatcgaatacatatagtaggtaggctaaaacagaagagtctttagaactagtgcaactccagtgaaattttttatgtacaggacatctgcagtttataaagaattctgtttctgccaccagcagtttgacctgtagtcacacaggattttatgataataacagagatgaaaatggacttttattttctctctgtttggtgctctaagtgggtttgtagccacttttctgttactttatgattctcatttcaacaggaatggccagtaaaagttgttttatttttcctgttaaggtttataacctttttacatttttgacctgtattagattagaatttcattatgcattccttttagttgaggcgcttcatagttttctggagatagtcaatttttagttttttattatacatttgaatggccgttttcctgctttgtctgcctgcacattgtatatttgtttaaaaatattctctacttttagtctatgtaagtttcatttagaaagacatgcatttatattttgtttctgtaatattctactgtaggtgaaatcttttcaaaaatcaagagactgggtagataagaatatatgaatgactaatatacaaaagatttaaaccattgtgatggcgtatattctcaaatggtaatatcttgcaatggcacacagatttaatggataaaggtatacctcagacttcactgtgctcacaaatctttgaggagaaagtttggtcacctgtttggcttgatttagttactgctgcctttggttttctccaggaatgaagtattcagcacagtgactcagtatttttagttattttgcatgggctggtagtacctctgttatgctctcagttacaatcaatttaaaactgtataacagtcttggtacctaacagtagctatgcataatcctgtggcacagtacactcccaagccaccaatgcagttaatatgctctcatagtggtttttctatgctatatgaaaatagtcttcaagccttggttctctaatgcagctaccacaagaggttgatatttttatagtggcgtgtaatctccttttcgggaggctttttatggaaggtagaatttgtaaaagttcgtatgctttgcctctcaactgcattaacatgccacaggctcagactgtttttgtgtaaaggatgtcaaagaacggcactttttctaaagagaagtttgatattttgtatgcttgttaagaaagtacagtattggaaattaaaggtggacaactgataattgaggagtatgtcaattaattttttatgtatattacctgtttacttgtacaacttactgtacaaattacatgcagcttcattttcaaatgaatccttaaaataaggaaatctttttaggaaaacatttaatttttgtatttttgattttaaaggcatgagttatgtcaattttcagtgtattaatgaagattttaacttttcatcaggttgagtgttttcttactatattatctgttgtgtatgtagttagcatattgtgtcactgaactgtttaaaaatctagcatgtagagcaagcctgttttgtggaaaatccttattcattaaaaaaataatcatggcagattttctgcaaaaaaaaaacaaaagcatttgcaattcagaatactgatttttttaattttatttaaagaaaggtattttgcttgcaggaaaaaaatactacagattcattttaatgagaatctttgaaatgtatttatctttagggcatctgggcatctttatgctgtttgtcttctgtctttcttgaaataaaatgtacatacgttacctttacatatgctcttgctcaaaattgtgaacctagttacatttctccctgctcccttcctttttatgctcaaacagcgaaacccaaaacttaaaagatctgaactttcagcatgcattctgattgctgaaagatttcctgatttagtgcattctcaaaagggctttcccataatctaaagggaaatgtaagcacctatactcttgtgcctgtgggcacttcaataataaaaaccaactttttaaactaatcatcttttatcaatgataaagttgttttcagtcccacactaggagagttcctttaagtcagctgatcaagcataagatacttccgtaaagaaataaactaagaaaattttttatggcttgagaaaattccttgaggccaaattaatatatttttctttgttattttatttgagtcattttaaatttgttaatacaaaatttaagataatttacagagacaatttatccagcttccttctaccttaatacaatgttttgtcttcccattatcctctcttttctttatctgttggtagatgtaaaaaacttccatttagttaatcggaggtgtgtattttttaaattgaaatgtgcccagccccttcagctcacacaggaaacatgaactcttaaaaaactgactagtaaatgcaggagaggtggatacctgatgagacacagcgaaagtgacctgtatacacattacaactctggagtacatattaaagtcgtgctatttccagtggtaaatgtctgacttttaagacattcttttaaatatttgtatcattgttaggatgttttaatcagttgttttttaattccatgtaatatatgtagccctcatcagatttatatcaccatatttctccttgtgtcctaagagaattgatgacaattcgtaaccataaattgttttatattagctagtatgtatatttatttttacccaatggctttatctgtttcccaaaatttgtttgggatttgttgaaagcattgtgtaacttctataaacggctattttcttgtaactgtcagtgaaa

SEQ ID NO: 122842 - DNA, 863 bp, Homo sapiens
  Payload ID: 4091
  Gene Symbol: CTDSPL2
  Gene Name: CTD (carboxy-terminal domain, RNA polymerase II, polypeptide A) small phosphatase like 2
  ENST ID: ENST00000560620
  CDS Start-End: 1-259
ctattatttcatcaaacatgtcccgccactgacagaagaacaactaaataggaaacctgctcttccgttgaaaacaagaagcacaccggaattctccctagttttagacttggatgaaacactagtgcattgtagtctaaatgagctagaagatgcagcacttacttttccagtccttttccaagatgtcatttatcagtggtgttgtctccatctactggcaaagaagaaatatacacaagggtctgagatgatctaagagatattggagaaaccacattattaggtttatgtgagattaagaccatttttcagggaattcctggaacgaatgtctcagatgtatgagatcattctttttactgcttctaagaaggtgtatgcagacaagttactgaacatactagaccctaaaaagcaactggtcagggatagggaggctgtgtggtccactggttagagccaaggactgggagccaggaggatcctgggttccaatgcggggctaaccactgacttactgtgtgaccttgggcaagtcacttgacctccttgttcctcagtcaaccatctggaaaattggttaaaaagcaggacctcgctgacaaccagatgctgcatctgagctgagctttcttgggcaccggcttttccgtgaacattgtgtttgtgtacaaggaaactatataaaggacttaaatattcttggaagagatctttcaaaaactataataattgacaactcaccacaagcctttgcatatcagctttctaatggaatccctatagaaagttggtttatggataaaaatgacaatgaactcctaaaattgattccattcctggagaagcttgtagaactg

SEQ ID NO: 122843 - DNA, 591 bp, Homo sapiens
  Payload ID: 4091
  Gene Symbol: CTDSPL2
  Gene Name: CTD (carboxy-terminal domain, RNA polymerase II, polypeptide A) small phosphatase like 2
  ENST ID: ENST00000558791
  CDS Start-End: 96-591
gtgcggtgcagcaggtcggtaggcgggaaatggcgactggctgaaggagctggttctgttgctgctgcgggttttacatgtggcacccataaaagatgaggctgagaacacggaaagcttctcagcagtcaaatcaaatccaaacacaacgcactgccagagcaaagaggaaatattcagaggttgatgatagcctgccttcaggaggagaaaaaccatcgaagaatgaaaccggcttgttgtcttcaattaaaaaatttattaaaggaagcacacctaaggaagagagagaaaatccttcaaaacggagtagaattgaacgtgatatagataacaatttgatcacgtcaacaccaagagcaggagaaaaacctaacaaacagatatctcgagtaagacggaaaagtcaagtaaatggagaagctggtagttatgaaatgacaaatcaacatgtaaaacaaaatggaaaattagaagataatccttcctctggcagtcctccaaggactactttgttggggaccatattttcacctgtcttcaactttttttcaccagcaaataaaaatggaacgtcaggatcagattctc

SEQ ID NO: 122844 - DNA, 583 bp, Homo sapiens
  Payload ID: 4091
  Gene Symbol: CTDSPL2
  Gene Name: CTD (carboxy-terminal domain, RNA polymerase II, polypeptide A) small phosphatase like 2
  ENST ID: ENST00000558968
  CDS Start-End: 307-583
agtcctcctcctcttccagggccgtctgccgggatctcctccccttctaaacctggtcctccagcggctctggcgccttggtaggcatgcactctttggcgcctcgtacgtccactgtgcggagccgctcctgtctggactttcccctgggaacagaaagggagctcacttcccgccagcttcacctcttaggttgcggcctgcgttgtgatttctggggttagatttcactttgctacccacccccactccgatctcaagttcctagtccccaacctctggttttacatgtggcacccataaaagatgaggctgagaacacggaaagcttctcagcagtcaaatcaaatccaaacacaacgcactgccagagcaaagaggaaatattcagaggttgatgatagcctgccttcaggaggagaaaaaccatcgaagaatgaaaccggcttgttgtcttcaattaaaaaatttattaaaggaagcacacctaaggaagagagagaaaatccttcaaaacggagtagaattgaacgtgatatagataacaatttgatcacgtcaacaccaagagcaggagaaaaac

SEQ ID NO: 122845 - DNA, 575 bp, Homo sapiens
  Payload ID: 4091
  Gene Symbol: CTDSPL2
  Gene Name: CTD (carboxy-terminal domain, RNA polymerase II, polypeptide A) small phosphatase like 2
  ENST ID: ENST00000559793
  CDS Start-End: 223-575
aatctcagtcctcctcctcttccagggccgtctgccgggatctcctccccttctaaacctggtcctccagcggctctggcgccttggtaggcatgcactctttggcgcctcgtacgtccactgtgcggagccgctcctgtctggactttcccctgggaacagaaagggagctcacttcccgccagcttcacctcttagttttacatgtggcacccataaaagatgaggctgagaacacggaaagcttctcagcagtcaaatcaaatccaaacacaacgcactgccagagcaaagaggaaatattcagaggttgatgatagcctgccttcaggaggagaaaaaccatcgaagaatgaaaccggcttgttgtcttcaattaaaaaatttattaaaggaagcacacctaaggaagagagagaaaatccttcaaaacggagtagaattgaacgtgatatagataacaatttgatcacgtcaacaccaagagcaggagaaaaacctaacaaacagatatctcgagtaagacggaaaagtcaagtaaatggagaagctggtagttatgaaatgacaaatca

SEQ ID NO: 122846 - DNA, 4459 bp, Homo sapiens
  Payload ID: 4092
  Gene Symbol: CTDSPL
  Gene Name: CTD (carboxy-terminal domain, RNA polymerase II, polypeptide A) small phosphatase-like
  Uniprot ID: O15194
  ENST ID: ENST00000273179
  CDS Start-End: 27-857
gcgggcggccgccgcgccgcgcacccatggacggcccggccatcatcacccaggtgaccaaccccaaggaggacgagggccggttgccgggcgcgggcgagaaagcctcccagtgcaacgtcagcttaaagaagcagaggagccgcagcatccttagctccttcttctgctgcttccgtgattacaatgtggaggcccctccacccagcagccccagtgtgcttccgccactggtggaggagaatggtgggcttcagaagggtgaccagaggcaggtcattcccataccaagtccaccagctaagtaccttcttccagaggtgacggtgcttgactatggaaagaaatgtgtggtcattgatttagatgaaacattggtgcacagttcgtttaagcctattagtaatgctgattttattgttccggttgaaatcgatggaactatacatcaggtgtatgtgctgaagcggccacatgtggacgagttcctccagaggatggggcagctttttgaatgtgtgctctttactgccagcttggccaagtatgcagaccctgtggctgacctcctagaccgctggggtgtgttccgggcccggctcttcagagaatcatgtgtttttcatcgtgggaactacgtgaaggacctgagtcgccttgggcgggagctgagcaaagtgatcattgttgacaattcccctgcctcatacatcttccatcctgagaatgcagtgcctgtgcagtcctggttcgatgacatgacggacacggagctgctggacctcatccccttctttgagggcctgagccgggaggacgacgtgtacagcatgctgcacagactctgcaataggtagccctggcctctgcctgcctcccgcctgtgcactctggaacctctggcctcaggggacctgcctgtcctcagctccctgggagctgaaagtgaggatactccgtgctccaggccacagggtgaatgtggccatgcctacctgttttgtttttttaagaacagaaacaactattttaaaagaactcttttaagaaatttcataaagggacatgcattttactgggtttgcttttcttaaaacataccaaaaaagaaaaaaatagaaaaaaaaaaaaaaaaagcttgatctctatcagacttcctttcaactgtcctcccctccaagcagaccacctgtccccttctatcccagctcagagcagctgacccaactcagaatctctttcctacaggatgaagtgccttttgaatgttattttaagccgagagttaatttttctacacaacatatttccagacatcttttagtcttttattgtcttagatactataagaagatgaacatgacaattttctagaacctggtagcgtgtgtgtgtgtggcggggggtgctgagggaggggagtgagtcacaggagcctgtcccccaacaggtgtgactgctctgacaacctgtggcatgctgcagggtcaggctcctgataggaggatttcatgactatgtcattgtctccactcatttttgacccagtttggaatgtatctgcaattgtgtggctcaacactttaggaaacaatagattattttatattattatttctgatggtgacaagtttgtcttgaggtcacattttctccttgaaaagtgacatcctgtcacttctgctctcacactactgccatacatttgtgttttttgttgttattgtttgggtagagcagttacaagaaaccctaaaacccttggatataaaagaaatctgtttattgatttttaaatctttcctttccaaaagctggatacacatggagctgtttgggaattttccttgctgctaccgcgctgccaccaaatggaattgaccagcggctgttacactgttctttgccactgtgcctatgctcagaatatgctcactgctaagctacaaactcggacagggtcagaaacagaggtgtcccatcccattgcagcctccaccacctgtaaccccttcctggcattggccactgaagggtacaaaggcaaaaggaccacagcaccacttaggtgtagcatggattttaaactgcagtcagtatcagatcctgtttgataaataagctgactgttctctcttgagaacctgtggcctcaaccagccaccaagctgatgtggcccaagtccatctcttggtcttctcctttgaagcacagcctatttctgagccaagggttggggaagcctgtctagatgtgggactcattgccccaaaccagggagaggaagagctcccacagggagagcccaggctctctttgcagcctttcccagtttggtgtttaagcagtgccatgttccttgtttgacaacaagacagtctgtaaagtattgctcttaaaaacaattaaaaagaaccctttcatattggcaccattgccttagtcctctgtgggttggtcttcagccagcattctggtgggagtgactggcattaacaagactggaaatcgggggtcaaagtaaaatatctttgttttgctttcattcacaaagtaatgaagccagctgccaattacatcctcccaacagcactttggtctgtggactgctgtgtgaatattcagaagggaagtaagtattcagggggtaaacaggtctcccagcattctgagtgttccaaaccagtaatccacatgccaattcaaatagaacagccccttgctagatattaccacagataatgacagttacatggtagaactgcccatgccacaaatatttatttggaaaagtagtcattaaatgaacccactgccttaaatgtcttgaatgttgcagtcaagtgtctgtcatgtgttgatatccacacagaattaggccctaatgagagccttagaccctcaaccatgcccccttcgttggcatcacagggccttatttggaagagcgggcaaagaggatggaaatcataaaatatttcatgggaatcgaacctagggatagtgctccacttctgacgatggagtgaagacacttggcagacttgagccagacacttcacctagtagttcctgaaactgtgagcaccactgcactaagccagtgcggagctgttagggacgggcccagctcctgcaccacggacacagaatgtctggagagggccagcaggccctctgagggttctggaatctgtgcaccttatttgaccacactccaaaattctgtttttattttaacccttgaatctgctttatgtacataatcaaaatatctatatctatatctatatctatatctatatatttttaatcatctacatgtaaatgaagcaatagaattctaacataaggccaagaaatgagacgaatgtttggggtttatgttttttaaggtaaatacgggtattgtttttaattattaccatgtattaaattgtgggctttgaaacctaatgaaacctgttagccacttctctgtgccatatacttcccatgttaccaaaatacccccaactctttagccaaaagagaaccctgacctcctgagtttccatgctcctttctgtaccaggtttaaatgtagtcttctggagaagtatttttgacattgagctctgggacaggacaccttgggtttgtggactgcagcccactatgatgttattacttctctggccaggcctccagtggaagtgcacaggcactcccaatgttgttaatgctctgtcttccatttgttctggaatcctacgtgttggtctgtggttccatgcattagctgtttgtaaataatgcatttgcatactgaaaaaggaatgccacctgccacagttgatggtgaggaagctcctttgacgtggtgcaattttgatgagatgtctctggggacacgaggatgccctaatgatgctgacttgtcatggttgcagcatttgaacttttggtgttaaaaaaaaaaacctgtaagtctgtaacctggcaacattttacaaccctgtatttttaaagatggctttctaataaaaaatccagaaccacacagccctatggtcaaacaatcctacgtttgtgcctctgcttttaaaggtgctgtgctggacagttggcatgccagggttcgagaagagtgaatggcttgacgtacttgcagttaactgtgcaaaattggctggctgcctctgttcctactgtactgtaactttgatcatgtctgttcctgttccattctcccaggagcttctctgcagactgacacaccctcccccaccccgggtagtggagatgctggtgtctgggtagtcatggatttctgctggacatttgaatgtgataaacaatccagcattacttaggaaatgctacatgcggaatgtgcacgtttccaggggcgagtattgtcaatcaaaaggtttgcaatgatttccttcctgccaaaaataaacatgtgaaactgca

SEQ ID NO: 122847 - DNA, 4640 bp, Homo sapiens
  Payload ID: 4092
  Gene Symbol: CTDSPL
  Gene Name: CTD (carboxy-terminal domain, RNA polymerase II, polypeptide A) small phosphatase-like
  Uniprot ID: O15194
  ENST ID: ENST00000443503
  CDS Start-End: 241-1038
cgcggctccggggttcatggtgacgaggcggcggccgctcgagcccagcggcggcggcggcgggagctggggcgcgggcccgggccgcctctcccagagcgcggggccgggcggcgggcgcgcccaggcagcggctgcgagcgcccccccgcgccgcgcccccgcgccccccgcgccgcgcccccgcgcgcttggcttgcggggggccgggcctgcgggcggccgccgcgccgcgcacccatggacggcccggccatcatcacccaggtgaccaaccccaaggaggacgagggccggttgccgggcgcgggcgagaaagcctcccagtgcaacgtcagcttaaagaagcagaggagccgcagcatccttagctccttcttctgctgcttccgtgattacaatgtggaggcccctccacccagcagccccagtgtgcttccgccactggtggaggagaatggtgggcttcagaagccaccagctaagtaccttcttccagaggtgacggtgcttgactatggaaagaaatgtgtggtcattgatttagatgaaacattggtgcacagttcgtttaagcctattagtaatgctgattttattgttccggttgaaatcgatggaactatacatcaggtgtatgtgctgaagcggccacatgtggacgagttcctccagaggatggggcagctttttgaatgtgtgctctttactgccagcttggccaagtatgcagaccctgtggctgacctcctagaccgctggggtgtgttccgggcccggctcttcagagaatcatgtgtttttcatcgtgggaactacgtgaaggacctgagtcgccttgggcgggagctgagcaaagtgatcattgttgacaattcccctgcctcatacatcttccatcctgagaatgcagtgcctgtgcagtcctggttcgatgacatgacggacacggagctgctggacctcatccccttctttgagggcctgagccgggaggacgacgtgtacagcatgctgcacagactctgcaataggtagccctggcctctgcctgcctcccgcctgtgcactctggaacctctggcctcaggggacctgcctgtcctcagctccctgggagctgaaagtgaggatactccgtgctccaggccacagggtgaatgtggccatgcctacctgttttgtttttttaagaacagaaacaactattttaaaagaactcttttaagaaatttcataaagggacatgcattttactgggtttgcttttcttaaaacataccaaaaaagaaaaaaatagaaaaaaaaaaaaaaaaagcttgatctctatcagacttcctttcaactgtcctcccctccaagcagaccacctgtccccttctatcccagctcagagcagctgacccaactcagaatctctttcctacaggatgaagtgccttttgaatgttattttaagccgagagttaatttttctacacaacatatttccagacatcttttagtcttttattgtcttagatactataagaagatgaacatgacaattttctagaacctggtagcgtgtgtgtgtgtggcggggggtgctgagggaggggagtgagtcacaggagcctgtcccccaacaggtgtgactgctctgacaacctgtggcatgctgcagggtcaggctcctgataggaggatttcatgactatgtcattgtctccactcatttttgacccagtttggaatgtatctgcaattgtgtggctcaacactttaggaaacaatagattattttatattattatttctgatggtgacaagtttgtcttgaggtcacattttctccttgaaaagtgacatcctgtcacttctgctctcacactactgccatacatttgtgttttttgttgttattgtttgggtagagcagttacaagaaaccctaaaacccttggatataaaagaaatctgtttattgatttttaaatctttcctttccaaaagctggatacacatggagctgtttgggaattttccttgctgctaccgcgctgccaccaaatggaattgaccagcggctgttacactgttctttgccactgtgcctatgctcagaatatgctcactgctaagctacaaactcggacagggtcagaaacagaggtgtcccatcccattgcagcctccaccacctgtaaccccttcctggcattggccactgaagggtacaaaggcaaaaggaccacagcaccacttaggtgtagcatggattttaaactgcagtcagtatcagatcctgtttgataaataagctgactgttctctcttgagaacctgtggcctcaaccagccaccaagctgatgtggcccaagtccatctcttggtcttctcctttgaagcacagcctatttctgagccaagggttggggaagcctgtctagatgtgggactcattgccccaaaccagggagaggaagagctcccacagggagagcccaggctctctttgcagcctttcccagtttggtgtttaagcagtgccatgttccttgtttgacaacaagacagtctgtaaagtattgctcttaaaaacaattaaaaagaaccctttcatattggcaccattgccttagtcctctgtgggttggtcttcagccagcattctggtgggagtgactggcattaacaagactggaaatcgggggtcaaagtaaaatatctttgttttgctttcattcacaaagtaatgaagccagctgccaattacatcctcccaacagcactttggtctgtggactgctgtgtgaatattcagaagggaagtaagtattcagggggtaaacaggtctcccagcattctgagtgttccaaaccagtaatccacatgccaattcaaatagaacagccccttgctagatattaccacagataatgacagttacatggtagaactgcccatgccacaaatatttatttggaaaagtagtcattaaatgaacccactgccttaaatgtcttgaatgttgcagtcaagtgtctgtcatgtgttgatatccacacagaattaggccctaatgagagccttagaccctcaaccatgcccccttcgttggcatcacagggccttatttggaagagcgggcaaagaggatggaaatcataaaatatttcatgggaatcgaacctagggatagtgctccacttctgacgatggagtgaagacacttggcagacttgagccagacacttcacctagtagttcctgaaactgtgagcaccactgcactaagccagtgcggagctgttagggacgggcccagctcctgcaccacggacacagaatgtctggagagggccagcaggccctctgagggttctggaatctgtgcaccttatttgaccacactccaaaattctgtttttattttaacccttgaatctgctttatgtacataatcaaaatatctatatctatatctatatctatatctatatatttttaatcatctacatgtaaatgaagcaatagaattctaacataaggccaagaaatgagacgaatgtttggggtttatgttttttaaggtaaatacgggtattgtttttaattattaccatgtattaaattgtgggctttgaaacctaatgaaacctgttagccacttctctgtgccatatacttcccatgttaccaaaatacccccaactctttagccaaaagagaaccctgacctcctgagtttccatgctcctttctgtaccaggtttaaatgtagtcttctggagaagtatttttgacattgagctctgggacaggacaccttgggtttgtggactgcagcccactatgatgttattacttctctggccaggcctccagtggaagtgcacaggcactcccaatgttgttaatgctctgtcttccatttgttctggaatcctacgtgttggtctgtggttccatgcattagctgtttgtaaataatgcatttgcatactgaaaaaggaatgccacctgccacagttgatggtgaggaagctcctttgacgtggtgcaattttgatgagatgtctctggggacacgaggatgccctaatgatgctgacttgtcatggttgcagcatttgaacttttggtgttaaaaaaaaaaacctgtaagtctgtaacctggcaacattttacaaccctgtatttttaaagatggctttctaataaaaaatccagaaccacacagccctatggtcaaacaatcctacgtttgtgcctctgcttttaaaggtgctgtgctggacagttggcatgccagggttcgagaagagtgaatggcttgacgtacttgcagttaactgtgcaaaattggctggctgcctctgttcctactgtactgtaactttgatcatgtctgttcctgttccattctcccaggagcttctctgcagactgacacaccctcccccaccccgggtagtggagatgctggtgtctgggtagtcatggatttctgctggacatttgaatgtgataaacaatccagcattacttaggaaatgctacatgcggaatgtgcacgtttccaggggcgagtattgtcaatcaaaaggtttgcaatgatttccttcctgccaaaaataaacatgtgaaactgca

SEQ ID NO: 122848 - DNA, 368 bp, Homo sapiens
  Payload ID: 4092
  Gene Symbol: CTDSPL
  Gene Name: CTD (carboxy-terminal domain, RNA polymerase II, polypeptide A) small phosphatase-like
  ENST ID: ENST00000416688
  CDS Start-End: 1-280
taagtaccttcttccagaggtgacggtgcttgactatggaaagaaatgtgtggtcattgatttagatgaaacattggtgcacagttcgtttaagcctattagtaatgctgattttattgttccggttgaaatcgatggaactatacatcagcaggcaacaggaaaatgccacaagtcacccacttatggtggactctcgggaaaaagtgtccattttcaatgccagctgctccagactgatcttatcattcctgcatcgttttctccagagaatctttagcaaatacccaccccaaaagaaaaagggggaagggtgtgagttttcggatccgcaggctgctatgaataaagatgccgtagtcagttgg

SEQ ID NO: 122849 - DNA, 793 bp, Homo sapiens
  Payload ID: 4092
  Gene Symbol: CTDSPL
  Gene Name: CTD (carboxy-terminal domain, RNA polymerase II, polypeptide A) small phosphatase-like
  ENST ID: ENST00000447745
  CDS Start-End: 1-591
gatttagatgaaacattggtgcacagttcgtttaagcctattagtaatgctgattttattgttccggttgaaatcgatggaactatacatcaggtgtatgtgctgaagcggccacatgtggacgagttcctccagaggatggggcagctttttgaatgtgtgctctttactgccagcttggccaagtatgcagaccctgtggctgacctcctagaccgctggggtgtgttccgggcccggctcttcagagaatcatgtgtttttcatcgtgggaactacgtgaaggacctgagtcgccttgggcgggagctgagcaaagtgatcattgttgacaattcccctgcctcatacatcttccatcctgagaatgcagtgcctgtgcagtcctggttcgatgacatgacggacacggagctgctggacctcatccccttctttgagggcctgagccgggaggacgacgtgtacagcatgctgcacagactctgcaatagtaatgaagccagctgccaattacatcctcccaacagcactttggtctgtggactgctgtgtgaatattcagaagggaagagcttctctgcagactgacacaccctcccccaccccgggtagtggagatgctggtgtctgggtagtcatggatttctgctggacatttgaatgtgataaacaatccagcattacttaggaaatgctacatgcggaatgtgcacgtttccaggggcgagtattgtcaatcaaaaggtttgcaatgatttccttcctgccaaaaataaacatgtgaaactgc

SEQ ID NO: 122850 - DNA, 371 bp, Homo sapiens
  Payload ID: 4092
  Gene Symbol: CTDSPL
  Gene Name: CTD (carboxy-terminal domain, RNA polymerase II, polypeptide A) small phosphatase-like
  ENST ID: ENST00000435525
  CDS Start-End: 23-190
gcggccgccgcgccgcgcacccatggacggcccggccatcatcacccaggtgaccaaccccaaggaggacgagggccggttgccgggcgcgggcgagaaagattctctttctgagaagggcaagaagacgagtggcagaagaatcagaaagttgtctacacacctgggtggcaggtgtaaccctcgctaaagagagaaggaggacagccaggcgcggtggttcacgcctataatcccagcactttgggaggccaagcctcccagtgcaacgtcagcttaaagaagcagaggagccgcagcatccttagctccttcttctgctgcttccgtgattacaatgtggaggcccctccacccagcagccccagtgt

SEQ ID NO: 122851 - DNA, 804 bp, Homo sapiens
  Payload ID: 4092
  Gene Symbol: CTDSPL
  Gene Name: CTD (carboxy-terminal domain, RNA polymerase II, polypeptide A) small phosphatase-like
  ENST ID: ENST00000436654
  CDS Start-End: 1-311
aatcatgtgtttttcatcgtgggaactacgtgaaggacctgagtcgccttgggcgggagctgagcaaagtgatcattgttgacaattcccctgcctcatacatcttccatcctgagaatgcagtgcctgtgcagtcctggttcgatgacatgacggacacggagctgctggacctcatccccttctttgagggcctgagccgggaggacgacgtgtacagcatgctgcacagactctgcaatagctggatacacatggagctgtttgggaattttccttgctgctaccgcgctgccaccaaatggaattgaccagcggctgttacactgttctttgccactgtgcctatgctcagaatatgctcactgctaagctacaaactcggacagggtcagaaacagaggtgtcccatcccattgcagcctccaccacctgtaaccccttcctggcattggccactgaagggtacaaaggcaaaaggaccacagcaccacttaggtgtagcatggattttaaactgcagtcagtatcagatcctgtttgataaataagctgactgttctctcttgagaacctgtggcctcaaccagccaccaagctgatgtggcccaagtccatctcttggtcttctcctttgaagcacagcctatttctgagccaagggttggggaagcctgtctagatgtgggactcattgccccaaaccagggagaggaagagctcccacagggagagcccaggctctctttgcagcctttcccagtttggtgtttaagcagtgccatgttccttgtttgacaacaa

SEQ ID NO: 122852 - DNA, 1549 bp, Homo sapiens
  Payload ID: 4093
  Gene Symbol: CTDNEP1
  Gene Name: CTD nuclear envelope phosphatase 1
  Uniprot ID: O95476
  ENST ID: ENST00000318988
  CDS Start-End: 469-1203
aaatggcgcctgtcagagtgggaaacccagctgcagaggctgcagccccggtccccagcggctaaaggacccccgagctcggggagggggaggccgctccggcccagcgctctgcgccctccggctccccctccccctccttccctgctccttcgctctgcaggtctcggaggaccccatcctagccctacctgtctcggcccgcaacctccccgaagccgtcggtgccactcccagcccatgtgggcccccgcgggctgcccacgcctgtcccccagctccccgttccgctgggctttaccctcgccaggggtggctttctgagccgcccgctccgtgcccctctctgcagcctctcctgccactcggggcccccgttccccctcccggcggcggggggctgcccccggggggctggcggagctgggccgcgggggccccggggccggcggtgccggggtcatcgggatgatgcggacgcagtgtctgctggggctgcgcacgttcgtggccttcgccgccaagctctggagcttcttcatttaccttctgcggaggcagatccgcacggtaattcagtaccaaactgttcgatatgatatcctccccttatctcctgtgtcccggaatcggctagcccaggtgaagaggaagatcctggtgctggatctggatgagacacttattcactcccaccatgatggggtcctgaggcccacagtccggcctggtacgcctcctgacttcatcctcaaggtggtaatagacaaacatcctgtccggttttttgtacataagaggccccatgtggatttcttcctggaagtggtgagccagtggtacgagctggtggtgtttacagcaagcatggagatctatggctctgctgtggcagataaactggacaatagcagaagcattcttaagaggagatattacagacagcactgcactttggagttgggcagctacatcaaggacctctctgtggtccacagtgacctctccagcattgtgatcctggataactccccaggggcttacaggagccatccagacaatgccatccccatcaaatcctggttcagtgaccccagcgacacagcccttctcaacctgctcccaatgctggatgccctcaggttcaccgctgatgttcgttccgtgctgagccgaaaccttcaccaacatcggctctggtgacagctgctccccctccacctgagttggggtgggggggaaagggagggcgagcccttgggatgccgtctgatgccctgtccaatgtgaggactgcctgggcagggtctgcccctcccacccctctctgccctgggagccctacactccacttggagtctggatggacacatgggccaggggctctgaagcagcctcactcttaacttcgtgttcacactccatggaaaccccagactgggacacaggcggaagcctaggagagccgaatcagtgtttgtgaagaggcaggactggccagagtgacagacatacggtgatccaggaggctcaaagagaagccaagtca

SEQ ID NO: 122853 - DNA, 741 bp, Homo sapiens
  Payload ID: 4093
  Gene Symbol: CTDNEP1
  Gene Name: CTD nuclear envelope phosphatase 1
  ENST ID: ENST00000571409
  CDS Start-End: 367-741
aacgggccgagcactcgggcgtcctcccaccattaagacctaacatagtctggaatgagaggtctcggaggaccccatcctagccctacctgtctcggcccgcaacctccccgaagccgtcggtgccactcccagcccatgtgggcccccgcgggctgcccacgcctgtcccccagctccccgttccgctgggctttaccctcgccaggggtggctttctgagccgcccgctccgtgcccctctctgcagcctctcctgccactcggggcccccgttccccctcccggcggcggggggctgcccccggggggctggcggagctgggccgcgggggccccggggccggcggtgccggggtcatcgggatgatgcggacgcagtgtctgctggggctgcgcacgttcgtggccttcgccgccaagctctggagcttcttcatttaccttctgcggaggcagatccgcacggtaattcagtaccaaactgttcgatatgatatcctccccttatctcctgtgtcccggaatcggctagcccaggtgaagaggaagatcctggtgctggatctggatgagacacttattcactcccaccatgatggggtcctgaggcccacagtccggcctggtacgcctcctgacttcatcctcaaggtggtaatagacaaacatcctgtccggttttttgtacataagaggccccatgtggatttcttcctggaagtggtgagccagtggtac

SEQ ID NO: 122854 - DNA, 1506 bp, Homo sapiens
  Payload ID: 4093
  Gene Symbol: CTDNEP1
  Gene Name: CTD nuclear envelope phosphatase 1
  Uniprot ID: O95476
  ENST ID: ENST00000574205
  CDS Start-End: 387-1121
cttcccttttcccttcctcccttttccctagccccctcccccactgccccctcccccaattatccttccccttccctccaggtctcggaggaccccatcctagccctacctgtctcggcccgcaacctccccgaagccgtcggtgccactcccagcccatgtgggcccccgcgggctgcccacgcctgtcccccagctccccgttccgctgggctttaccctcgccaggggtggctttctgagccgcccgctccgtgcccctctctgcagcctctcctgccactcggggcccccgttccccctcccggcggcggggggctgcccccggggggctggcggagctgggccgcgggggccccggggccggcggtgccggggtcatcgggatgatgcggacgcagtgtctgctggggctgcgcacgttcgtggccttcgccgccaagctctggagcttcttcatttaccttctgcggaggcagatccgcacggtaattcagtaccaaactgttcgatatgatatcctccccttatctcctgtgtcccggaatcggctagcccaggtgaagaggaagatcctggtgctggatctggatgagacacttattcactcccaccatgatggggtcctgaggcccacagtccggcctggtacgcctcctgacttcatcctcaaggtggtaatagacaaacatcctgtccggttttttgtacataagaggccccatgtggatttcttcctggaagtggtgagccagtggtacgagctggtggtgtttacagcaagcatggagatctatggctctgctgtggcagataaactggacaatagcagaagcattcttaagaggagatattacagacagcactgcactttggagttgggcagctacatcaaggacctctctgtggtccacagtgacctctccagcattgtgatcctggataactccccaggggcttacaggagccatccagacaatgccatccccatcaaatcctggttcagtgaccccagcgacacagcccttctcaacctgctcccaatgctggatgccctcaggttcaccgctgatgttcgttccgtgctgagccgaaaccttcaccaacatcggctctggtgacagctgctccccctccacctgagttggggtgggggggaaagggagggcgagcccttgggatgccgtctgatgccctgtccaatactgggacacaggcggaagcctaggagagccgaatcagtgtttgtgaagaggcaggactggccagagtgacagacatacggtgatccaggaggctcaaagagaagccaagtcagctttgttgtgatttgattttttttaaaaaactcttgtacaaaactgatctaattcttcactcctgctccaagggctgggctgtgggtgggatactgggattttgggccactggattttccctaaatttgtcccccctttactctccctctatttttctctccttagactccctcagacctgtaaccag

SEQ ID NO: 122855 - DNA, 606 bp, Homo sapiens
  Payload ID: 4093
  Gene Symbol: CTDNEP1
  Gene Name: CTD nuclear envelope phosphatase 1
  ENST ID: ENST00000576613
  CDS Start-End: 1-606
cgcagtgtctgctggggctgcgcacgttcgtggccttcgccgccaagctctggagcttcttcatttaccttctgcggaggcagatccgcacggtaattcagtaccaaactgttcgatatgatatcctccccttatctcctgtgtcccggaatcggctagcccaggtgaagaggaagatcctggtgctggatctggatgagacacttattcactcccaccatgatggggtcctgaggcccacagtccggcctggtacgcctcctgacttcatcctcaaggtgagccagtggtacgagctggtggtgtttacagcaagcatggagatctatggctctgctgtggcagataaactggacaatagcagaagcattcttaagaggagatattacagacagcactgcactttggagttgggcagctacatcaaggacctctctgtggtccacagtgacctctccagcattgtgatcctggataactccccaggggcttacaggagccatccagacaatgccatccccatcaaatcctggttcagtgaccccagcgacacagcccttctcaacctgctcccaatgctggatgccctcaggttcaccgctgatg

SEQ ID NO: 122856 - DNA, 857 bp, Homo sapiens
  Payload ID: 4093
  Gene Symbol: CTDNEP1
  Gene Name: CTD nuclear envelope phosphatase 1
  ENST ID: ENST00000572043
  CDS Start-End: 376-711
cttcctcctcggggtgaaacgggccgagcactcgggcgtcctcccaccattaagacctaacatagtctggaatgagaggtaattcagtaccaaactgttcgatatgatatcctccccttatctcctgtgtcccggaatcggctagcccaggtgaagaggaagatcctggtgctggatctggatgagacacttattcactcccaccatgatggggtcctgaggcccacagtccggcctggtacgcctcctgacttcatcctcaaggtggtaatagacaaacatcctgtccggttttttgtacataagaggccccatgtggatttcttcctggaagtggtgagccagtggtacgagctggtggtgtttacagcaagcatggagatctatggctctgctgtggcagataaactggacaatagcagaagcattcttaagaggagatattacagacagcactgcactttggagttgggcagctacatcaaggacctctctgtggtccacagtgacctctccagcattgtgatcctggataactccccaggggcttacaggagccatccagacaatgccatccccatcaaatcctggttcagtgaccccagcgacacagcccttctcaacctgctcccaatgctggatgccctcaggttcaccgctgatgttcgttccgtgctgagccgaaaccttcaccaacatcggctctggtgacagctgctccccctccacctgagttggggtgggggggaaagggagggcgagcccttgggatgccgtctgatgccctgtccaatgtgaggactgcctgggcagggtctgcccctcccacccctctctgccctgggagccctacactc

SEQ ID NO: 122857 - DNA, 986 bp, Homo sapiens
  Payload ID: 4093
  Gene Symbol: CTDNEP1
  Gene Name: CTD nuclear envelope phosphatase 1
  ENST ID: ENST00000570828
  CDS Start-End: 1-626
ttcagtaccaaactgttcgatatgatatcctccccttatctcctgtgtcccggaatcggctagcccaggtgaagaggaagatcctggtgctggatctggatgagacacttattcactcccaccatgatggggtcctgaggcccacagtccggcctggtacgcctcctgacttcatcctcaaggtggtaatagacaaacatcctgtccggttttttgtacataagaggccccatgtggatttcttcctggaagtggtgagccagtggtacgagctggtggtgtttacagcaagcatggagatctatggctctgctgtggcagataaactggacaatagcagaagcattcttaagaggagatattacagacagcactgcactttggagttgggcagctacatcaaggacctctctgtggtccacagtgacctctccagcattgtgatcctggataactccccaggggcttacaggagccatccagacaatgccatccccatcaaatcctggttcagtgaccccagcgacacagcccttctcaacctgctcccaatgctggatgccctcaggttcaccgctgatgttcgttccgtgctgagccgaaaccttcaccaacatcggctctgactgggacacaggcggaagcctaggagagccgaatcagtgtttgtgaagaggcaggactggccagagtgacagacatacggtgatccaggaggctcaaagagaagccaagtcagctttgttgtgatttgattttttttaaaaaactcttgtacaaaactgatctaattcttcactcctgctccaagggctgggctgtgggtgggatactgggattttgggccactggattttccctaaatttgtcccccctttactctccctctatttttctctccttagactccctcagacctgtaaccagctttgtgtcttttttccttttctctcttttaaaccatgcattataactttgaaaccaaa

SEQ ID NO: 122858 - DNA, 1708 bp, Homo sapiens
  Payload ID: 4093
  Gene Symbol: CTDNEP1
  Gene Name: CTD nuclear envelope phosphatase 1
  Uniprot ID: O95476
  ENST ID: ENST00000574322
  CDS Start-End: 380-1114
tttcccttcctcccttttccctagccccctcccccactgccccctcccccaattatccttccccttccctccaggtctcggaggaccccatcctagccctacctgtctcggcccgcaacctccccgaagccgtcggtgccactcccagcccatgtgggcccccgcgggctgcccacgcctgtcccccagctccccgttccgctgggctttaccctcgccaggggtggctttctgagccgcccgctccgtgcccctctctgcagcctctcctgccactcggggcccccgttccccctcccggcggcggggggctgcccccggggggctggcggagctgggccgcgggggccccggggccggcggtgccggggtcatcgggatgatgcggacgcagtgtctgctggggctgcgcacgttcgtggccttcgccgccaagctctggagcttcttcatttaccttctgcggaggcagatccgcacggtaattcagtaccaaactgttcgatatgatatcctccccttatctcctgtgtcccggaatcggctagcccaggtgaagaggaagatcctggtgctggatctggatgagacacttattcactcccaccatgatggggtcctgaggcccacagtccggcctggtacgcctcctgacttcatcctcaaggtggtaatagacaaacatcctgtccggttttttgtacataagaggccccatgtggatttcttcctggaagtggtgagccagtggtacgagctggtggtgtttacagcaagcatggagatctatggctctgctgtggcagataaactggacaatagcagaagcattcttaagaggagatattacagacagcactgcactttggagttgggcagctacatcaaggacctctctgtggtccacagtgacctctccagcattgtgatcctggataactccccaggggcttacaggagccatccagacaatgccatccccatcaaatcctggttcagtgaccccagcgacacagcccttctcaacctgctcccaatgctggatgccctcaggttcaccgctgatgttcgttccgtgctgagccgaaaccttcaccaacatcggctctggtgacagctgctccccctccacctgagttggggtgggggggaaagggagggcgagcccttgggatgccgtctgatgccctgtccaatgtgaggactgcctgggcagggtctgcccctcccacccctctctgccctgggagccctacactccacttggagtctggatggacacatgggccaggggctctgaagcagcctcactcttaacttcgtgttcacactccatggaaaccccagactgggacacaggcggaagcctaggagagccgaatcagtgtttgtgaagaggcaggactggccagagtgacagacatacggtgatccaggaggctcaaagagaagccaagtcagctttgttgtgatttgattttttttaaaaaactcttgtacaaaactgatctaattcttcactcctgctccaagggctgggctgtgggtgggatactgggattttgggccactggattttccctaaatttgtcccccctttactctccctctatttttctctccttagactccctcagacctgtaaccagctttgtgtcttttttccttttctctcttttaaaccatgcattataactttgaaaccaaa

SEQ ID NO: 122859 - DNA, 876 bp, Homo sapiens
  Payload ID: 4093
  Gene Symbol: CTDNEP1
  Gene Name: CTD nuclear envelope phosphatase 1
  ENST ID: ENST00000575783
  CDS Start-End: 207-876
gtcccggtgaagcgaatacacgtcaccaccggaagtagtgtcaaaggggaagaggagggggaaagacaggaagagggagtcctttggacgcctctcctgccactcggggcccccgttccccctcccggcggcggggggctgcccccggggggctggcggagctgggccgcgggggccccggggccggcggtgccggggtcatcgggatgatgcggacgcagtgtctgctggggctgcgcacgttcgtggccttcgccgccaagctctggagcttcttcatttaccttctgcggaggcagatccgcacggtaattcagtaccaaactgttcgatatgatatcctccccttatctcctgtgtcccggaatcggctagcccaggtgaagaggaagatcctggtgctggatctggatgagacacttattcactcccaccatgatggggtcctgaggcccacagtccggcctggtacgcctcctgacttcatcctcaaggtggtaatagacaaacatcctgtccggttttttgtacataagaggccccatgtggatttcttcctggaagtggtgagccagtggtacgagctggtggtgtttacagcaagcatggagatctatggctctgctgtggcagataaactggacaatagcagaagcattcttaagaggagatattacagacagcactgcactttggagttgggcagctacatcaaggacctctctgtggtccacagtgacctctccagcattgtgatcctggataactccccaggggcttacaggagccatccagacaatgccatccccatcaaatcctggttcagtgaccccagcgacacagcccttctcaacctgctcccaatgctggatgccc

SEQ ID NO: 122860 - DNA, 506 bp, Homo sapiens
  Payload ID: 4093
  Gene Symbol: CTDNEP1
  Gene Name: CTD nuclear envelope phosphatase 1
  ENST ID: ENST00000570380
  CDS Start-End: 35-238
gggccccggggccggcggtgccggggtcatcgggatgatgcggacgcagtgtctgctggggctgcgcacgttcgtggccttcgccgccaagctctggagcttcttcatttaccttctgcggaggcagatccgcacggtaattcagtaccaaactgttcgatatgatatcctccccttatctcctgtgtcccggaatcggctaggtgaagaggaagatcctggtgctggatctggatgagacacttattcactcccaccatgatggggtcctgaggcccacagtccggcctggtacgcctcctgacttcatcctcaaggtggtaatagacaaacatcctgtccggttttttgtacataagaggccccatgtggatttcttcctggaagtggtgagccagtggtacgagctggtggtgtttacagcaagcatggagatctatggctctgctgtggcagataaactggacaatagcagaagcattcttaagaggagatattacagacag

SEQ ID NO: 122861 - DNA, 1724 bp, Homo sapiens
  Payload ID: 4093
  Gene Symbol: CTDNEP1
  Gene Name: CTD nuclear envelope phosphatase 1
  Uniprot ID: O95476
  ENST ID: ENST00000573600
  CDS Start-End: 423-1157
cgccatagaccgcgcaggaggaacttagtcccggtgaagcgaatacacgtcaccaccggaagtagtgtcaaaggggaagaggagggggaaagacaggaagagggagtcctttggacggtctcggaggaccccatcctagccctacctgtctcggcccgcaacctccccgaagccgtcggtgccactcccagcccatgtgggcccccgcgggctgcccacgcctgtcccccagctccccgttccgctgggctttaccctcgccaggggtggctttctgagccgcccgctccgtgcccctctctgcagcctctcctgccactcggggcccccgttccccctcccggcggcggggggctgcccccggggggctggcggagctgggccgcgggggccccggggccggcggtgccggggtcatcgggatgatgcggacgcagtgtctgctggggctgcgcacgttcgtggccttcgccgccaagctctggagcttcttcatttaccttctgcggaggcagatccgcacggtaattcagtaccaaactgttcgatatgatatcctccccttatctcctgtgtcccggaatcggctagcccaggtgaagaggaagatcctggtgctggatctggatgagacacttattcactcccaccatgatggggtcctgaggcccacagtccggcctggtacgcctcctgacttcatcctcaaggtggtaatagacaaacatcctgtccggttttttgtacataagaggccccatgtggatttcttcctggaagtggtgagccagtggtacgagctggtggtgtttacagcaagcatggagatctatggctctgctgtggcagataaactggacaatagcagaagcattcttaagaggagatattacagacagcactgcactttggagttgggcagctacatcaaggacctctctgtggtccacagtgacctctccagcattgtgatcctggataactccccaggggcttacaggagccatccagacaatgccatccccatcaaatcctggttcagtgaccccagcgacacagcccttctcaacctgctcccaatgctggatgccctcaggttcaccgctgatgttcgttccgtgctgagccgaaaccttcaccaacatcggctctggtgacagctgctccccctccacctgagttggggtgggggggaaagggagggcgagcccttgggatgccgtctgatgccctgtccaatgtgaggactgcctgggcagggtctgcccctcccacccctctctgccctgggagccctacactccacttggagtctggatggacacatgggccaggggctctgaagcagcctcactcttaacttcgtgttcacactccatggaaaccccagactgggacacaggcggaagcctaggagagccgaatcagtgtttgtgaagaggcaggactggccagagtgacagacatacggtgatccaggaggctcaaagagaagccaagtcagctttgttgtgatttgattttttttaaaaaactcttgtacaaaactgatctaattcttcactcctgctccaagggctgggctgtgggtgggatactgggattttgggccactggattttccctaaatttgtcccccctttactctccctctatttttctctccttagactccctcagacctgtaaccagctttgtgtcttttttccttttctctcttttaa

SEQ ID NO: 122862 - DNA, 579 bp, Homo sapiens
  Payload ID: 4094
  Gene Symbol: CNEP1R1
  Gene Name: CTD nuclear envelope phosphatase 1 regulatory subunit 1
  ENST ID: ENST00000389134
  CDS Start-End: 83-277
agttggcgctgcgggccgggcgggggccgcggaagctgcgatgcggacagggcagcggcggtgacccgagctgccgcccgacatgaactcgctggagcaggcggaagccccgcgagttgtatccctgattcctgcggtggtttccggtaactgccaagatctcaaggcttttgagaggagacttactgaatatattcattgtttgcaacctgctactggacgctggagaagtgtccttcttcacatcattatggaatcacccatttttcaccattagctgtatcactctaataggcttgttctttgctggaatacacaagagagtagttgcaccatcaattatagctgctcgatgtcgaacggtattagcagaatacaatatgtcttgtgatgatacaggaaaactaattttgaaacctaggcctcatgttcaatgacaatcttcactcattgttatgggacttaaaatagcctttcttcgaataagtgatacagcaaaaagccataaaggattccttttgcggttggatatgtaaaggtcatagcagcaactgacaagaagtgtgcaatatttacctg

SEQ ID NO: 122863 - DNA, 2117 bp, Homo sapiens
  Payload ID: 4094
  Gene Symbol: CNEP1R1
  Gene Name: CTD nuclear envelope phosphatase 1 regulatory subunit 1
  Uniprot ID: Q8N9A8
  ENST ID: ENST00000427478
  CDS Start-End: 111-488
ggggcagcggggagcggttagaggtgggagttggcgctgcgggccgggcgggggccgcggaagctgcgatgcggacagggcagcggcggtgacccgagctgccgcccgacatgaactcgctggagcaggcggaagatctcaaggcttttgagaggagacttactgaatatattcattgtttgcaacctgctactggacgctggagaatgcttcttatagtggtatctgtctgtacagctactggtgcctggaactggttaatagaccctgagacacaaaaggtgtccttcttcacatcattatggaatcacccatttttcaccattagctgtatcactctaataggcttgttctttgctggaatacacaagagagtagttgcaccatcaattatagctgctcgatgtcgaacggtattagcagaatacaatatgtcttgtgatgatacaggaaaactaattttgaaacctaggcctcatgttcaatgacaatcttcactcattgttatgggacttaaaatagcctttcttcgaataagtgatacagcaaaaagccataaaggattccttttgcggttggatatgtaaaggtcatagcagcaactgacaagaagtgtgcaatatttacctggattatcttgatgatggtgactcattatcagtgctttggtacttttgattacctgtgtttcagtattagtgtcactttagtacttcagatcctgcaaatatttttgcagatgaagtatgtatgtatgttactaagttaaacttagaaacagaacctcattcagtttttataatgtatttttgcaaactactgtaaatagcaaatcaatgccaatgttaaacaaagaggaaaacgttgtgtggactttgttctcttgcaccagtatttcaggaacatctgcttgccatccccacagctctttaaaactggctattatgtgtgcctttcattcttacatttctaatcatactgcaggaaaaacattggattcagcttagactgaggaaaactctccattatgttgtaagaaattatagatgttttgagagacactttttgttaaaccagatattgaactccagcaactattgtggttatatttttagttcattgttctcatttaatgctaaatatcctttatattgctttaataattttcttttttttttttttttttttagacggagtctcgctctgttgccaggctggagggcagtggcacgatcttggctttctgcaacctctgcctcccaggttcaagcgattctcctgcttcagccttctgagtagctgggactacaggcgcatgccaccatgcccagctaatttttttgtatttttagtagagacggggtttcaccacgttggccaggatggtttcgatctcctgacctcgtgatcctcctgcctcatcctcccaaaatgctgggattacaggcataagccaccgtgcctggcctctttaataatttttaaaataccctaaaggcttgtgaatatacaagtctactgataaattatgtattgtctgggaatttgatagtcattgttttagataactggattttacgctgtggtagacaggctgtgacactagtgttgcacaggtgtaattggtcatcctatgccttcaccagaataacttgggagtggtgccagaaactagagtctacaattctcactgtttagagagtgttaatgacatactgtgtatgcataatagccgcatgtactataatagcccttaaaattaaactattgggattgctgtaaatattttaaagtactggaggtgccttttacctgtttattagattttgaaaaggtttaaattatttcatgagcaatcttttaaatttcatttaacataaagctgaaaattcaataacaggataaaaaagctttttaacaaggctgccatttaacttaaatgtgttcatcttagctttcacttgtataaaatttgattctttgaactgcagcaataaaaccctcagctcctaagaagtcttaagagggtattctatatattctgctttgttttattttctgtaaattttgtaggtaaatatgtgcattaaaaataaatactttatatataactcgtg

SEQ ID NO: 122864 - DNA, 2965 bp, Homo sapiens
  Payload ID: 4094
  Gene Symbol: CNEP1R1
  Gene Name: CTD nuclear envelope phosphatase 1 regulatory subunit 1
  Uniprot ID: Q8N9A8
  ENST ID: ENST00000458059
  CDS Start-End: 907-1335
ggccaggatctctattttaacacaactattcttatttgaaatcaattacttatttgcatgtttgttgcctgctgtagcccttcctctttgcgggcaggaatcctgtctacctggctcacacgcgtatcaatacagtgtctagcatgttaggcaataaaatgattttgaatgaaagaatgccaccaataaatgaacaagaaggccttgtgatcaaatacaaatgtagtcaatcccttacagatctcttcttaagttataggtatttgggcttacactttgcctcatttaggaattatgaaagctgggtgatgtgagaggaaagtaaccaagagagaagtgtttacttaaggggttggttatctaggataccataattaaggaaactggttatttagggttctagttagttctgtacagatttcattactccttgagatccttgaggacagaaccagctctttgatttctgtatccctcgctagcgaccagaataatgcctggaaggtagtgggcgctcaatcaacatttgacgaatgaaagaaccaagcggggaacgggggataaatgaatgaacgaactggctccggagggctgcagttcctccccggggcagcaggcgacgccagcgttacgcccgcctggccgccggcagttcttggtccctccggctgaccgtccaacgctaggcgccgaggccggtgcaagagacagccaatagaaagctgtcttagttggaggtctagtagaggaatccaatgagcgtagcgggtctaggcaaggggcggtgcgacggggaggggcagcggggagcggttagaggtgggagttggcgctgcgggccgggcgggggccgcggaagctgcgatgcggacagggcagcggcggtgacccgagctgccgcccgacatgaactcgctggagcaggcggaagccccgcgagttgtatccctgattcctgcggtggtttccggtaactgccaagatctcaaggcttttgagaggagacttactgaatatattcattgtttgcaacctgctactggacgctggagaatgcttcttatagtggtatctgtctgtacagctactggtgcctggaactggttaatagaccctgagacacaaaaggtgtccttcttcacatcattatggaatcacccatttttcaccattagctgtatcactctaataggcttgttctttgctggaatacacaagagagtagttgcaccatcaattatagctgctcgatgtcgaacggtattagcagaatacaatatgtcttgtgatgatacaggaaaactaattttgaaacctaggcctcatgttcaatgacaatcttcactcattgttatgggacttaaaatagcctttcttcgaataagtgatacagcaaaaagccataaaggattccttttgcggttggatatgtaaaggtcatagcagcaactgacaagaagtgtgcaatatttacctggattatcttgatgatggtgactcattatcagtgctttggtacttttgattacctgtgtttcagtattagtgtcactttagtacttcagatcctgcaaatatttttgcagatgaagtatgtatgtatgttactaagttaaacttagaaacagaacctcattcagtttttataatgtatttttgcaaactactgtaaatagcaaatcaatgccaatgttaaacaaagaggaaaacgttgtgtggactttgttctcttgcaccagtatttcaggaacatctgcttgccatccccacagctctttaaaactggctattatgtgtgcctttcattcttacatttctaatcatactgcaggaaaaacattggattcagcttagactgaggaaaactctccattatgttgtaagaaattatagatgttttgagagacactttttgttaaaccagatattgaactccagcaactattgtggttatatttttagttcattgttctcatttaatgctaaatatcctttatattgctttaataattttcttttttttttttttttttttagacggagtctcgctctgttgccaggctggagggcagtggcacgatcttggctttctgcaacctctgcctcccaggttcaagcgattctcctgcttcagccttctgagtagctgggactacaggcgcatgccaccatgcccagctaatttttttgtatttttagtagagacggggtttcaccacgttggccaggatggtttcgatctcctgacctcgtgatcctcctgcctcatcctcccaaaatgctgggattacaggcataagccaccgtgcctggcctctttaataatttttaaaataccctaaaggcttgtgaatatacaagtctactgataaattatgtattgtctgggaatttgatagtcattgttttagataactggattttacgctgtggtagacaggctgtgacactagtgttgcacaggtgtaattggtcatcctatgccttcaccagaataacttgggagtggtgccagaaactagagtctacaattctcactgtttagagagtgttaatgacatactgtgtatgcataatagccgcatgtactataatagcccttaaaattaaactattgggattgctgtaaatattttaaagtactggaggtgccttttacctgtttattagattttgaaaaggtttaaattatttcatgagcaatcttttaaatttcatttaacataaagctgaaaattcaataacaggataaaaaagctttttaacaaggctgccatttaacttaaatgtgttcatcttagctttcacttgtataaaatttgattctttgaactgcagcaataaaaccctcagctcctaagaagtcttaagagggtattctatatattctgctttgttttattttctgtaaattttgtaggtaaatatgtgcattaaaaataaatactttatatataactcgtga

SEQ ID NO: 122865 - DNA, 547 bp, Homo sapiens
  Payload ID: 4094
  Gene Symbol: CNEP1R1
  Gene Name: CTD nuclear envelope phosphatase 1 regulatory subunit 1
  ENST ID: ENST00000566093
  CDS Start-End: 308-547
tcagcaagttttcttatatgagaaattggaattaaagagccctaattttttgtcaagtgcttaaaaagctgtcatagtaaatgaaataaacagtgcagtgatacatggaagttagtgtgtaagacctgaagcagttaagagtatctcacatgtcgtcttaatgttaggtaaatactctgacatttcgtcagacgagtaagagtggctaattagaaaattgacatctttatacctagatctcaaggcttttgagaggagacttactgaatatattcattgtttgcaacctgctactggacgctggagaatgcttcttatagtggtatctgtctgtacagctactggtgcctggaactggttaatagaccctgagacacaaaaggtgtccttcttcacatcattatggaatcacccatttttcaccattagctgtatcactctaataggcttgttctttgctggaatacacaagagagtagttgcaccatcaattatagctgctcgatgtcgaacggtattagcagaatacaatatgtcttgtgatgat

SEQ ID NO: 122866 - DNA, 656 bp, Homo sapiens
  Payload ID: 4094
  Gene Symbol: CNEP1R1
  Gene Name: CTD nuclear envelope phosphatase 1 regulatory subunit 1
  ENST ID: ENST00000562576
  CDS Start-End: 46-372
gcgatgcggacagggcagcggcggtgacccgagctgccgcccgacatgaactcgctggagcaggcggaagatctcaaggcttttgagaggagacttactgaatatattcattgtttgcaacctgctactggacgctggagaatgcttcttatagtggtatctgtctgtacagctactggtgcctggaactggttaatagaccctgagacacaaaaggtgtccttcttcacatcattatggaatcacccatttttcaccattagctgtatcactctaataggcttgttctttgctggaatacacaagagagtagttgcaccatcaatctgctcgatgtcgaacggtattagcagaatacaatatgtcttgtgatgatacaggaaaactaattttgaaacctaggcctcatgttcaatgacaatcttcactcattgttatgggacttaaaatagcctttcttcgaataagtgatacagcaaaaagccataaaggattccttttgcggttggatatgtaaaggtcatagcagcaactgacaagaagtgtgcaatatttacctggattatcttgatgatggtgactcattatcagtgctttggtacttttgattacctgtgtttcagtattagtgtcactttagtacttcagatcctgca

SEQ ID NO: 122867 - DNA, 826 bp, Homo sapiens
  Payload ID: 4094
  Gene Symbol: CNEP1R1
  Gene Name: CTD nuclear envelope phosphatase 1 regulatory subunit 1
  Uniprot ID: Q8N9A8
  ENST ID: ENST00000566482
  CDS Start-End: 53-196
ggaagctgcgatgcggacagggcagcggcggtgacccgagctgccgcccgacatgaactcgctggagcaggcggaagatctcaaggcttttgagaggagacttactgaatatattcattgtttgcaacctgctactggacgctggagaagtgtccttcttcacatcattatggaatcacccatttttcaccattagctgtatcactctaataggcttgttctttgctggaatacacaagagagtagttgcaccatcaattatagctgctcgatgtcgaacggtattagcagaatacaatatgtcttgtgatgatgtaagtatttttttggttagaaaattatagacctgcatgaaaacactgaaatttttggctttagaaaggtagacattttattagcaataaattttctctgtggaatgaatagtgagaatatacttagagcattgattctaaggtacttttacatttaacatctttggcattgagatccatcttacagtcaatgagatctgacaaattgggagagttgacaatttaatctttcttaatgacataaaatcatgatgcatcttataactgatgcatcttagattcagtgaagtacagtggttgtttgttattgaccaaaaatggctcagcggatattggttttataaactactgttatttatcaagtgatatgctatatatgttatttgtaaatatagagtcatagattaatttgtggactatggacatatgaacctattgtgtttttaaaagtagatgatgggagactgggcatggtggctcatgcctctaatcccagcattttgggaagctga

SEQ ID NO: 122868 - DNA, 1744 bp, Homo sapiens
  Payload ID: 4094
  Gene Symbol: CNEP1R1
  Gene Name: CTD nuclear envelope phosphatase 1 regulatory subunit 1
  Uniprot ID: Q8N9A8
  ENST ID: ENST00000565457
  CDS Start-End: 37-414
acagggcagcggcggtgacccgagctgccgcccgacatgaactcgctggagcaggcggaagatctcaaggcttttgagaggagacttactgaatatattcattgtttgcaacctgctactggacgctggagaatgcttcttatagtggtatctgtctgtacagctactggtgcctggaactggttaatagaccctgagacacaaaaggtgtccttcttcacatcattatggaatcacccatttttcaccattagctgtatcactctaataggcttgttctttgctggaatacacaagagagtagttgcaccatcaattatagctgctcgatgtcgaacggtattagcagaatacaatatgtcttgtgatgatacaggaaaactaattttgaaacctaggcctcatgttcaatgacaatcttcactcattgttatgggacttaaaatagcctttcttcgaataagtgatacagcaaaaagccataaaggattccttttgcggttggatatgtaaaggtcatagcagcaactgacaagaagtgtgcaatatttacctggattatcttgatgatggtgactcattatcagtgctttggtacttttgattacctgtgtttcagtattagtgtcactttagtacttcagatcctgcaaatatttttgcagatgaagtatgtatgtatgttactaagttaaacttagaaacagaacctcattcagtttttataatgtatttttgcaaactactgtaaatagcaaatcaatgccaatgttaaacaaagaggaaaacgttgtgtggactttgttctcttgcaccagtatttcaggaacatctgcttgccatccccacagctctttaaaactggctattatgtgtgcctttcattcttacatttctaatcatactgcaggaaaaacattggattcagcttagactgaggaaaactctccattatgttgtaagaaattatagatgttttgagagacactttttgttaaaccagatattgaactccagcaactattgtggttatatttttagttcattgttctcatttaatgctaaatatcctttatattgctttaataattttcttttttttttttttttttttagacggagtctcgctctgcttgtgaatatacaagtctactgataaattatgtattgtctgggaatttgatagtcattgttttagataactggattttacgctgtggtagacaggctgtgacactagtgttgcacaggtgtaattggtcatcctatgccttcaccagaataacttgggagtggtgccagaaactagagtctacaattctcactgtttagagagtgttaatgacatactgtgtatgcataatagccgcatgtactataatagcccttaaaattaaactattgggattgctgtaaatattttaaagtactggaggtgccttttacctgtttattagattttgaaaaggtttaaattatttcatgagcaatcttttaaatttcatttaacataaagctgaaaattcaataacaggataaaaaagctttttaacaaggctgccatttaacttaaatgtgttcatcttagctttcacttgtataaaatttgattctttgaactgcagcaataaaaccctcagctcctaagaagtcttaagagggtattctatatattctgctttgttttattttctgtaaattttgtaggtaaatatgtgcattaaaaataaatactttatatata

SEQ ID NO: 122869 - DNA, 1992 bp, Homo sapiens
  Payload ID: 4094
  Gene Symbol: CNEP1R1
  Gene Name: CTD nuclear envelope phosphatase 1 regulatory subunit 1
  Uniprot ID: Q8N9A8
  ENST ID: ENST00000568890
  CDS Start-End: 62-205
gggggccgcggaagctgcgatgcggacagggcagcggcggtgacccgagctgccgcccgacatgaactcgctggagcaggcggaagatctcaaggcttttgagaggagacttactgaatatattcattgtttgcaacctgctactggacgctggagaagtgtccttcttcacatcattatggaatcacccatttttcaccattagctgtatcactctaataggcttgttctttgctggaatacacaagagagtagttgcaccatcaattatagctgctcgatgtcgaacggtattagcagaatacaatatgtcttgtgatgatacaggaaaactaattttgaaacctaggcctcatgttcaatgacaatcttcactcattgttatgggacttaaaatagcctttcttcgaataagtgatacagcaaaaagccataaaggattccttttgcggttggatatgtaaaggtcatagcagcaactgacaagaagtgtgcaatatttacctggattatcttgatgatggtgactcattatcagtgctttggtacttttgattacctgtgtttcagtattagtgtcactttagtacttcagatcctgcaaatatttttgcagatgaagtatgtatgtatgttactaagttaaacttagaaacagaacctcattcagtttttataatgtatttttgcaaactactgtaaatagcaaatcaatgccaatgttaaacaaagaggaaaacgttgtgtggactttgttctcttgcaccagtatttcaggaacatctgcttgccatccccacagctctttaaaactggctattatgtgtgcctttcattcttacatttctaatcatactgcaggaaaaacattggattcagcttagactgaggaaaactctccattatgttgtaagaaattatagatgttttgagagacactttttgttaaaccagatattgaactccagcaactattgtggttatatttttagttcattgttctcatttaatgctaaatatcctttatattgctttaataattttcttttttttttttttttttttagacggagtctcgctctgttgccaggctggagggcagtggcacgatcttggctttctgcaacctctgcctcccaggttcaagcgattctcctgcttcagccttctgagtagctgggactacaggcgcatgccaccatgcccagctaatttttttgtatttttagtagagacggggtttcaccacgttggccaggatggtttcgatctcctgacctcgtgatcctcctgcctcatcctcccaaaatgctgggattacaggcataagccaccgtgcctggcctctttaataatttttaaaataccctaaaggcttgtgaatatacaagtctactgataaattatgtattgtctgggaatttgatagtcattgttttagataactggattttacgctgtggtagacaggctgtgacactagtgttgcacaggtgtaattggtcatcctatgccttcaccagaataacttgggagtggtgccagaaactagagtctacaattctcactgtttagagagtgttaatgacatactgtgtatgcataatagccgcatgtactataatagcccttaaaattaaactattgggattgctgtaaatattttaaagtactggaggtgccttttacctgtttattagattttgaaaaggtttaaattatttcatgagcaatcttttaaatttcatttaacataaagctgaaaattcaataacaggataaaaaagctttttaacaaggctgccatttaacttaaatgtgttcatcttagctttcacttgtataaaatttgattctttgaactgcagcaataaaaccctcagctcctaagaagtcttaagagggtattctatatattctgctttgttttattttctgtaaattttgtaggtaaatatgtgcattaaaaataaatactttatatataactcg

SEQ ID NO: 122870 - DNA, 1707 bp, Homo sapiens
  Payload ID: 4094
  Gene Symbol: CNEP1R1
  Gene Name: CTD nuclear envelope phosphatase 1 regulatory subunit 1
  ENST ID: ENST00000565556
  CDS Start-End: 254-535
agctccctgagtccccacaaacctagagggtcgacctcctcgccagcttctatttttattttcttttcactggcagacacttgcacttcgtgcattgcagcctgctaattcatttcatttcattctcacagccccgcgagttgtatccctgattcctgcggtggtttccggtaactgccaagatctcaaggcttttgagaggagacttactgaatatattcattgtttgcaacctgctactggacgctggagaatgcttcttatagtggtatctgtctgtacagctactggtgcctggaactggttaatagaccctgagacacaaaaggtgtccttcttcacatcattatggaatcacccatttttcaccattagctgtatcactctaataggcttgttctttgctggaatacacaagagagtagttgcaccatcaattatagctgctcgatgtcgaacggtattagcagaatacaatatgtcttgtgatgatacaggaaaactaattttgaaacctaggcctcatgttcaatgacaatcttcactcattgttatgggacttaaaatagcctttcttcgaataagtgatacagcaaaaagccataaaggattccttttgcggttggatatgtaaaggtcatagcagcaactgacaagaagtgtgcaatatttacctggattatcttgatgatggtgactcattatcagtgctttggtacttttgattacctgtgtttcagtattagtgtcactttagtacttcagatcctgcaaatatttttgcagatgaagtatgtatgtatgttactaagttaaacttagaaacagaacctcattcagtttttataatgtatttttgcaaactactgtaaatagcaaatcaatgccaatgttaaacaaagaggaaaacgttgtgtggactttgttctcttgcaccagtatttcaggaacatctgcttgccatccccacagctctttaaaactggctattatgtgtgcctttcattcttacatttctaatcatactgcaggaaaaacattggattcagcttagactgaggaaaactctccattatgttgtaagaaattatagatgttttgagagacactttttgttaaaccagatattgaactccagcaactattgtggttatatttttagttcattgttctcatttaatgctaaatatcctttatattgctttaataattttcttttttttttttttttttttagacggagtctcgctctgttgccaggctggagggcagtggcacgatcttggctttctgcaacctctgcctcccaggttcaagcgattctcctgcttcagccttctgagtagctgggactacaggcgcatgccaccatgcccagctaatttttttgtatttttagtagagacggggtttcaccacgttggccaggatggtttcgatctcctgacctcgtgatcctcctgcctcatcctcccaaaatgctgggattacaggcataagccaccgtgcctggcctctttaataatttttaaaataccctaaaggcttgtgaatatacaagtctactgataaattatgtattgtctgggaatttgatagtcattgttttagataactggattttacgctgtggtagacaggctgtgacactagtgttgcacaggtgtaattggtcatcctatgccttcaccagaataacttgggagt

SEQ ID NO: 122871 - DNA, 542 bp, Homo sapiens
  Payload ID: 4095
  Gene Symbol:
  Gene Name: CTD-2006C1.10
  ENST ID: ENST00000547473
  CDS Start-End: 167-397
ctcttcactcctagggctgctcgcgctagttaaggtctggggctttcttgctccgagagggaccagttacttccgccgtagctgctgttgctctgtcgactgcgctgtgacctgcactgttcacgggacctttagagaggacgccagaatacctggaagccaggaaatggattcggtggcctttgaggatgtggctgtgaacttcacccaggaggagtgggctttgctggatccttcccagaaaaatctctacagggaagtgatgcaggaaaccttgaggaacctgacctccataggaaaaaaatggaacaaccagtacattgaagatgagcaccaaaatcctaggagaaacctaagatgtttcaggattcagtggcctttgaggatgtggctgtgaccttcacccaagaggagtgggctttgctggatccttcccagaaaaatctctgtagagatgtgatgcaagaaaccttcaggaacctggcctctatagggaaaaaatggaaaccccagaacatatatgtagagtacgaaaatctaag

SEQ ID NO: 122872 - DNA, 567 bp, Homo sapiens
  Payload ID: 4096
  Gene Symbol:
  Gene Name: CTD-2006C1.13
  ENST ID: ENST00000591944
  CDS Start-End: 101-448
accttcctcgctgcgcgggcggcggttggtaaccggtcagaccagcccgagagggacctggtgcctgtacccaggcttctgtcgctctgtcgcctgcgctatgccctgctgtagtcacaggagctgtagagaggaccccggtacatctgaaagccgggaaatgaggcctgagtccagtgactgcaaactaaagccagtgagaaacctacaaagagaggtcattgaaagctcacaccaggcgcagtggctcacacctgtaatcccagcactttgggaggccaaggcagatggagcatctcagatgtttcaggaccctgtggcctgtgaggatgttgctgtgaacttcacccaggaggagtgggctttgctggatatttcgcagaggaaactctacagggaagtgatgctggaaactttcaggaacctgacctctataggagtctcatagaagggaatgtcaatgaaattaaagaagacagtcattgtggagaaacttttacccaggttccagatgacaggctgaacttccaggagaagaaagcttctcctgaagcaaaatcatgtgat

SEQ ID NO: 122873 - DNA, 775 bp, Homo sapiens
  Payload ID: 4096
  Gene Symbol:
  Gene Name: CTD-2006C1.13
  ENST ID: ENST00000586354
  CDS Start-End: 1-12
gcattcagctagcctggttccttttatggacatgaatagactcacactggaaggaagcactatgaatgcaagcaatgtggcaaaactttcacattttccagttcttttcgatatcatgaaaggactcacactggggagaaaccctatcaatgtaagcagtgtgggaaagccttcattccttttacttcttttcaatgtcatgaaaggactcacacgggagagaaaccctatgagtgtattctagttccgtttgatatcatgaaaggacttacactggagtgaaaccctatgaatgtaagcaatgtgggaaagccttcagatgtgcctcgcaccttcaacggcatggaagggttcacacttgggagaaactctatgaataggcctgagtccagtgactgcaaactaaagccagtgagaaacctacaaagagaggtcattgaaagctcacaccaggcgcagtggctcacacctgtaatcccagcactttgggaggccaaggcagatggagcatctcaggctggagtacaatggcgcgatctcaactctctgcaacttctgcctcctgagttcaagggattctcctgcctcagcctccagagtagctgggattacaggaccctgtggcctgtgaggatgttgctgtgaacttcacccaggaggagtgggctttgctggatatttcgcagaggaaactctacagggaagtgatgctggaaactttcaggaacctgacctctataggtaaggatgacaatattccttccctcagtccatt

SEQ ID NO: 122874 - DNA, 1562 bp, Homo sapiens
  Payload ID: 4096
  Gene Symbol:
  Gene Name: CTD-2006C1.13
  ENST ID: ENST00000590798
  CDS Start-End: 137-1381
acagttcatccggaaatggagggggtcgctttcctcaccttcctcgctgcgcgggcggcggttggtaaccggtcagaccagcccgagagggacctggtgcctgtacccaggcttctgtcgctctgtcgcctgcgctatgccctgctgtagtcacaggagctgtagagaggaccccggtacatctgaaagccgggaaatggaccctgtggcctgtgaggatgttgctgtgaacttcacccaggaggagtgggctttgctggatatttcgcagaggaaactctacagggaagtgatgctggaaactttcaggaacctgacctctatagggaaaaagtggaaagaccagaacattgaatatgagtaccaaaaccccaggagaaacttcaggagtctcatagaagggaatgtcaatgaaattaaagaagacagtcattgtggagaaacttttacccaggttccagatgacaggctgaacttccaggagaagaaagcttctcctgaagcaaaatcatgtgataactttgtatgtggagaagttggcataggtaactcatcttttaatatgaacatcagaggtgacattgggcacaaggcatacgagtatcaggactatgcaccaaagccatataagtgtcaacaacctaagaaagccttcagatatcacccctcctttagaacacaagaaaggaatcacaccggagagaaaccctatgcttgtaaagaatgtggaaaaacctttatttcccattcaggcattcgaagacgcatggtaatgcacagtggggatggaccttataaatgtaagttttgtgggaaagctgtccattgtctcagattatatcttatccatgaaagaactcacactggagagaaaccgtatgaatgtaaacaatgtgttaaatcctttagttattctgctacccatcgaatacatgaaagaactcacactggagaaaagccttatgaatgtcagcaatgtgggaaagcattccatagttccagttcttttcaagcacataaaagaacccacactgggggaaagccatatgaatgtaaacaatgtggcaaatccttcagttggtgtcattcctttcaaatacatgaaagaactcacactggggagaagccctgtgaatgtagcaaatgtaataaagcattccgtagttacagatcctatcttagacataaaaggagtcacacgggagagaagccttatcaatgtaaggaatgtagaaaagcattcacgtatcccagttcccttcgtagacatgaaaggacccactctgcgaaaaaaccttatgaatgtaagcagtgtgggaaagcattatcttataagttttcaaacacacctaagaatgcgctctggagaaagaccttataaatgttagatatgtgggaaaggcctttattctgccaagtcatttcgaagacatgaaaaaactcacactggagagaaaccctataaatgcatgccatgtggtaaagccttcaatctttccagttcctttcagtatcatgaaaggactcacactggagagaaaccctatgagtgtaagcaatgt

SEQ ID NO: 122875 - DNA, 677 bp, Homo sapiens
  Payload ID: 4096
  Gene Symbol:
  Gene Name: CTD-2006C1.13
  ENST ID: ENST00000591441
  CDS Start-End: 92-283
gctgcgcgggcggcggttggtaaccggtcagaccagcccgagagggacctggtgcctgtacccaggcttctgtcgctctgtcgcctgcgctatgccctgctgtagtcacaggagctgtagagaggaccccggtacatctgaaagccgggaaatggctggagtacaatggcgcgatctcaactctctgcaacttctgcctcctgagttcaagggattctcctgcctcagcctccagagtagctgggattacaggaccctgtggcctgtgaggatgttgctgtgaacttcacccaggaggagtgggctttgctggatatttcgcagaggaaactctacagggaagtgatgctggaaactttcaggaacctgacctctatagggaaaaagtggaaagaccagaacattgaatatgagtaccaaaaccccaggagaaacttcaggagtctcatagaagggaatgtcaatgaaattaaagaagacagtcattgtggagaaacttttacccaggttccagatgacaggctgaacttccaggagaagaaagcttctcctgaagcaaaatcatgtgataactttgtatgtggagaagttggcataggtaactcatcttttaatatgaacatcagaggtgacattgggcacaaggcatacgagtatcaggactatgcaccaaagcc

SEQ ID NO: 122876 - DNA, 353 bp, Homo sapiens
  Payload ID: 4097
  Gene Symbol:
  Gene Name: CTD-2007N20.1
  ENST ID: ENST00000626108
  CDS Start-End: 1-353
atggacatgagggtccccgctcagctcctggggctcctgctgctctggctcccaggtaccagatgtgacatccagatgacccagtctccatcctccctgtctgcatctgtaggagacagagtcaccatcacttgccgggcgagtcagggcattagcaattctttagcctggtatcagcagaaaccagggaaagcccctaagctcctgctctatgctgcatccagattggaaagtggggtcccatccaggttcagtggcagtggatctgggacggattacactctcaccatcagcagcctgcagcctgaagattttgcaacttattactgtcaacagtattatagtacccctcc

SEQ ID NO: 122877 - DNA, 3058 bp, Homo sapiens
  Payload ID: 4098
  Gene Symbol:
  Gene Name: CTD-2105E13.6
  ENST ID: ENST00000591954
  CDS Start-End: 1-1418
aggccccagctgtacctgctccatcccagaaggccccagccgtacctgctccatcccagaaggccccagccatacctgctccatcccggaaggcctcagctgcgtcagcttctccccgaaaggcctcagccgtacctgccccaccccagaagaccccacccccatctcagaaggccccatctgtacctaccattccccagaaggctgtgtcccccactgctccaaagaagaaatctctactcctccctgccccatcccagaaggctctgccaacctcacctaccgaataccagatggcgctgagcccgcctgcctcacgggggaagctccctggcgattttgacgtgttgccaacaggaattcctggaagagccgtgctggagagaagccagtctggagggaaaccggagccggtggtgacggtgcgcacccaggagacagacgtggtggagatgacgactcaggccaagtccccggagtcgcccttcaccgtgaccaagaaggagtccaaggacatcctgattagccaaaccaaggaggtgaccctggaggccttcaggggccaggggaagttggaggactgggcccactgggcgaagcttgaagagaggtccccggacctgcctggcgtgagatccaaggagttggagcagcggaagagatgggtcaaggccaaggaactggccgtcgagggcccctcccaggagcacagcaggcccttctctgtggaagcgctcaccctcaccaagctcatgatcacggccaactccaaagagcagccctcgaaatccgctttggtctcacttccctcctggctcttggcgactccgcaggcgtcggccacgtcaatgatggcttcagtgccctcccgccccggccagctgtccttactggaggggaagccagtggtggtcagagagcagccagagtcgcacacctgggtgaaggagggcaagcggccatggggcgagatgaaggagcagccatggggcgagatgaaggagccaccctgggaccccaaggggccacccaaggtgccctttcgctccaagcccacctctgccagtctgaagagggaaggaatctcccaggcgcctatccccctgaccgcctcaccgtgggaggacttacggccatcgcccctctcggagaccctcatctcaaagatggaggccacagccagggcgtcccagcagcccaagagggtgtcgcaggagcccatgaggatgccagcccagcaccccctggccactgtggggtcgtcttcagaaattcttttgcccatgctcttagaacttgaaactgtgaggaacacggccaccaaggcagaggagatacaggaggaatcgggcgtcttgaaccttctgcccagcctgcagcactcccagcactccgagtggccggatgcgggggcttaacctcagttggaaactgtccagaggagcccagcgctgccaggccccgagggttctgtgcgcaccgactgtaggaagcggaatgttgaaagccgcttggggggatttgccccctctggtagataccagaactatggatatgcctttatatattggggggcgggggggggcgggggcgagcccgtggagccgcccaacttcgcagagattaaagcttgagcctgagactcagcgagtcgcacctcggtgcctgtgtgcacgcgcaggcccccgagggggcgtcgggggagcaaggggtggggtgggggcgcccctaccagccccgcggtgcacgacggctcccattggctggggctcgggcgtcctagccaatccggccgcggggtgcgtttctcctgacccgggtgggaccgcaccccgcggactcagaagcgagcggcaccccgggaccatcccacagcagatccagtggccgccaacgtcaggctggagttgcctccttcgtggatgttggatgtggaagcccaggagccccccaaggggaaatggtcgacgccgcccttcgacccgcgcttccccagccagaaccagatccgtaactgctaccagaacttcctgggtgagacctgctcagccaggttatgggaggagcagggtgtgacaagggacggcagggaggggcactcccaccctaagtcccgcggagaccgttagggtgggaggccgggcggggccgggttggtgggggcggggcctggtcgagaaaaggcggggctgagcctggaggggcggggcgaggttggtaggggcgaggcctgatctggaaggtgcggggccgagtcgtgaaggtgcggggcgaggtaggtaggggcagggtctgggtaggaggagcagtgtgagggaggtaggggtcggggcctggctgggaggggcgggacggaggcctccaggggagagggaggcgggacgaagcagcgaagaactgggagggcccgagcagtggaggggcgggtcctgtcctggaatgggcgtggcttgccgcgtgacccccgcccgccacagactaccaccgctgcctcaagaccaggacccgccgcgggaagagcacgcagccctgcgagtactatttccgcgtgtaccactcgctgtgccccatcagctgggtggagagctggaacgagcagatcaagaacgggattttcgccggcaaaatctgactgccccagcgcggcttcctctgaagatgcagtgatcctgcatctttttgtctcgcggagccccgggtctcggttatccacccctacctcccagtgtctaagccacgaataatgcaggtagatgcctcgcgttgacagctacgagccagcccagggtccccagttctcaacactgtcccacccagatggctccaaggccaaggagtgccgcttgacaaagccctagggttccagcctggtcctgctgagggagccgtgagaccagtcagcctggggtgctggttttcccaacgggtactccctgagctatcagccttccagaggggctcctaggagggggaagccccatcctctgactgaagcggtcctatgaggccctgttcaaccccagggttcaaaggacacaccctagatgagccatccccc

SEQ ID NO: 122878 - DNA, 670 bp, Homo sapiens
  Payload ID: 4099
  Gene Symbol:
  Gene Name: CTD-2116N17.1
  ENST ID: ENST00000635704
  CDS Start-End: 46-192
tgggaagtcagttcgttctctcctctcctctcttcttgtttgaacatggtgcggactaaagcagacagtgttccaggcacttacagaaaagtggtggctgctcgagcccccagaaaggtgcttggttcttccacctctgccactaattcgacatcagtttcatcgaggaaaggttacaagatgttcacctaagattgagacctagtgactacatttcctacgggaacaaataaatggtttttcatctcccggagatacattacaaacaaatatggtgctaaaagaactccttacctttctctgactacaatttatttggacatacttttgtattgaagagaggtatacatactgaagctacttgctgtactataggagactctgtcctgtaggatcatggaccatcctagtagggaaaaggatgaaagacaacggacaactaaacccatggcacaaaggagtgcacactgctctcgaccatctggctcctcatcgtcctctggggttcttatggtgggacccaacttcagggttggcaagaagataggatgtgggaacttcggagagctcagattaggtaaaaatctctacaccaatgaatatgtagcaatcaaactggaaccaataaaatcacgtgctccacagcttcatttagagtacagattttata

SEQ ID NO: 122879 - DNA, 1033 bp, Homo sapiens
  Payload ID: 4099
  Gene Symbol:
  Gene Name: CTD-2116N17.1
  ENST ID: ENST00000634318
  CDS Start-End: 50-400
cggctgggaagtcagttcgttctctcctctcctctcttcttgtttgaacatggtgcggactaaagcagacagtgttccaggcacttacagaaaagtggtggctgctcgagcccccagaaaggtgcttggttcttccacctctgccactaattcgacatcagtttcatcgaggaaagctgaaaataaatatgcaggagggaaccccgtttgcgtgcgcccaactcccaagtggcaaaaaggaattggagaattctttaggttgtcccctaaagattctgaaaaagagaatcagattcctgaagaggcaggaagcagtggcttaggaaaagcaaagagaaagttacaagatgttcacctaagattgagacctagtgactacatttcctacgggaacaaataaatggtttttcatctcccggagatacattacaaacaaatatggtgctaaaagaactccttacctttctctgactacaatttatttggacatacttttgtattgaagagaggtatacatactgaagctacttgctgtactataggagactctgtcctgtaggatcatggaccatcctagtagggaaaaggatgaaagacaacggacaactaaacccatggcacaaaggagtgcacactgctctcgaccatctggctcctcatcgtcctctggggttcttatggtgggacccaacttcagggttggcaagaagataggatgtgggaacttcggagagctcagattaggtaaaaatctctacaccaatgaatatgtagcaatcaaactggaaccaataaaatcacgtgctccacagcttcatttagagtacagattttataaacagcttggcagtgcaggtgaaggtctcccacaggtgtattactttggaccatgtgggaaatataatgccatggtgctggagctccttggccctagcttggaggacttgtttgacctctgtgaccgaacatttactttgaagacggtgttaatgatagccatccagctgctttctcgaatggaatacgtgcactc

SEQ ID NO: 122880 - DNA, 726 bp, Homo sapiens
  Payload ID: 4099
  Gene Symbol:
  Gene Name: CTD-2116N17.1
  ENST ID: ENST00000558783
  CDS Start-End: 1-58
ccaggagccacccatcctccagcacactgagcagcaagctggacacacggcacactgatccaaatgggtaaggggatggtggcgatgctcattctgggtctgctacttctggcgctgctcctacccgtgcaggtttcttcatttgttcctttaaccagtatgccggaagctactgcagccgaaaccacaaagccctccaacagtgccctacagcctacagccggtctccttgtggtcttgcttgcccttctacatctctaccattaagaggcaggtcaagaaacagctacagttctccaacccatacactaaaaccgaatccaaatggtgcctagaagttcaatgtggcaaggaaaaaaaccaggtcttcatcaaatctactaatttcactccttattaacagagaaacgcttgagagtctcaaactggactggtttaaagagcatctgaaggatttgactagatgataaatgccaatattaaatctgttggagtttcacgtataagacagaggagaaagagaacatcaaaaattacttagcaagctatggaatggagattcagttttcattttagtttgttaaatctacaaggctgtaaaatgattaggttacaagatgttcacctaagattgagacctagtgactacatttcctacgggaacaaataaatggtttttcatctcccggagatacattacaaacaaatatggtgctaaaagaactc

SEQ ID NO: 122881 - DNA, 757 bp, Homo sapiens
  Payload ID: 4099
  Gene Symbol:
  Gene Name: CTD-2116N17.1
  ENST ID: ENST00000635605
  CDS Start-End: 46-243
tgggaagtcagttcgttctctcctctcctctcttcttgtttgaacatggtgcggactaaagcagacagtgttccaggcacttacagaaaagtggtggctgctcgagcccccagaaaggtgcttggttcttccacctctgccactaattcgacatcagtttcatcgaggaaagagcatgtcctttgcaacctgatcacacaaatgatgaaaaagaatagaactttctcattcatctttgaataacgtctccttgtttaccctggtattctagaatgttacaagatgttcacctaagattgagacctagtgactacatttcctacgggaacaaataaatggtttttcatctcccggagatacattacaaacaaatatggtgctaaaagaactccttacctttctctgactacaatttatttggacatacttttgtattgaagagaggtatacatactgaagctacttgctgtactataggagactctgtcctgtaggatcatggaccatcctagtagggaaaaggatgaaagacaacggacaactaaacccatggcacaaaggagtgcacactgctctcgaccatctggctcctcatcgtcctctggggttcttatggtgggacccaacttcagggttggcaagaagataggatgtgggaacttcggagagctcagattaggtaaaaatctctacaccaatgaatatgtagcaatcaaactggaaccaataaaatcacgtgctccacagcttcatttag

SEQ ID NO: 122882 - DNA, 920 bp, Homo sapiens
  Payload ID: 4099
  Gene Symbol:
  Gene Name: CTD-2116N17.1
  ENST ID: ENST00000635511
  CDS Start-End: 46-381
tgggaagtcagttcgttctctcctctcctctcttcttgtttgaacatggtgcggactaaagcagacagtgttccaggcacttacagaaaagtggtggctgctcgagcccccagaaaggtgcttggttcttccacctctgccactaattcgacatcagtttcatcgaggaaagctgaaaataaatatgcaggagggaaccccgtttgcgtgcgcccaactcccaagtggcaaaaaggaattggagaattctttaggttgtcccctaaagattctgaaaaagagaatcagattcctgaagaggcaggaagcagtggcttaggaaaagcaaagagaaaagcatgtcctttgcaacctgatcacacaaatgatgaaaaagaatagaactttctcattcatctttgaataacgtctccttgtttaccctggtattctagaatgttacaagatgttcacctaagattgagacctagtgactacatttcctacgggaacaaataaatggtttttcatctcccggagatacattacaaacaaatatggtgctaaaagaactccttacctttctctgactacaatttatttggacatacttttgtattgaagagaggtatacatactgaagctacttgctgtactataggagactctgtcctgtaggatcatggaccatcctagtagggaaaaggatgaaagacaacggacaactaaacccatggcacaaaggagtgcacactgctctcgaccatctggctcctcatcgtcctctggggttcttatggtgggacccaacttcagggttggcaagaagataggatgtgggaacttcggagagctcagattaggtaaaaatctctacaccaatgaatatgtagcaatcaaactggaaccaataaaatcacgtgctccacagcttcatttag

SEQ ID NO: 122883 - DNA, 646 bp, Homo sapiens
  Payload ID: 4100
  Gene Symbol:
  Gene Name: CTD-2132N18.3
  ENST ID: ENST00000585562
  CDS Start-End: 1-84
gcaactggtgctccaggccgaaaccgaggtgtggacctccaggagaacaacccagccagccggagccagtgctgcagcaactgagccccccttgcctgcccgctgcccccgcctcctccgcctgaatgacccgactggaatccactctaaccaatcgcacttaacgactcgggccaccactgggggggcagggggaggggtccaccatgatttctccatataattttgatcataggccggagccaatgaaacctgtaagtgtaatggctggaaaaaccccaagccccccactgcaccccgcatggatctgcagcagccagctgccaacctgagtgagctgtgccgcagttgtgagcaccccttggctgaccacgtatcccacttggagaatgtgtcagaggatgagataaaccgactgctggggatggtggtggatgtggagaatctcttcatgtctgttcacaaggaagaggacacagacaccaagcaggtctatttctacctcttcaagctactgcggaaatgcatcctgcagatgacccggcctgtggtggaggggtccctgggcagccctccatttgagaaacctaatattgagcagggtgtgctgaactttgtgcagtacaagtttagtcacctggctccc

SEQ ID NO: 122884 - DNA, 694 bp, Homo sapiens
  Payload ID: 4100
  Gene Symbol:
  Gene Name: CTD-2132N18.3
  ENST ID: ENST00000592248
  CDS Start-End: 63-548
cctctttgcatagcaccagtccccacccgcacgctctctggaccactacagctggacgggcaatggcgggtcggggaggcgcagcacgacccaatggaccagctgctgggaacaagatctgtcaatttaagctggttctgctgggggagtctgcggtaggcaaatccagcctcgtcctccgctttgtcaagggacagtttcacgagtaccaggagagcacaattggagcggccttcctcacacagactgtctgcctggatgacacaacagtcaagtttgagatctgggacacagctggacaggagcggtatcacagcctggcccccatgtactatcggggggcccaggctgccatcgtggtctatgacatcaccaacacagatacatttgcacgggccaagaactgggtgaaggagctacagaggcaggccagccccaacatcgtcattgcactcgcgggtaacaaggcagacctggccagcaagagagccgtggaattccagctgaccacgtatcccacttggagaatgtgtcagaggatgagataaaccgactgctggggatggtggtggatgtggagaatctcttcatgtctgttcacaaggaagaggacacagacaccaagcaggtctatttctacctcttcaagggtgtgctgaactttgtgcagtacaagtttagtcacctggctccc

SEQ ID NO: 122885 - DNA, 958 bp, Homo sapiens
  Payload ID: 4100
  Gene Symbol:
  Gene Name: CTD-2132N18.3
  ENST ID: ENST00000592574
  CDS Start-End: 113-958
taacgccgccgccccggagccgccttggaggtccccctccccactaagtgcctctttgcatagcaccagtccccacccgcacgctctctggaccactacagctggacgggcaatggcgggtcggggaggcgcagcacgacccaatggaccagctgctgggaacaagatctgtcaatttaagctggttctgctgggggagtctgcggtaggcaaatccagcctcgtcctccgctttgtcaagggacagtttcacgagtaccaggagagcacaattggagcggccttcctcacacagactgtctgcctggatgacacaacagtcaagtttgagatctgggacacagctggacaggagcggtatcacagcctggcccccatgtactatcggggggcccaggctgccatcgtggtctatgacatcaccaacacagatacatttgcacgggccaagaactgggtgaaggagctacagaggcaggccagccccaacatcgtcattgcactcgcgggtaacaaggcagacctggccagcaagagagccgtggaattccaggccaatgaaacctgtaagtgtaatggctggaaaaaccccaagccccccactgcaccccgcatggatctgcagcagccagctgccaacctgagtgagctgtgccgcagttgtgagcaccccttggctgaccacgtatcccacttggagaatgtgtcagaggatgagataaaccgactgctggggatggtggtggatgtggagaatctcttcatgtctgttcacaaggaagaggacacagacaccaagcaggtctatttctacctcttcaagctactgcggaaatgcatcctgcagatgacccggcctgtggtggaggggtccctgggcagccctccatttgagaaacctaatattgagcagggtgtgctgaactttgtgcagtacaagtttagtcacctggctccc

SEQ ID NO: 122886 - DNA, 1753 bp, Homo sapiens
  Payload ID: 4101
  Gene Symbol:
  Gene Name: CTD-2135J3.4
  ENST ID: ENST00000554914
  CDS Start-End: 92-1414
tacgcacgtcctgattctcctggagtctccagcccgcccagtggccgcagtcacccaggtccagaggcggcggtatcacaggctctccgacatgtctatgctggctgaacgtcggcggaagcagaagtgggctgtggatcctcagaacactgcctggagtaatgacgattccaagtttggccagcggatgctagagaagatggggtggtctaaaggaaagggtttaggggctcaggagcaaggagccacagatcatattaaagttcaagtgaaaaataaccacctgggactcggagctaccatcaataatgaagacaactggattgcccatcaggatgattttaaccagcttctggccgaactgaacacttgccatgggcaggaaaccacagattcctcggacaagaaggaaaagaaatcttttagccttgaggaaaagtccaaaatctccaaaaaccgtgttcactatatgaaattcacaaaaggaaagtcgtggaaggcgctgacgctgtcccagaagaggccgtacgtggacgaggcggagcggctgcgcctgcagcacatgcaggactaccccaactacaagtaccggccgcgcaggaagaagcaggccaagcggctgtgcaagcgcgtggacccgggcttccttctgagctccctctcccgggaccagaacgccctgccggagaagagaagcggcagccggggggcgctgggggagaaggaggacaggggtgagtactcccccggcactgccctgcccagcctccggggctgctaccacgaggggccggctggtggtggcggcggcggcaccccgagcagtgtggacacgtacccgtacgggctgcccacacctcctgaaatgtctcccctggacgtgctggagccggagcagaccttcttctcctccccctgccaggaggagcatggccatccccgccgcatcccccacctgccagggcacccgtactcaccggagtacgccccaagccctctccactgtagccaccccctgggctccctggcccttggccagtcccccggcgtctccatgatgtcccctgtacccggctgtcccccatctcctgcctattactccccggccacctaccacccactccactccaacctccaagcccacctgggccagctttccccgcctcctgagcaccctggcttcgacgccctggatcaactgagccaggtggaactcctgggggacatggatcgcaatgaattcgaccagtatttgaacactcctggccacccagactccgccacaggggccatggccctcagtgggcatgttccggtctcccaggtgacaccaacgggtcccacagagaccagcctcatctccgtcctggctgatgccacggccacgtactacaacagctacagtgtgtcatagagctggaggcgccccgtccggtcagccctcgcgccctctccttcttgtgccttgagtggcagaggagccgtccagccacaccagctttcctcccaccgctcagggcagggaggtctgaactgcggccccagagcctttggcctaagctggactctccttatccgagtgccgcctctatccccttccccacgttccagcccctgcagcccacattttaagtatattccttcaagtgagttttcctccagcccctgagagttgctgtctcccagtggaatgttcactgacgtcttttcttggtagccatcatcgaaactaatggggggacagacttgatag

SEQ ID NO: 122887 - DNA, 1374 bp, Homo sapiens
  Payload ID: 4102
  Gene Symbol:
  Gene Name: CTD-2140B24.4
  ENST ID: ENST00000540096
  CDS Start-End: 91-1167
ggagattgacgcagagtgggcggcggtggtgctttgtctcctcagcactctgctgtcactcaaggaagtatcatcaagaacaaggagggcatggatgctaagtcactaactgcctggtcccggacactggtgaccttcaaggatgtatttgtggacttcaccagggaggagtggaagctgctggacactgctcagcagatcgtgtacagaaatgtgatgctggagaactataagaacctggtttccttgggttatcagcttactaagccagatgtgatcctccggttggagaagggagaagagccctggctggtggagagagaaattcaccaagagacccatcctgattcagagactgcatttgaaatcaaatcatcagtttccagcaggagcatttttaaagataagcaatcctgtgacattaaaatggaaggaatggcaaggaatgatctctggtatttgtcattagaagaagtctggaaatgtagagaccagttagacaagtatcaggaaaacccagagagacatttgagcatccctcgcgtcctgtcacttccagcgaggcacacaaaactgaccgtagggatggccaccagggtccggacagcttctatttgggtcccacctctccaagaacgaaacagttcatgggataggatcagaaagctccaaggtcaggaatccatcttgggccaagggactcctggtctgcaacctctccctggaacacccaggcagaagcagaagagtcgcagaatagagaaagtcctagagtggctgtttatttcccaagagcagccaaaaatcaccaagtcctggggacctttgtcattcatggatgtgtttgtggattttacctgggaggagtggcagctgctagacccagcacagaagtgcctgtacaggagtgtgatgttggagaactatagcaacctggtgtccctagggtaccaacacaccaaacctgatatcatcttcaagttggaacaaggagaagagctgtgtatggtgcaggcccaagttccaaatcagacctgtccaattttgaaggctggaaagtccaaagccaaggtgctggcaggtttggtgtctggtgagggcctgctctgtgcttccaagatgacgccttgttgctgcatcctctggagacacagtctggaaaattgatgatcttatggattggcatcaggaaaataaagacaagctgggaagtacggcaaaaagctttgaatgcactacatttggaaaactatgtcttcttagtacaaagtatctttcaagacaaaaacctcataaatgtggcacgcatggaaagagtttgaaatatatagatttcactagtgattatgctagaaataatcctaatgggtttca

SEQ ID NO: 122888 - DNA, 4505 bp, Homo sapiens
  Payload ID: 4103
  Gene Symbol:
  Gene Name: CTD-2192J16.17
  ENST ID: ENST00000428311
  CDS Start-End: 143-2068
gtttcgtgtccgctgcgtttgggttccggtctccgcttctccagtggccccggtggctccaccgcagcgtctggcgcgctgggacctgcacaggccggagagagccgtaggcaggaccccgggacaccctggaagccaggaaatggactcagtggtctttgaggatgtggctgtgaacttcacccaggaggagtgggctttgctgggtccctctcagaagaaactctacagagatgtgatgcaagaaacctttgttaacttggcctctataggggaaaactgggaggagaagaacattgaagatcacaaaaatcaggggagaaagctaagaagtcatatggtagagaggctctgtgaaaggaaagaaggtagtcagtttggagaaaccatcagtcagactccaaatcctaaaccaaacaagaaaacttttactagagtaaaaccatatgaatgtagtgtgtgtggaaaggactatatgtgtcattcatctcttaataggcacatgagatctcatactgaacatagatcatatgaatatcacaaatatggagagaaatcatatgaatgtaaggaatgtgggaaaagattcagctttcgaagttcatttcgaatacatgaaagaactcacactggagagaaaccctataaatgtaaacagtgtggtaaggctttcagttggcccagttcctttcaaatacatgaaagaactcatactggagagaaaccttatgaatgtaaggaatgtgggaaggccttcatttatcacacaacctttcgaggacacatgagaatgcacacaggggagaaaccctataaatgtaaagaatgcgggaaaacgttcagtcatcccagttcttttcgaaatcatgaaagaactcactctggagagaaaccctatgaatgtaaacaatgtggaaaagctttcagatattaccaaacttttcaaatacatgaaaggactcacactggggaaaaaccctatcagtgtaagcaatgtggtaaagctcttagttgtcccacatcctttcgaagtcatgaaaggattcacactggagaaaaaccctataaatgtaaaaaatgtgggaaagccttcagttttcctagttcctttagaaaacatgaaagaattcatacaggagagaaaccctatgattgtaaggaatgtgggaaagcattcatttctcttccaagctatcgaagacatatgataatgcacactggaaatggaccttataaatgcaaggaatgtgggaaagcctttgattgtcctagttcttttcaaatccatgaacgaactcacactggagagaaaccctatgaatgtaaacagtgtggtaaagccttcagttgttccagttcctttcgaatgcatgaaagaactcacactggagagaaaccccatgaatgtaaacaatgtggtaaagccttcagttgttccagttctgttcgaatacatgaaaggactcacactggagagaaaccctatgaatgtaaacagtgtggtaaagccttcagttgttccagttcctttcgaatgcatgaaagaattcacactggagagaaaccctatgaatgtaaacagtgtggtaaagcctttagtttttctagttcctttcggatgcatgaaaggactcacactggagagaaaccctatgaatgtaaacaatgtggtaaagccttcagttgttccagttcctttcgaatgcatgaaaggactcacactggggagaaaccctatgaatgtaaacagtgtggtaaggcgtttagttgttccagttccattcgaatacatgaaaggactcacactggagagaaaccttatgagtgtaaacaatgtggtaaggccttcagttgttctagttctgttcgaatgcatgaaaggactcacactggagtgaaaccctatgaatgtaaacaatgtgacaaagccttcagttgctcacgttcctttcgaatccatgaacgaactcacactggagagaaaccctatgcatgtcaacaatgtggtaaagccttcaagtgttcccgttcctttcgaatacatgaaagagttcatagtggagagtaaccctatgtatataagcaatatggcaaagttttcagttgtcctatttcctttttttttttttttttttttgagttgaattctcactctgttgccctggctggagtgcagtagagtgatctcagctcactgcaacctctgtctcctgggttcaagcgattctcctgcctcagcttcctgagtagctgggacaacaggtgtgaacgaccatgcccacttaatttttgtatttttagtagagatggggtttcgccatgttggccaggctggtctcgaactcctgacctcagacgatccacctgccttggcctcccaaagtgttggattacaggtgtgagccaccacacccggcccccatttccttttgaagacatgaaattattcatatttcagagaaaccctataagacatgggaataccttcagttatttacatgtgaatatgaggaagcattcatactggacaggaaaccctgcgaatgtaggcagtgtgggaaaaccttcaatggtcatatgaccttttaaggaccatgagaaggcatatgaagtgtaaagaattttcatatgccctataaatgtaaagaatttataaccttaaaaatgtaaagaatgtggaaaaccctataaatgtaaaaaatgtagaaaaacctttatttgtcttagtttacttggaaaccatgaacaaactcacactggaaagcgacttcttaaatatagacattgtgagaaagccttcagttggcccacatactaatatgtgagaatgcagactggatagaaatcctataaaagtgagatatagcaatgttttccattttaacaaatgctcatgtgatactcccttatgtgtgaaacttcaatctcatgttgaaactcccactagggaggtactgtataaatgtagataatatgggaaagcctgatgcaaattaattcatgtatattgttctagaaaattcacaacatgtcagaaatgtgataaaacatattatcagttactgattcttaaaatggatctctgaattatggatttctattactttcacaaaagaacactgagatgagataattctgtaagctcttatacagttgtacacaagttgaattgatagtattttttcattaaatcagtttctgaaattttgtctttccatattgaagtctgttagattcatgagtgaattgaagtgtatttataataagctagcagttttgatttttatgtattttttagttgtgctgtaatgggccatcaaaaaatgacaatttggtaatttttaggatttcctactggccttatgtggcaggtactagatatcattatatgtatttcatctttctgaccaaaagaggcttttttagaggaagacagagtacccttttttctattttttatgctaaaaaataatcataataaatttttgagtctgcaaagtttatcatacagtatactctctcattggaattattattttcatcttctgtttgctgtttgtaattccttctggctgtgatttgaataatagactttgtattaataagagagatctgagatagaaccatataacctatagctggaaatggctgtcctggattgtgttaacatgggttatgttgtgacctatgttttctataatctaaccttttatggctccacggtataattcaccaatagcctacttgcaggagatatggaaggcagaagtgaagaaagcattagtcaggttttatagccaccatatgtggagacagatggatgcataggagcttcagggacacctgcttccaccacattgtcctgatcctttgctctgccaattgagagtattcttagaaccaccactaactgcttgactgccatattttccttccttccttccttctttctttccctttccctttcttttctttctttactttctttttccgagatggagtcttgctctgtcgcccaggctggagtgcagtggtacgatcttggctcactgcaacctctgccttctgggttcaagcaattgtcctgccccagcctcccaagtagctgggattataggtgcccaccaccaagcccagctaaattttttttgtatttttagtagagacagggtttcatcattgttggccaggctggtctcaaactcctgacctcatgatctgcccaccttggccttccaaagtgctgagattacaggcgtgagccactgtgcatggccccagctgccatattttcaaagatgtagttttccacaaattgtcttcaaaagttctactcaaagatgcactgcagtttggattttcctagaaactctaatgtgtccaccaggcaaccatttagactcttaaggttgggaatattctctgatgctctgactcacctcatctctaggttgaatttatccaaggtattatttatgtaataaacaccatgttttgttaacagt

SEQ ID NO: 122889 - DNA, 5857 bp, Homo sapiens
  Payload ID: 4104
  Gene Symbol:
  Gene Name: CTD-2192J16.20
  ENST ID: ENST00000593682
  CDS Start-End: 1-491
gtggggaagccttcaagtcatctagttcctgtgaagtgcacgaaagaactcattttggagaaaaaccctatgaatgtaaacaatgtggtaaagccttcaattcttcaagttaccttcagttgcacgaaagagttcacactggcgagaaaacttacgaatgtaaagaatgtggtaaagcctttctttattccactcactttcgaatccatgaaagaacccatactagagagaaaccctatgaatgcaaacagtgtggtcgggtcttcatttacttcagtcaccttcgaaggcacgaaagaagtcacactggagtgaaaccatgtgagtgtaagcagtgtggcaaagctttcacttgtttaaattccctgaaagtacacaaaagaattcatactggagaaagaccctttcagtgtagacaatgtggtaaagccttcagttactcaaagtctttgcacgtgcacgaaaggactcatagtagacagaagccctaagaaagtaaagtgtggtaatgctgtcagttgtattagttccttttggatgtatgagagtacttacgctggagagaaattcaaggaatgtaaacggtgtgattaagccttcagttgtcctaattccctttgaagacgtgactcatgcggcaatgaaatatttaacaaatgggggaggaacttgcactctcctgcgggattgcagatatgtgaatggactccatggacagaaaagctacgaatgtatggagtgtaggaaagccttcacttcacgtaatcttttaaagacacctgagaatatatactggagagaaactataaagaaaattctatatccatcccatcttttgtggggtttgttttttgtttttgtttttgttgagatgtaattttgctcttgttgcccaggctggagtgcagtggtgcgatcgcggctcaccgcaacctccgcctcccggattcaagcaattctcctgccgcagcctcccaagaagctgggattacaggcatgcgccaccacgcctggctaattttgtaattttagtagagatggggtttctccatgttggtcaggctggtctcaaactcctgacctcaggtgatctgcctgcctcggcctcccaaagtgctgggattacaggtgtgagccacagcacccaacctttttttccccgccgcaccccaagatggtgtctcactctgttgccccaggctggagtgcagtggtgtgatcctggctcactgtaacctctgggttcaagcaattcttctgcctcagccttccaagtagctgggattacaagtgcccaccaccatgcccagctaatttttatatttttagtagagacagtgtttcaccatgttgaccaggctgatcttaaactcttgacctcaaatgatccacccaccttggcctcccaaattgttcgttttacttttttttttttttttttttgagctggagtcttactctgttgcctaggctggagtgaaagtggcgcaacctctgcctcccaggtcaaagcaatcctgcctcaggccccctagtagctggcattacaggcacatgccaccacgcccaactaatttttatatttttagtagagacggggtttcaccatgttggccaggctggtcttgaactcctgacctcaggtaatccacctgccttggcctcccaaagtgctgggattacaggcgtgagccaccacacccggcccccagttctttttttttttttttgagacggagtccttgcccaggctggagtgcagtggcgcgatctcagctcactgcaagctccgcctcctgggttcacgccattctcctgcctcagcctcccgagtagctgggactacaggcgcccgccaccacgcccggctcattttttgtatttttagtggagacggggtttcaccgtgttagccaggatagtcttgatctcctgacctcgtgatccgccctcctcggcctcccaaagtgctgggattataggcgtgagccaccgcgcccggcctccagttcattttaaaaccatgaaaccacccacactggagagccaccttcttaaatgtaagcaatatgggaacatcttcaatgacatctgcaaccattgtcgagattcttcgtaggaagaattaaaggaatggggaagaaggacttgggccccagcaggccttttgtggcatccagtcagaagttaggaaacaccctctagggcagtgcctgccctcagctctcacacatgactggagagaagtgagaagactcccagaatctgccttttaagtttccatcagtgtcctcgggtcagactgtgggaatgctgtacttctaagacaaaggttcgcatcttacagtttttccccaagtgggatctgcctatgcacatcctaattcacagacattgtcagcattgcattattccagggctgttttgaggtcatctccagctccatttcccatctcaaacctacactttggacacttgtttaaacattcacatctgaatttctctgtggcaaccgcaggtggctctgaggtgagagactgaagaagcagagcctgtatcatgggacacacaccccttgaccacacagcatccactctcctgcggttaccagccctgcaccaaccaccacagtcagaataatctcaaaactgctagtggagtcacagacacactctgccatgtcttagctgtaggacactcagaattcttacctcccctaacttgctttccctgttttctggcacattctaccctgagatattcagcggcatatgcactgatgatgctccggccttctcacgtcagtgcatgtcacatgcatcctgctccaggactggtttcctagcctcccgctaagactagcacttagctcttcttggaaaaggacccaccctgcagcgctccagctctgttgtgtatgggaggtgctggtgtcagggttcacaagccatggaactaccttgcttcacatcacaaggcaaggtgaactcaactcccaataaactgcttgctggagcctccgaattctccgttttctgaattgcataggcacgataggggtcgggtctgtcctttgttggagtcagtccccccttttcttagcaagtcagtgtgttttagaagggaggtggcagcattgagggaaaccaggtcaccatccaccctcgtaacaacagtctccctgggtgggtcccagaagtgatctttgtgtcgctcgggtcggaactctttaggcctctggcctccaccctcccccaacagcagggatgggtcaggtggcagcatccaaaaccacggtgaagatactagggtccagaggccgactggagcaaggtttgctggcagatgaggcctcagtggaagtgacggctactgtggagatgcagtggaggacctggtggctgagccaggagatgcacaccttcgcttctctcaccaggaacattcgcttctctcaccaggaacatttatggactcagtggcctctgaggatgtggctgtgaacttcacacttgaggagtgggctttgctggatccttcccagaagaaactctacagagatgtgatgcgggaaacctttagaaacctggcctgtgtaggaaaaaaatgggaagaccagagcattgaagattggtacaaaaatcaggggagaattttaagaaatcatatggaagagggactcagtgaaagtaaagaatatgatcaatgtggagaagccttcagtcagattctcaatcttaatctgaacaagaaaattcctactatagtaagaccatgtgaatgtagtttgtgtgggaaagtcttcatgcatcattcatcccttagtaggcacatcagatctcaccttggacacaaaccatatgactatcaggaatatggagagaaaccatataaatgtaagcagtgtgggaaagccttcagttcttgtcaatcctttcgaagacatgaaagaactcacactggtgagaaaccctatgcatgtccggaatgtgggaaagccttcatttctctcccaagtgttcgaagacacatgattaagcacactggagatggaccatataaatgtcaggaatgtgggaaagcctttgatcgcccaagtttatttcagatacatgaaagaactcacactggagagaaaccctatgaatgtcaggaatgtgcaaaagctttcatttctcttccaagttttcaaagacacatgattaggcacactggagatggaccttataaatgtcaggaatgtggaaaagcctttgaccgccccagtttatttcgaatacatgaaagaactcatactggagagaaaccccatgaatgtaaacagtgtgggaaggccttcatttctttcacaaattttcaaagtcatatgattaggcacactggggatggaccttataaatgtaaagtatgtgggagagcctttatttttcccagttatgttcgaaagcatgaaagaactcatactggggagaaaccctatgaatgtaataaatgtggtaaaaccttcagttcttccagtaatgttcgaacacatgaaaggactcacactggagagaagccctatgaatgtaaggaatgcgggaaagccttcatttctctcccaagtgtccgaagacacatgataaagcacactggagatggaccttataaatgtcaggtatgtggtagagcctttgactgtcccagttcatttcaaatacacgaaagaactcacactggagagaaaccctatgaatgtcaggtatgtgggaaagccttcatttctcttaaaaggattagaaaacatatgatactgcacactggagatggaccttataaatgtcaggtatgtggtaaagcctttgactgtcctagttctgtccgaacacatgaaagaactcatactggagaaaaaccctatgaatgtaaagaatgtgggaaagcattcaattatgccagttccattagaatacatgaaagaactcataccggagaaaaaccctatgaatgtaagcaatgtggaaaaacgttcagttattccagttcctttcaaagacatgaaagagctcataatggagataaaccttacgtaaagaatgtgggaaagctttcatttatcacacaaccttcgaatacctgtgaaaatgaatagtggaggacaggtctacaagtatctacatatctaaagaatatggaaagtcttcagtttgctttctgggtttcagacttgtttgggagctcacccctttctcctgtttctcacttttggaataggaatctctatcctgtgcctgtctcatattttggaaatacatgactagtttggttttcaccggttcggagctgaagaagaattttgcctcagcatgaattgagtctcatccatatctgagtgatgtgatattgagatgacactttggagtttgagtttaaacattaggcttcatgctggaattaactgagacttttgaggcctttgggatgagatgaatatattttacatgtgatgacatggattttgggggccagaggtgtaatgttttggctgagtgtatgccacctcagattcatatgttgaaaccttacccccgtgccccccctctcccccacaatgtgatggtatttggaggccctgtctctggtggtttttaggattggaggacatcatgaagatggaggccttgtaattgggattagtttcctgataggaatccctagagagctagctttgcccttcaccatgagagggtgcagtgagaagatagctatctttgaaccgggaagcaggcccttaccagacatggactatgccagtgccttgatattggacttcccagcctcccaaaccatgagaaataaatgtttgttgattaattaa

SEQ ID NO: 122890 - DNA, 838 bp, Homo sapiens
  Payload ID: 4105
  Gene Symbol:
  Gene Name: CTD-2192J16.22
  ENST ID: ENST00000597692
  CDS Start-End: 1-595
ccgaaggctgctgaaggacgatggacgcggagtatcggagccactaatggagaacgggtcgggggcgtgggtgcgagggcgccacctggtgctgctggacacagcccaggctgcagccgccggacaccggctcctggcggagcaggaggtcctggcccctcaggtggtgctggccccgggtggcggcgccgcctacaatctcggggctcctccgcgcacgcagttctcagggctgcgcagggacctgccgccctcggtgcacctgctcacgctggccagctggggccccgaaatggtgctgctgcgcttggagcaccagtttgccgtaggagaggattccggacgtaacctgagcgcccccgttaccttgaacttgagggacctgttctccaccttcaccatcacccgcctgcaggagaccacgctggtggccaaccagctccgcgaggcagcctccaggctcaagtggacaacaaacacaggccccacaccccaccaaactccgtaccagctggacccggccaacatcacgctggaacccatggaaatccgcactttcctggcctcagttcaatggaaggaggtggatggttaggtctgctgggatgggccctccaagcccaagcctcctgctccgggggcagaccagactctgactctcctcttggggctgctgccattaaaacgctactactaagactcaggtcgctctgtgactgagttgtgccactgaagatcctggtgtcgccatgggccgccgccccgcccgttgttaccggtattgtaagaacaagccgtacccaaagtctcgcttctgccgaggtgtccctgatgccaa

SEQ ID NO: 122891 - DNA, 585 bp, Homo sapiens
  Payload ID: 4106
  Gene Symbol:
  Gene Name: CTD-2192J16.24
  ENST ID: ENST00000597961
  CDS Start-End: 1-585
actaacaatatgtcggacccacggaggccgaacaaagtgctgaggtacaagcccccgccgagcgaatgtaacccggccttggacgacccgacgccggactacatgaacctgctgggcatgatcttcagcatgtgcggcctcatgcttaagacatgccccacagtgcagccgaacatgctgaacgtgcacctgctgcctcacacacatgatgacgtgggctggctcaaaaccgtggaccagtacttttatggaatcaagaatgacatccagcacgccggtgtgcagtacatcctggactcggtcatctctgccttgctggcagatcccacccgtcgcttcatttacgtggagattgccttcttctcccgttggtggcaccagcagacaaatgccacacaggaagtcgtgcgagaccttgtgcgccaggggcgcctggagttcgccaatggtggctgggtgatgaacgatgaggcagccacccactacggtgccatcgtggaccagatgacacttgggctgcgctttctggaggacacatttggcaatgatgggcgaccccgtgtggcctggcacattgaccccttc

SEQ ID NO: 122892 - DNA, 942 bp, Homo sapiens
  Payload ID: 4107
  Gene Symbol:
  Gene Name: CTD-2207O23.10
  ENST ID: ENST00000601870
  CDS Start-End: 1-91
tccggcaagttccgccgcgggagcggctcggcctgcagccttctctgctgctgcggaagggacccctcggaggagcattcgctgctggtgaattgattcgacctgactgccgttggaccgtaggccctggactgcagagacccccgcccccgaccccgcttatttatttgggccgtgcctgcggagccgggcggaacgctagcggtgttggcgcggagtggaccccggctgcggcccctgggtgtttccacaccggtagccagctgtgccctgaggtggaagaggaccggccacccaggaattttccaacaatggcgccaccatcggtcccggagtcccagtgatgctctgtgccatagagcccccataacttcactactacgtgatagtaaatccccggcaaaaaccagcagcgccttgcaagcccacgccaccccaagcatcccaggactcttctgaaacgactccgggctaccagatcggccgtccagctggaatcaaccgatggaggctccgctgcaaactggaatggtgcttggcgtgatgatcggggccggagtggcggtggtggtcacggccgtgctcatcctcctggtggtgcggaggctgcgagtgccaaaaaccccagccccggatggcccccggtatcggttccggaagagggacaaagtgctcttctatggccggaagattatgcggaaggtgtcacaatccacctcctccctcgtggatacctctgtctccgccacctcccggccacgcatgaggaagaaactgaagatgctcaacattgccaagaagatcctgcgcatccagaaagagacgcccacgctgcagcggaaggagcccccgcccgcagtgctagaagctgacctgaccgagggcgacctggctaactcccatctgccctctgaagtgctttatatgctcaagaacgtccgg

SEQ ID NO: 122893 - DNA, 382 bp, Homo sapiens
  Payload ID: 4108
  Gene Symbol:
  Gene Name: CTD-2207O23.12
  ENST ID: ENST00000599312
  CDS Start-End: 1-144
aagatgctgaagccacacagaacacctccggccccggtgactgaagagatgctacagcgggtcttgccccagaagctgcgggcacatccacgcctgaaatgcggcgctcagtcctggtcaggaacccaggccacaaaggcctgagacccgtttatgaagagctcgactctgactccgaggacctagaccccaatcctgaagatctggacccggtttctgaagacccagagcctgatcctgaagacctcaacactgtcccggaagacgtggaccccagctatgaagatctggagcccgtctcggaggatctggaccccgacgccgaagctccgggctcggaaccccaagatcccgaccccatgtcttcgagtttcgacctcga

SEQ ID NO: 122894 - DNA, 4964 bp, Homo sapiens
  Payload ID: 4109
  Gene Symbol:
  Gene Name: CTD-2207O23.3
  ENST ID: ENST00000617428
  CDS Start-End: 1-3367
taccagtgtgaagcgcaggctgagctgcctccgcagtcgagtgaccaggcagaaggagaaggggaagagcccagcacatctgaaggacaagggccaggatgcacgagagaggcgggagtgtgtcaatgggcaccagctgttgcaagggaccttctccggcccctccagctgccccctgtgtggcaaacctttcttgagctcagcctcgctcaaggagcacccccggggcaccctcctgtccgatggcagcccggccctgtccaggaatgtcggtatgacggtctctcagaaagggggtccccagccaacaccgagcccggctggccctgggacgcaactcggaccaatcacaggagagatggatgaagccgattctgcgtttttaaaatttaagcagacagctgatgactctctgtcccttacatctccaaacaccgagtccatttttgtagaagatccctacaccgcctcgctgaggagtgagattgagtcagacggccacgagtttgaagctgagtcctggagcctcgccgtggatgcagcctacgccaagaagcaaaagagggaggtggtgaaaagacaagatgtcctttatgagctgatgcagacagaggtgcaccacgtgcggacgctcaagatcatgctgaaggtgtactccagggccctgcaggaggagctgcagttcagcagcaaggccattggccgcctcttcccatgcgctgacgacctgctggagacgcacagccacttcctcgctcggctcaaggagcgccgccaggagtccctggaggagggcagtgaccggaattatgtcatccagaaaatcggcgacctcctggttcagcagttttcaggtgaaaatggggagagaatgaaagaaaagtacggtgtgttttgtagtggccacaatgaagctgttagtcattacaagttgctgcttcagcaaaacaagaaatttcaaaacttgatcaagaaaattggcaacttctccatcgtgcggcggcttggcgtgcaggagtgcattctcctggttacacaacgcataaccaaatacccagtgctggtggagcgcatcatccagaacacggaagctggcactgaggactatgaagacctgacccaggccttgaacctcatcaaagatatcatctcacaagtggacgccaaggtcagtgagtgtgagaagggccagcgcctcagggagatcgcagggaagatggacctgaagtcttccagcaaactcaagaacgggctcaccttccgcaaggaagacatgcttcagcggcagctccacctggagggcatgctatgctggaagaccacatcagggcgcttgaaagatatcctggctatcctgctgaccgacgtacttttgctgctacaagaaaaagatcagaaatacgtctttgcttctgtggactcaaagccacccgtcatctcgttacaaaagctcatcgtgagggaagtggccaacgaggagaaagcgatgtttctgatcagcgcctccttgcaagggccggagatgtatgaaatctacacgagctccaaagaggacaggaacgcctggatggcccacatccaaagggctgtggagagctgccctgacgaggaggaggggcccttcagcctgcccgaagaggaaaggaaggtggtcgaggcccgcgccacgagactccgggactttcaagagcggttgagcatgaaagaccagctgatcgcacagagcctcctagagaaacagcagatctacctggagatggccgagatgggcggcctcgaagacctgccccagccccgaggcctattccgtggaggggacccatccgagaccctgcagggggagctaattctcaagtcggccatgagcgagatcgagggcatccagagcctgatctgcaggcagctgggcagcgccaacggccaggcggaagacggaggcagctccacaggcccgcccaggagggctgagaccttcgcgggctacgactgcacaaacagccccaccaagaatggcagtttcaagaagaaagtcagcagcactgaccccaggccccgagactggcgaggccccccaaacagcccggacttgaagctcagtgacagtgacattcctgggagctctgaggaatcgccgcaggtggtggaggcgccaggcacggaatccgatccccgtctgcccaccgtcctggagtcggagcttgtccagcggatccagacactgtcccagctgctcctgaaccttcaggcggtaatcgcccaccaggacagctatgtggagacgcagcgggctgccatccaggagcgggagaagcagttccggctgcagtcgacgcgtgggaacctgctgctggagcaggagcggcaacgcaacttcgagaagcagcgggaggagcgcgcggccctggagaagctgcagagccagctgcggcacgagcagcagcgctgggagcgcgagcgccagtggcagcaccaggagctggagcgtgcgggcgcgcggctgcaggagcgcgagggcgaggcgcggcagctacgcgagcggctggagcaggagcgggccgagctggagcgccagcgccaggcctaccagcacgacctggagcggctgcgcgaggcccagcgtgccgtggagcgcgagcgggagcgcctggagctgctgcgccgcctcaagaagcagaacaccgcgccaggcgcgctgccgcccgacacactggccgaggcccagcccccaagccaccctcccagcttcaacggggaagggctggagggccctcgtgtgagcatgctgccatccggcgtggggccagagtacgcagagcgccccgaggtggctcgccgggacagcgcccccaccgagaaccggctggccaagagcgatgtgcccatccagctgctcagcgccaccaaccagttccagaggcaggcggccgtgcagcagcagatccccaccaagctggcggcctccaccaagggtggcaaggacaagggcggcaagagcaggggctctcagcgctgggagagctcagcgtccttcgacctgaagcagcagctgctgctcaacaagctcatggggaaagatgagagcacctcacggaaccgccgctcgctgagccctatcctgcccggcagacacagtcctgcgcccccaccagaccctggcttccccgccccgagcccaccgccagctgacagcccctccgagggcttctctctcaaggccgggggcacagccctcctgcccgggcccccagctccctcgccactgccggccaggtggcgtcggcagcatctgtccccagaatcaggcagaatccacttcccaaacagagccccacgcaggttcaccatgaacctcagggtcagggaatgagccaggcacgggggcatgggcagagagggccacggggcagggcccactgagggaacatcagtggccctccagtcaggttctgtgggtttggaagcccatcgtgaaaggggctgacctttgcccctttttacttggcattggttttgaaaccagctgtttcccaaactctgcttcccaagggcaaccgttgctgttcacacgctcagcctgtctgggggagcgggcctctagcttcagccagggcgggtacacaccctgggcacagggtcctcagcccccgggaaatgagctcccagggctggcgtcccaccttccaggtgggggctggcacatcacagactgtcgagagcgccatgtcccagggcatgcagaggatgcacctagagacgttgcagcaagtggacaagtggccgctgtgcgggcccctcgcttgtagtgagctgttgcagcttacggtccgttccctggaggggtggaggaaggaggtgttgggcagcatcaaaggtgctgggacatcccagggtggtgagatccatccacgatccagctccggtggagaaagggcccatgtcaagccttgttctgcaccccaagcattggtggtaggactgggtcctggctgatcgtccttgttcccagtggggtacatgtgagcccctgccagggccaagtccttctcccgaacccagggtcctgggaactgcagatcccggggggattcagcccttctcccactgtgctggcagaggcactcctgtgacgctgaatacagtgaacagggacattcccgccactcggggacagatgggcacaagggaggggaaactccatcaggaagtgctcccctgggcagaggcgcccactgggtgctgtgggctcaggagggggcggggcaggagctggtgccaaccgggaaccagagccccacagccatacagcccattggtgacaaggtcctgagaacacagtggccaggtgtccccaggctcctggcccctccgacgacctcaactctgcccagcccggtccctggccatcagcgacgctgtccgccccccgtcagatcccatgtgtgccatgtttatcatcagtgttttgtatttttgtactgagtatcggagcactttacagaagctgactgtacattcctgttctgttgtgaagagaacattcccagaccctggcaccctcctgagccggcgtgtgccggtccagccctccgagatgccacaattccttggatgggggagaagttcaaggaatttctgctcggccacgcggtgggaaccccgcgtccccgccatgtggcagaggggtctcagtcgtgctaggcatcgggcggcagcgccgacagcccttccctcgccagtgcccctcggccactcctgggttggagcccgattttatttgtaaagttgacagtcgagcaaatgttcctattttcgtgggatctgcacacgtctttgtcagttgtggtcatgatcttagtcacctgctaattatttttacaatgattacaacatttcctcactgcgggatatttctgacccgctttagaacttaagacctgattctagcaataaacgtgtccgagatg

SEQ ID NO: 122895 - DNA, 1207 bp, Homo sapiens
  Payload ID: 4110
  Gene Symbol:
  Gene Name: CTD-2278I10.6
  ENST ID: ENST00000596542
  CDS Start-End: 124-450
tcccaggaggcgtcggggctgcgccgtacaacttccggctgtaaagatggcggcttcctagtgagtcggcggctgatttagaaggaggttcaggctacggtgagccgaagccacacaggagccatggaagtggcagagcccagcagccccactgaagaggaggaggaggaagaggagcactcggcagagcctcggccccgcactcgctccaatcctgaaggggctgaggaccgggcagtaggggcacaggccagcgtgggcagccgcagcgagggtgagggtgaggccgccagtgctgatgatgggagcctcaacacttcaggagccggccctaagtcctggcaggtgcccccgccagcccctgaggtccaaattcggacaccaagggtcaactgtccagagaaagtgctccaaaaccaacgccctcaatgtctcccagaagatgattgagatgttcgtgcggacaaaacacaagatcgacaaaagccacgagtttgcactggtggtggtgaacgatgacacggcctggctgtctggcctgacctccgacccccgcgagctctgtagctgcctctatgatctggagacggcctcctgttccaccttcaatctggaaggacttttcagcctcatccagcagaaaactgagcttccggtcacagagaacgtgcagacgattcccccgccatatgtggtccgcaccatccttgtctacagccgtccaccttgccagccccagttctccttgacggagcccatgaagaaaatgttccagtgcccatatttcttctttgacgttgtttacatccacaatggcactgaggagaaggaggaggagatgagttggaagtagaggagctgctgcgctgcggcgcggaccctaatttggtgctagaggacggcgcagcggctgtgcacttggcggccggagcccggcacccgcgcggcctgcgttgcctcggggccctactgcgccaaggcggggaccccaacgctcgatctgtcgaggcactgacgccgctgcatgtggccgccgcgtggggctgccgccgcggcctggagctgctgctgagccaaggagcggacccggcgctgcgcgaccaggacggactccggccgctggacctggccctgcagcagggacacctggagtgcgcgcgagtcctgcaggatctcgacacgcggaccaggacccggacccggatcg

SEQ ID NO: 122896 - DNA, 420 bp, Homo sapiens
  Payload ID: 4111
  Gene Symbol:
  Gene Name: CTD-2287O16.3
  ENST ID: ENST00000600981
  CDS Start-End: 179-420
gtatggaacacaatcattgattaatctaatatatacaatagggagaaccgtaactacagatttacagattgtggagcaacaaatagagcggcagttaaaatgcttggcatttcgaaaccctggaccacaggtagcagactttaatcctgaaacaaggcagcagaaaaagaaagcccggatgtcaaagatgaatgaatatttttctaccaaatacaaaataatgaggaagtatgacaaaagtggcaggctcatctgtaatgacgctgatctgtgtgattgtctagagaagaactgcctgggctgcttctacccatgcccgaagtgtaactccaacaagtgtgggcccgagtgccgctgcaaccgacggtgggtttacgatgccatcgtcactgagtcaggagaggtcatcagcacgctgcc

SEQ ID NO: 122897 - DNA, 213 bp, Homo sapiens
  Payload ID: 4112
  Gene Symbol:
  Gene Name: CTD-2313N18.7
  ENST ID: ENST00000530210
  CDS Start-End: 1-213
atgagggtcttgttttttgtctttggagtcctttccttgatgtccacagttcctccaaccagaagcttcacttctaatgatgaatgtccttcagaatattatcattgcagactgaagtgcaatgctgatgaacatgcaattagatactgtgctgacttcagcatctgctgcaaactgaagatcattcaaattgatggacaaaagaagtggtga

SEQ ID NO: 122898 - DNA, 1966 bp, Homo sapiens
  Payload ID: 4113
  Gene Symbol:
  Gene Name: CTD-2331H12.8
  ENST ID: ENST00000634278
  CDS Start-End: 504-1966
cggcccctcttttctcaacccagagcaaattgaaacgtccgggctggagtgcaatggcgcgatcttggctcaccacaacctccgcctcctgggttcaagtgatctcctgcctcagcctccccagtagccgggattacagtagagacaaggtttcaccatattggccagactgttctctgaactcgacctcaagtgatccacccacctcggcctcccagagtcctgggattacaggctggagggcagttgtgcgatcttgattcacttcaacctctgctctccgggctcaagcaattctcccacctcagcctgagtctcactctgtccttcaggctgtgagtgcagtctcctgatcttggctcactgcaacctctgtctcctgggttcaagtgattcttgtgcctcagcctaccaagtagctgagatacaggattgacttctaaagactcttggtacctgaggaagaaacccagaagaggaagaggaaagcaaaggagtcggggatggctctttctcagggtctactgacattcagggatgtggccatagaattctctcaggaggagtggaaatgcctggaccctgctcagaggactctatacagagacgtgatgctggagaattataggaacctggtctccctggatatctcttccaaatgcatgatgaatacattgtcatcaacagggcaaggcaatacagaagtgatccacacagggacattgcagagacaagcaagttatcacattggagcattttgctcccaggaaattgagaaagacattcatgactttgtgtttcagtggcaagaagatgaaacaaatgaccatgaagcacccatgacagaaataaaaaagttgactagtagtacagaccgatatgatcaaaggcatgctggaaacaagcctattaaaggtcagcttgaatcaagatttcatttgcatttgcgaagacataggagaattcatactggagagaaaccttacaaatgtgaagaatgtgagaaagttttcagttgcaaatcacatcttgaaatacataggataattcatactggagagaaaccatacaaatgtaaggtttgcgacaaggcttttaagcatgattcacacctggcaaaacatactagaattcacaggggagacaaacattacacatgtaatgaatgtggcaaggtttttgatcaaaaagcaacccttgcatgtcatcatagaagtcatactggagagaaaccttataagtgtaatgagtgtggcaagacctttagtcagacatcacaccttgtgtaccatcatagactgcatactggagagaaaccttacaaatgtaatgagtgtggcaagaccttcgctcgaaattcagtcctcgtaattcataaggcagttcatactgcagagaaaccctataagtgtaatgaatgtggcaaggtttttaagcaacgagcaactcttgcaggacatcgtagagttcacactggagagaaaccttacagatgtgaagaatgcgacaaagttttcagtcgcaaatcacatcttgaaagacataggaggattcatactggagagaaaccatacaaatgtaaggtttgtgacaaggctttccggagtgattcacgtcttgcagaacatcagagagttcatactggagagagaccttacacatgtaatgaatgtggcaaggtttttagtacaaaagcgtacctcgcatgtcatcaaaaacttcatactggagagaaactttacgaatgtgaagaatgtgacaaagtttacattcgcaaatcacaccttgaaagacataggaggattcatacaggagagaaacctcacaagtgtggtgattgtggtaaagcctttaattcaccttcacaccttattaggcatcagagaatccatactggacagaaatcttacaaatgtcatcagtgtggcaaggtctttagtctgaggtcactccttgcagaacatca

SEQ ID NO: 122899 - DNA, 809 bp, Homo sapiens
  Payload ID: 4114
  Gene Symbol:
  Gene Name: CTD-2349B8.1
  ENST ID: ENST00000564808
  CDS Start-End: 1-314
ggcatttcctccccgctagctggcgcggcctcgcctccccctcggaagaggaaactcccggggtccgagtaacagggtcaggcgcggagaggagcggcgggagagccaggagggccgcccaggctatgtcctcctgcgctgtcgccacgctgtccggcagcgcttcctgcccgggtctccccgtctggagggtcacgccgccttctcctcgagacacttccgagagccgggcctcagcatcctgctggagagttactacgagcatgaggtgcgcctgtctccgcacgtgttgggccacagcaaggcgcacgtgagccggatcgtgggcgagctggtgcgggctggccgcgcccgggggtcccccggtctcattcctgggggagcgctggccttggccttccgcggagacttcatccagggtctcagtctgttgcccaggctggagtgcagtggcaagattgcagctcattgcagccttgacctcctgggctcaagcgatcctcctgcctcggcctcccaactagctgggaccacaggttccttggaagagtcaaaaagtaaaatggagaaactgagaagtgttatctaaatgtcgactgtgttcttttaggaatgcaccagcatttctggaaccacaggaagttggaaccattaaacgagggttttctttctagaatctctggtctgctgctgtgcagatggacctgccggcactgctgtcagaagtgctacgagtccagctgttgccagtcaagtgaggatgaagttgaaattctgggacctttccctgctcagacccctccctggct

SEQ ID NO: 122900 - DNA, 365 bp, Homo sapiens
  Payload ID: 4114
  Gene Symbol:
  Gene Name: CTD-2349B8.1
  ENST ID: ENST00000568526
  CDS Start-End: 1-229
ccggggtccgagtaacagggtcaggcgcggagaggagcggcgggagagccaggagggccgcccaggctatgtcctcctgcgctgtcgccacgctgtccggcagcgcttcctgcccgggtctccccgtctggagggtcacgccgccttctcctcgagacacttccgagagccgggcctcagcatcctgctggagagttactacgagcatgagtctgactctgttacctaggctggagtacagtggtggcaccatagctcactgcagccttcaactcccaggctcaagccatcctcctgcctcagcccccgattggaaccattaaacgagggttttctttctagaatctctggtctgctgctgtgca

SEQ ID NO: 122901 - DNA, 1956 bp, Homo sapiens
  Payload ID: 4115
  Gene Symbol:
  Gene Name: CTD-2369P2.10
  ENST ID: ENST00000452032
  CDS Start-End: 5-442
cgtgatgcatgtcatggccgcctccatggcccggggaggcgtgagtgccagggttctactgcaggctgccaggggcacctggtggaacagacctgggggcacttccgggtcgggggagggggtggcgctggggacaaccagaaagtttcaagcgacaggctcgcgcccggctggagaggaggacgcgggcggcccggagcggcccggggacgtggtgaacgtggtgttcgtagaccgctcaggccagcggatcccagtgagtggcagagtcggggacaatgttcttcacctggcccagcgccacggggtggacctggaaggggcctgtgaagcctccctggcctgctccacctgccatgtgtatgtgagtgaagaccacctggatctcctgcctcctcccgaggagaggagaactcgcggctgggctgccagattgtgctgacaccggagctggaaggagcggaattcaccctgcccaagatcaccaggaacttctacgtggatggccatgtccccaagccccactgacatgaacacctggaccattccacattgccatggccccagggcccagattgagggaatagccaggtgccagccctgcccagagtgcggacaggcccgggagagacgtggaagcccctgtgaaggacaacacccctgcttgggagagagtcccatgtccaggcccctgagaatcagggtttgagtaggagtggactcatattggagctgcaataaatcgataacacaggccccagcatgttgagtgtccttgggggacagatctggggtctacaggtggctcacacctgtaatcctagcactttgggaagccaagatgggaggatcacttgaggccaggagcttaagaccatcctgggcaacatggcgagacctcgtctctataaaaacagtaaaaattagcgtggagtggtggtaagtgcctgtagtcccagctactcgggagactgaggtgggaggatcacttgagcccaggggatttaggctgcagtggagcggtgatcaggccattccactccagcctgggtgacagagtgaggccctgtctcaaaaaaaaaaaaaacaaaaacaaaaacaaaccacacctgcatctgctgtgctgggcccccggttctcttttccctctgggatctaagatgccgctggggatccaaggcagaggcctgggagcccccatttccgagggggagggctagcgtggaaggccccgccccggcagctgcggagggatttggtggggtccaggccgcccttgccacgcaggggtgcgcggatgacctgaaaaaagccagaaagaggaaaggtgccgccgaggctggtcgctctcagctggggctcatcgcatcctctaccaagagcgctcccaccacacaggtcccgcccctcccagcaaagcttctggcgccgccctgtctgaacctggagcggctgggaggatccccctcccaggagaagccgaggaccccaggatgctgcagaatcagtgagaggtccctctggcctgcatgccaggagtcggtcaccgccctgtgcttcctccaagagacagtggagaggctggggattccaaggacacacagaccaggatcagccaaaagggccgccgtctgcagcccccggggactccctcggccccaccccagagaaggccccggaaacagctgaacccctgccggggcaccgagagagtggaccctgggttcgagggggtgactctgaagtttcagataaagccggactccagcctgcagatcatccccacgtacagcctgccctgcagtagccgttctcaggaatcccctgcagatgctgttgggggccctgcagcccacccaggaggcaccgaggcccactcagcaggcagcgaggccctggagccccggcgctgtgcttcctgtcggacccagaggaccccgctctggagagacgctg

SEQ ID NO: 122902 - DNA, 1850 bp, Homo sapiens
  Payload ID: 4116
  Gene Symbol:
  Gene Name: CTD-2369P2.12
  ENST ID: ENST00000586529
  CDS Start-End: 1-474
agctacagcttcgactacccctcggacatgggacctcggcggctcttctcccacccacgggaaccagcccttgggcctcacggacccagccgacacaagatgtcccccccgcccagtggcttcggcgaacggagcagcggtgggagtggcgggggccccctgtctcacttctattcaggctcgcccacttcctacttcaccagcggcctgcaggctggcctcaagcagagccacctcagtaaggcaatcggctcttccccgctggggtccggagaagggctcctgggcctcagccccgggcctaatggtcacagccacctgctgaagaccccactgggcggccagaaacgcagctttgcccacctgctgccctcgcccgagcccagcccagaaggcagctatgtgggccagcactcccagggcctcggcggccactacgcggactcctacctgaagcggaagaggattttctaagtggctggcaccagagataactcaagggcctgcaccaaatcgcttttgggttttctgatgttttgttttgtgttttttttaaaccattttctctctttcggtaatagaaaaatctctgaaagactttactgaccaatcagccggagccccaggagcccaaggggtgtgggggagtctggaggcctcattatgtctctggcttgctccccacgctgaaaccctgcagccttaagagagaggggccccggcctgctctccctccctccccccatctcctcctccgctgtgcccgtctctccggagccctcctgcctcattgctcctgtaattttggcctttcgagtgccttggaggtttccctgacctcccgtgaagatacagagactgtctcctttttttttaactttgacaactgacttctgtttccttttctaagttttatttttcaaaccaccccggacagcccccagctctgattccttcaaggcccggcctgtccgggccaccattccacaccttgcggtttgaaacagctgtttttcccacatttgctgcaggcatggctgtctcctgcccctgcctgcccatctggcctataccccagccgtggggcccggggtccctgccgcagccccctccccttctgatgccttaaaagctgggccccaggccctgctggccagagccacagatgccaagctctgggagcttgactatggaccaaacagctctggcctagggattgggccaccctacccaggatctccaccctggggacagtagaaggggaaagccttcatcttggcgaaccggccccaccaccccctcctacccgggcctccgtgcagagatgggctttctctgccagtcccctgctgtctgtctgtgggagtcggacattgtgcccatctcccggagcctctgctgtcactcgcttgttgaagatgaattcttgaattctgcctgcccacccccggccagatccctggagctggcctccttccagcccagtgccagaaaccagcactccatgaagataaactctgggcccgcccaccagcaggacctgtcgacctgaggtgaccctgggccttgcccccagccaactgggccaccagcttccctcccttgactctgggggtccacatccactccaaggggactattcccccgaccccaccccagtctccccacacggacctttgctgaattaaagtttgccctaagcaaacatctgcgcttatgttccattgattatgggctttccctcgcctccctggcgcggcgcatgctcagtcggctcgcgcccggctggagaggaggacgcgggcggcccggagcggcccggggacgtggtgaacgtggtgttcgtagac

SEQ ID NO: 122903 - DNA, 760 bp, Homo sapiens
  Payload ID: 4117
  Gene Symbol:
  Gene Name: CTD-2370N5.3
  ENST ID: ENST00000578021
  CDS Start-End: 1-371
tctgtgcggaaaacaacaacaacatggctatgctaatttgcttaattataattgcagtgctttttcttatctgtacctttctatttctatcaactgtggttttggcaaacaaagtctcttctctcagacgatcaaaacaagtaggcaagcgtcagcctagaagcaatggcgattttctggcaagcggtctatggcccgctgaatcagacacttggaaaagaacaaaacagctcacaggacccaacctagtgatgcaatctactggagtgctcacagctacaagggaaagaaaagatgaagaaggaactgaaaaacttactaacaaacagatagccaaatcaccaaaatgtccagttagaacaagaatttagcattctgcaaaagaagttaacagctgagggccatttatcatcactgtgtaccaagtggtagaggagtaagcaatgatatgctgtttagatatgctgaaaagataacgaggaaatattctgaaatggatcccaaatatttcatcttaattttgttttgtggacacctgaacaatacatttttttcaaagacagagacaattacaacagagaagcagtcacagcctaccttattcacatcatcaatgtcacaggtattggctaattctcaaaacacaacagggaatcctttgggtcaaccaacacaattcagcgacactttttctggacaatcaatatcacctgccaaagtcactgctggacaaccaacaccagctgtctatacctcttct

SEQ ID NO: 122904 - DNA, 608 bp, Homo sapiens
  Payload ID: 4117
  Gene Symbol:
  Gene Name: CTD-2370N5.3
  ENST ID: ENST00000584948
  CDS Start-End: 1-353
tctgtgcggaaaacaacaacaacatggctatgctaatttgcttaattataattgcagtgctttttcttatctgtacctttctatttctatcaactgtggttttggcaaacaaagtctcttctctcagacgatcaaaacaagtaggcaagcgtcagcctagaagcaatggcgattttctggcaagcggtctatggcccgctgaatcagacacttggaaaagaacaaaacagctcacaggacccaacctagtgatgcaatctactggagtgctcacagctacaagggaaagaaaagatgaagaaggaactgaaaaacttactaacaaacagatagataacgaggaaatattctgaaatggatcccaaatatttcatcttaattttgttttgtggacacctgaacaatacatttttttcaaagacagagacaattacaacagagaagcagtcacagcctaccttattcacatcatcaatgtcacaggtattggctaattctcaaaacacaacagggaatcctttgggtcaaccaacacaattcagcgacactttttctggacaatcaatatcacctgccaaagtcactgctggacaaccaacaccagctgt

SEQ ID NO: 122905 - DNA, 1008 bp, Homo sapiens
  Payload ID: 4117
  Gene Symbol:
  Gene Name: CTD-2370N5.3
  ENST ID: ENST00000578584
  CDS Start-End: 47-562
aaaccctataactcctgaagtagattataaaggtaattctacaaacatgcctgaaacatctcacatcgtagctttaacttctaaatctgaacaggagctttatataccttctgtcgtcagcaacagtccttcaacagtacagagcattgaaaacacaagcaaaagtcatggtgaaattttcaaaaaggatgtctgtgcggaaaacaacaacaacatggctatgctaatttgcttaattataattgcagtgctttttcttatctgtacctttctatttctatcaactgtggttttggcaaacaaagtctcttctctcagacgatcaaaacaagtaggcaagcgtcagcctagaagcaatggcgattttctggcaagcggtctatggcccgctgaatcagacacttggaaaagaacaaaacagctcacaggacccaacctagtgatgcaatctactggagtgctcacagctacaagggaaagaaaagatgaagaaggaactgaaaaacttactaacaaacagatagccaaatcaccaaaatgtccagttagaacaagaatttagcattctgcaaaagaagttaacagctgagataacgaggaaatattctgaaatggatcccaaatatttcatcttaattttgttttgtggacacctgaacaatacatttttttcaaagacagagacaattacaacagagaagcagtcacagcctaccttattcacatcatcaatgtcacaggtattggctaattctcaaaacacaacagggaatcctttgggtcaaccaacacaattcagcgacactttttctggacaatcaatatcacctgccaaagtcactgctggacaaccaacaccagctgtctatacctcttctgaaaaaccagaagcacatacttctgctggacaaccacttgcctacaacaccaaacaaccaacaccaatagccaacacctcctcccagcaagccgtgttcacctctgccagacaactaccatctgcccgta

SEQ ID NO: 122906 - DNA, 879 bp, Homo sapiens
  Payload ID: 4117
  Gene Symbol:
  Gene Name: CTD-2370N5.3
  ENST ID: ENST00000581884
  CDS Start-End: 1-460
ctgtgcggaaaacaacaacaacatggctatgctaatttgcttaattataattgcagtgctttttcttatctgtacctttctatttctatcaactgtggttttggcaaacaaagtctcttctctcagacgatcaaaacaagtaggcaagcgtcagcctagaagcaatggcgattttctggcaagcggtctatggcccgctgaatcagacacttggaaaagaacaaaacagctcacaggacccaacctagtgatgcaatctactggagtgctcacagctacaagggaaagaaaagatgaagaaggaactgaaaaacttactaacaaacagatagaggaggaaacggtgactcagaagtgcagagtcttgcctaaggtcatacaagtaaacagaacacatcactcacttcttatgagaagaaatctcactaaactatttcagtttgctagaggaacattttaaatctgaattgaaccacccattttcctttcttagccaaatcaccaaaatgtccagttagaacaagaatttagcattctgcaaaagaagttaacagctgagggccatttatcatcactgtgtaccaagtggtagaggagtaagcaatgatatgctgtttagatatgctgaaaagataacgaggaaatattctgaaatggatcccaaatatttcatcttaattttgttttgtggacacctgaacaatacatttttttcaaagacagagacaattacaacagagaagcagtcacagcctaccttattcacatcatcaatgtcacaggtattggctaattctcaaaacacaacagggaatcctttgggtcaaccaacacaattcagcgacactttttctggacaatcaatatcacctgccaaag

SEQ ID NO: 122907 - DNA, 483 bp, Homo sapiens
  Payload ID: 4118
  Gene Symbol:
  Gene Name: CTD-2410N18.5
  ENST ID: ENST00000519718
  CDS Start-End: 211-483
agagagccgagctctggagcctcagcgagcggaggaggaggcgcagcggccgacggccgagtactgcggtgagagccagcgggccagcgccagcctcaacagccgccagaagtacacgaggaaccggcggcggcgtgtgcgtgtaggcccgtgtgcgggcggcggcgcgggagcagcgcggagcggcagccggctggggcgggtggcatcatggacgagaaggtgttcaccaaggagctggaccagtggatcgagcagctgaacgagtgcaagcagctgtccgagtcccaggtcaagagcctctgcgagaagatgccttcaattaagttgcagagttctgatggagagatatttgaagttgatgtggaaattgccaaacaatctgtgactattaagaccatgttggaagatttgggaatggatgatgaaggagatgatgacccagttcctctaccaaatgtgaatgcagcaatattaaaaaag

SEQ ID NO: 122908 - DNA, 4862 bp, Homo sapiens
  Payload ID: 4119
  Gene Symbol:
  Gene Name: CTD-2501B8.1
  ENST ID: ENST00000577647
  CDS Start-End: 46-2265
attggccaggggacggtagctgcaggactctgctctcctgcggccatgggccagggttgggctactgcaggacttcccagcctcctcttcctgctgctctgctacgggcaccctctgctggtccccagccaggaggcatcccaacaggtgacagtcacccatgggacaagcagccaggcaacaaccagcagccagacaaccacccaccaggcgacggcccaccagacatcagcccagagcccaaacctggtgactgatgaggctgaggccagcaagtttgtggaggaatatgaccggacatcccaggtggtgtggaacgagtatgccgaggccaactggaactacaacaccaacatcaccacagagaccagcaagattctgctgcagaagaacatgcaaatagccaaccacaccctgaagtacggcacccaggccaggaagtttgatgtgaaccagttgcagaacaccactatcaagcggatcataaagaaggttcaggacctagaacgggcagcactgcctgcccaggagctggaggagtacaacaagatcctgttggatatggaaaccacctacagcgtggccactgtgtgccacccgaatggcagctgcctgcagctcgagccagatctgacgaatgtgatggccacgtcccggaaatatgaagacctgttatgggcatgggagggctggcgagacaaggcggggagagccatcctccagttttacccgaaatacgtggaactcatcaaccaggctgcccggctcaatggctatgtagatgcaggggactcgtggaggtctatgtacgagacaccatccctggagcaagacctggagcggctcttccaggagctgcagccactctacctcaacctgcatgcctacgtgcgccgggccctgcaccgtcactacggggcccagcacatcaacctggaggggcccattcctgctcacctgctggggaacatgtgggcgcagacctggtccaacatctatgacttggtggtgcccttcccttcagccccctcgatggacaccacagaggctatgctaaagcagggctggacgcccaggaggatgtttaaggaggctgatgatttcttcacctccctggggctgctgcccgtgcctcctgagttctggaacaagtcgatgctggagaagccaaccgacgggcgggaggtggtctgccacgcctcggcctgggacttctacaacggcaaggacttccggatcaagcagtgcaccaccgtgaacttggaggacctggtggtggcccaccacgaaatgggccacatccagtatttcatgcagtacaaagacttacctgtggccttgagggagggtgccaaccccggcttccatgaggccattggggacgtgctagccctctcagtgtctacgcccaagcacctgcacagtctcaacctgctgagcagtgagggtggcagcgacgagcatgacatcaactttctgatgaagatggcccttgacaagatcgcctttatccccttcagctacctcgtcgatcagtggcgctggagggtatttgatggaagcatcaccaaggagaactataaccaggagtggtggagcctcaggctgaagtaccagggcctctgccccccagtgcccaggactcaaggtgactttgacccaggggccaagttccacattccttctagcgtgccttacatcaggtactttgtcagcttcatcatccagttccagttccacgaggcactgtgccaggcagctggccacacgggccccctgcacaagtgtgacatctaccagtccaaggaggccgggcagcgcctggcgaccgccatgaagctgggcttcagtaggccgtggccggaagccatgcagctgatcacgggccagcccaacatgagcgcctcggccatgttgagctacttcaagccgctgctggactggctccgcacggagaacgagctgcatggggagaagctgggctggccgcagtacaactggacgccgaactccgatgacttctacaatgagaccgagaccaagatcttcctgcagttttatgaccaaacagggatttgggaccatggggcaccacatctcctgcccccatcccaagcaagaggaacaagggaagccccagtgtacatgtcaaagagggctgcaagctctgggcctcctggaagccctaaacttcctccagctgcacaaggacatggagaggtcccagttcatgatttactttggcacccaggcccacctgtttaaagtcacccagttcaaggacccggatgtgaatggcatgctgaaactcgaagtcatggccacctccagggacaaagaggagctgctgtgggcctggcagggctggcaggatgccgtgggccgccagatctgcaccaccttcgagcactatgtggagctcagcaacaaggctgcacagctcaacggaagaggctgctgagaaagagaatgagaagaggctgctgcagacaagtggacagggaaggcctctgacatttatccaagacctgaaagatgggcaaaagacgggaagcaagatgtgaaagaagagcagcctaggcagaggctccgcggcaggaggagccggtgctctggaagacctgaaagaagcccaggttacaaagacatgggggccttgtggcactccaagtatgagtcggataccctggagcaagacctggagcggctattccaggagctgcggccactctacctgaacctgcacacctacgtgcgcagggccctccaccgccactatgggcccgagctcatcgacctgagggggcccatccctgcccacctcctggagaacacgttggctcagtcctgggtcaacatcttagacccggtcctgcccttcctgaagaagatcccagaggatgtcacaaagatcatgaaagtccagcactggaagccagagaaaatgttggaagaggctgagacattcttcacctccttggcgctgccacctgccccacccagtttctggaaaaagttgatgctaatgaggccaaccgatgggcgagaggtggagtgtcacatctctgcctggaacttctaccaggacgacgatttcagctaggaggctgaggcaggagaatcactggaacctgggagccggaggctgcagtgagccaagatcgcaccattgcactccagctgggagacacagcaagactccgtctcaaaagaaaaaaaaaaaaaagaacaactgccaagaataaagaagtgcgcggaagtgaccacagaagacccgctctccatcttccacgaaatgggccattccagtacttcctgcagtacaagaacctctccatcatcttccgcgcaggtgccaacccagcctttgaagaggctgtggggtctgtgatcaccctctcggcctcctcccacaagcacctgctcaacataggcctgctcagcctctagcaccaggactcagaggatgaggtcaatttcctgatgcatattgccctggagaagatcgccttcatcccctttggctacctgatggacctccttcgctggaaggtctttgacggcaccatctggaaggacatctacaatcaggagtggtggaacctcaggttgaaataccagggcttgtgccccgctattcctcactcagaggaagactttgatccaggtgccaagttccacttttctgcaggtacttcctcagtctggtgctccagttccagttccacgaaacactgtgcaaagcctcgggccacatgggtccactgcaccagtgtgacatctacaactccaagattgccgggaagctcctgggggatgctctaaagctgggctcaagcaagccctggccagaggtcctaaagatgctgactggggagtctgaggtgtctacaaatgtcttcatgacctacttcaaacccctactgacctggctggtgacagaacatgcagcaaggggacatcttaggctggccagacttcagctgttcctttgaagaaaaagacacagacaaagtgacattcctgagtctgaagctggaccccaaccaggctaaatttgggtactgggtgctgttggccctgggctttgtcatgtctctggtggtgctggggctggcctgcaggctgcagtccctggaaaaacagtcactgactcaagacactgagatattcagcccactgcccaatgcctgcttcctgggcatagccatggaaccctgccaggctgctaaaggacagtggatgctgctgggcctctgccttgtcctgatgctgtgctcaatcagcctggccatctggattttcacacagtaaagcaggaagcctccaaggtaacccggctatgggactgcagtgcccaaggaatttctgctctggttagaaaaaggactctgcttcagtccacttctgctctggttagaaaaaggactctgcttcagtccacagtacataaaatgtactcagctatcagctctataagagctggatgcacatcaggagtgtgcccctctgtaacaactctagtcagcacaggccatggtgcacaaaagggacttggaaaatgatggaatgaccagcctgtccaacagaggggcagccaggacatctctgccctcttctcatcccccagccacagtggccaaagaggcccccactaggcactgtggctctgcatgacaaacacacatccagcccaggactctaagcctctcacctggactccagtaaaaaccttgctgagcctccttgtctatccttcctcccccacccaccattgtaaagtttatgtcaccagaatatttctttcatgtctaattgcttaagaacttggttgttcatcaattaaatctagatgttcaaaa

SEQ ID NO: 122909 - DNA, 557 bp, Homo sapiens
  Payload ID: 4120
  Gene Symbol:
  Gene Name: CTD-2510F5.6
  ENST ID: ENST00000577660
  CDS Start-End: 1-333
gatctgcggaaactgcttagaaaagtcgatgtagagaggagcccaggtggaacccctcttaccaataaggaaaatatggaaacaggaacaggactgactccagtgatgacgcaggccttaaggagaaagtttcaggttcagccaggcccaccaccatgtccggtattctacccagaaaaacaagaaatcacccttccacctgatggcctttgggttttgagatttccttatgcatatgtgactgagagaggaccttgtttcccccctaaggaaaatgtgcagttaatgagctacaaggtgctccgtggggttcttaaggcagtaacacaataagtgttttccagccagttcaatcctatacttgagctggtttttgtttttggtatttgtggctgtgtttttggtatgtgtttactgtgttttcccaaatccaaaatgtgttttggttacaggagttcagtatttggaaactaatttgttctactttttcattatattgttgatatttattgtaaacgtgactacaactttctaataaagattggttgttctagaaa

SEQ ID NO: 122910 - DNA, 892 bp, Homo sapiens
  Payload ID: 4121
  Gene Symbol:
  Gene Name: CTD-2521M24.10
  ENST ID: ENST00000594663
  CDS Start-End: 215-892
ggaggctgaggtcagtcgcaggctggagaaccggctggtgctgctgttctttggtgctggggcttgtccacagtgccaggccttcgtgcccatcctcaaggacttcttcgtgcggctcacagatgagttctatgtactgcgggcggctcagctggccctggtgtacgtgtcccaggactccacggaggagcagcaggacctgttcctcaaggacatgccaaagaaatggcttttcctgccctttgaggatgatctgaggagggacctcgggcgccagttctcagtggagcgcctgccggcggtcgtggtgctcaagccggacggggacgtgctcactcgcgacggcgccgacgagatccagcgcctgggcaccgcctgcttcgccaactggcaggaggcggccgaggtgctggaccgcaacttccagctgccagaggacctggaggaccaggagccacggagcctcaccgagtgcctgcgccgccacaagtctgactggtttctctacgactgccgcctcctcagacatgtggcccttggccttttctgctgtgggatctccgtctatttagcagcactgtccatctatgccttgctacttttcgagatcgagacaggcgcagcagctgcttccatcctcggctcgggcaccctggttctggtggctgtgctgacccacactctcctccgggctgcccgggctgcccgccgtgggctccatgagttgtccccgccatcctttgaagacgacctcgcccgccctgccgaagtctccaaggccagccccagagctcagcctcagcagggtatccatcgtcggaccccctattcaacctgtccagagcctggggacccctttgggtccatggccactgccacagcacctgcagcc

SEQ ID NO: 122911 - DNA, 572 bp, Homo sapiens
  Payload ID: 4122
  Gene Symbol:
  Gene Name: CTD-2528L19.4
  ENST ID: ENST00000585547
  CDS Start-End: 234-428
attgacccttggctccaggttccctgctgcttcctgtgccttcctcagcctagtacgactacaacagagaaatggtcccaatgggaaatcagatactgagtcttagatgaagatttccagtgagaagaaacagataggatgagaagcttagaagagtaattgcccttaagaaaggacattccgtatctaagccagatttaatcaccttattggagcaaggaaaagagccatggatgattgtgagggaagaaacaagaggagagtgtacagatttggattcaagatgtgaaataatcagcgatgggaaaatgcagctttataggaaacactcatgtgttactctccatcagagaattcataatggacagaaaccatatgagtggaacacaacagatttgagaagcctcggattaaggaataatttatgaagctccgttgactaccgtggagagatcataatttggggttcaagattccaggccttttggttaagggaaactcaacctgtaatagctgctgcaatggggaagtgaactgaactggactggagtgcagtggcatgatctcggctc

SEQ ID NO: 122912 - DNA, 380 bp, Homo sapiens
  Payload ID: 4122
  Gene Symbol:
  Gene Name: CTD-2528L19.4
  ENST ID: ENST00000591114
  CDS Start-End: 150-269
acagagaaatggtcccaatgggaaatcagatactgagtcttagatgaagatttccagtgagaagaaacagataggatgagaagcttagaagagtaattgcccttaagaaagatttggattcaagatgtgaaataatcagcgatgggaaaatgcagctttataggaaacactcatgtgttactctccatcagagaattcataatggacagaaaccatatgagtggaacacaacagatttgagaagcctcggattaaggaataatttatgaagctccgttgactaccgtggagagatcataatttggggttcaagattccagggaaactcaacctgtaatagctgctgcaatggggaagtgaactgaactggactggagtgc

SEQ ID NO: 122913 - DNA, 704 bp, Homo sapiens
  Payload ID: 4122
  Gene Symbol:
  Gene Name: CTD-2528L19.4
  ENST ID: ENST00000586606
  CDS Start-End: 186-578
acagagaaatggtcccaatgggaaatcagatactgagtcttagatgaagatttccagtgagaagaaacagataggatgagaagcttagaagagtaattgcccttaagaaaggtcttggttcttttgactttgctcttctggtagagaaacgccaaggactgatcaactcttgccagtctcaaaccatgtcctatggatcaataacattcggggatgtggccatagacttctctcatcaggagtgggaatatctcagcctggttcagaagaccttgtaccaggaggtgatgatggagaactatgacaacttagtctcattggcaggacattccgtatctaagccagatttaatcaccttattggagcaaggaaaagagccatggatgattgtgagggaagaaacaagaggagagtgtacagatttggattcaagatgtgaaataatcagcgatgggaaaatgcagctttataggaaacactcatgtgttactctccatcagagaattcataatggacagaaaccatatgagtggaacacaacagatttgagaagcctcggattaaggaataatttatgaagctccgttgactaccgtggagagatcataatttggggttcaagattccaggccttttggttaagggaaactcaacctgtaatagctgctgcaatggggaagtgaactgaactggactggagtgca

SEQ ID NO: 122914 - DNA, 1616 bp, Homo sapiens
  Payload ID: 4123
  Gene Symbol:
  Gene Name: CTD-2535L24.2
  ENST ID: ENST00000577662
  CDS Start-End: 1-139
attgaaaggattgatgccagcatccctaagacaagaacttgaagacaccatttcctccctaaaatcacaggttaattttctgcaaaagagagcttccatccttcaggaagaactgactacatatcaaggcagaaggtaactgcacgagagaatgcaacggatgcaatttccaggctgtgctgtggacttcttccagcagagaggaggttcagatgagcccctgctgacttgagagagacagagagaccacgccgattgctgagaggaactggaagaagaaaaattcccagactcagtgggaagagctccctcaccatgagtagcgctatgttggtgacttgcctcccggaccccagcagcagcttccgtgaggatgccccgcggcccccagtgccaggggaagaaggggagaccccaccgtgtcagccaggggtgggcaagggccaggtcaccaaacccatgcctgtctcttccaacaccaggcggaacgaagatgggttgggggagccggaggggcgggcatctccggattcccctctgacccggtggaccaagtccttacactccttattgggcgatcaagacggtgcttacctgttccgaactttcctggagagggagaaatgcgtggataccttagacttctggtttgcctgcaatggattcaggcagatgaacctgaaggataccaaaactttacgagtagccaaagcgatctacaaaaggtacattgagaacaacagcattgtctccaagcagctgaagcctgccaccaagacctacataagagatggcatcaagaagcagcagattgattccatcatgtttgaccaggcgcagaccgagatccagtcggtgatggaggaaaatgcctaccagatgtttttgacttctgatatatacctcgaatatgtgaggagtgggggagaaaacacagcttacatgagtaatgggggactcgggagcctaaaggtcgtgtgtggctatctccccaccttgaatgaagaagaggagtggacttgtgccgacttcaagtgcaaactttcgccaaccgtggttggcttgtccagcaaaactctgagggccacggcgagtgtgaggtccacggaaactgttgacagtggatacaggtccttcaagaggagcgatcctgttaatccttatcacataggttctggctatgtctttgcaccagccaccagcgccaacgacagtgagatatccagtgatgcgctgacggatgattccatgtccatgacggacagcagtgtagatggaattcctccttatcgtgtgggcagtaagaaacagctccagagagaaatgcatcgcagtgtgaaggccaatggccaagtgtctctacctcatttcccgagaacccaccgcctgcccaaggagatgacccccgtggaacccgccacctttgcagctgagctgatctcgaggctggaaaagctgaagctggagttggagagccgccacagcctggaggagcgcctgcagcagatccgagaggtaatgcggcctaggccttcttcctgcttccgtccacggcgtgagcgctcgtatgtgtatgcgcatgtgcatggggtgcgttagggtgtgcgcatgtgcgt

SEQ ID NO: 122915 - DNA, 776 bp, Homo sapiens
  Payload ID: 4124
  Gene Symbol:
  Gene Name: CTD-2545G14.7
  ENST ID: ENST00000570760
  CDS Start-End: 1-89
acaatgccatccccatcaaatcctggttcagtgaccccagcgacacagcccttctcaacctgctcccaatgctggatgccctcaggtgatagtagaaaaggctcccaaagctcggataggagacctggacaaaaagaaatacctggtgccttctgatctcacagttggtcagttctacttcttgatccggaagcgaattcatctccgagctgaggatgccttgtttttctttgtcaacaatgtcattccacccaccagtgccacaatgggtcagctgtaccaggaacaccatgaagaagacttctttctctacattgcctacagtgacgaaagtgtctacggtctgtgaagctgctgcccctgagctggaggggggtctcattctacaaagagagaggtggcccccctttcttgacctcctcctccttcaagctcaaacaccacctcccttattcaggaccggcacttcttaatgtttgtggctttctctccagcctctcttaggaggggtaatggtggagttggcatcttgtaactctcctttctcctttcttcccctttctctgcccgcctttcccatcctgctgtagacttcttgattgtcagtctgtgtcacatccagtgattgttttggtttctgttccctttctgactgcccaaggggctcagaaccccagcaatcccttcctttcactaccttcttttttgggggtagttggaagggactgaaattgtggggggaaggtaggaggcacatcaataaagaggaaaccacc

SEQ ID NO: 122916 - DNA, 1265 bp, Homo sapiens
  Payload ID: 4125
  Gene Symbol:
  Gene Name: CTD-2545M3.6
  ENST ID: ENST00000599632
  CDS Start-End: 1-1192
gggtgtggccgcctacatgaagtcggaggacccgctgttcgtgctggagcacagcctgcccattgacacgcagtactacctggagcagcagctggccaagcccctcctgcgcatcttcgagcccatcctgggcgagggccgtgccgaggctgtgctactgcggggggaccacacgcgctgcaagacggtgctcacgggcaaggtgggcggcctcctggccttcgccaaacgccgcaactgctgcattggctgccgcacagtgctcagccaccagggagccgtgtgtgagttctgccagccccgggagtctgagctgtatcagaaggaggtatcccatctgaatgccctggaggagcgcttctcgcgcctctggacgcagtgccagcgctgccagggcagcctgcacgaggacgtcatctgcaccaggctcgacgggccacacttcagctgtctgtacccagatggcgtcttctatgacctggacagctgcaagcattccagctaccctgattcagagggggctcctgactccctgtgggactggactgtggccccacctgtcccagccaccccctatgaagccttcgacccggcagcagccgcttttagccacccccaggctgcccagctctgctacgaaccccccacctacagccctgcagggaacctcgaactggcccccagcctggaggccccggggcctggcctccctgcataccccacggagaacttcgctagccagaccctggttcccccggcatatgccccgtaccccagccctgtgctatcagaggaggaagacttaccgttggacagccctgccctggaggtctcggacagcgagtcggatgaggccctcgtggctggccccgaggggaagggatccgaggcagggactcgcaagaagctgcgcctgtaccagttcctgctggggctactgacgcgcggggacatgcgtgagtgcgtgtggtgggtggagccaggcgccggcgtcttccagttctcctccaagcacaaggaactcctggcgcgccgctggggccagcagaaggggaaccgcaagcgcatgacctaccagaagctggcgcgcgccctccgaaactacgccaagaccggcgagatccgcaaggtcaagcgcaagctcacctaccagttcgacagcgcgctgctgcctgcagtccgccgggcctgagcacacccgaggctcccacctgcggagccgctgggggacctcacgtcccagccaggatccccctggaagaaaa

SEQ ID NO: 122917 - DNA, 472 bp, Homo sapiens
  Payload ID: 4126
  Gene Symbol:
  Gene Name: CTD-2561J22.3
  ENST ID: ENST00000600810
  CDS Start-End: 1-279
gaattctctctggaggagtggcaatgcctggacactgctcagcaggatttgtataggaaagtgatgttagagaactacagaaacctggtcttcttggcaggtattgctgtctctaagccagatctggtcacctgtctggagcaaggaaaagatccctggaatatgaagggacacagtacggtagtcaaacccccaggaggggattgtagcatattcctaatggagcaccaaggtgatgtgacactgctgcctggtccctgccctcagagaagattgtgacatatcactgccccgaaacccaggtgtgattgttacatacacctctgcccagcacctgagtgatttgactcttctgcttgggcccagcgtacagatgggattgtgccgcattgctggacccagcacttaggtgatgacagaattgtaacatatccctggctgagcactcaggtgatgtgacactcctgcttgg

SEQ ID NO: 122918 - DNA, 556 bp, Homo sapiens
  Payload ID: 4127
  Gene Symbol:
  Gene Name: CTD-2574D22.6
  ENST ID: ENST00000562285
  CDS Start-End: 1-254
atgatgagccagtgacaccaaaggactccctgattgaccggagacgcaccccaggaagctcagcccggagccagaaacgggaggcccgcctggacaaggtgctgtcggacatgaagagacacaagaagctggaggagcagatccttcgtaccgggagggacctcttcagcctggactcggaggaccccagccccgccagccccccactccgatcctccgggagtagtctcttccctcggcagcggaaatactgattcccactgctcctgcctctagggtgcagtgtccgtacctgctggagcctgggccctccttccccagcccagacattgagaaacttgggaagaagagagaaacctcaagctcccaaacagcacgttgcgggaaagaggaagagagagtgctccccaggttcatcctgtgtcgtctcccccacctaccagtcatcttcttgtgagccctgggcttaggagtcaccatggcaactgaagagttcatcatccgcatccccccataccactatatccatgtgctggaccagaacagcaacgtgtcc

SEQ ID NO: 122919 - DNA, 556 bp, Homo sapiens
  Payload ID: 4128
  Gene Symbol:
  Gene Name: CTD-2583A14.10
  ENST ID: ENST00000593873
  CDS Start-End: 343-556
ctcttgtagcggccacgttgatctgcgatacgcgtgtttgcccagtgagtggccccggactgctacgtgggactgcggtgaatgaacccagaaggtggagaggaaccgttctcggtgcacagaggcggctctgcagcccggtgagggcgcctgctgctcccgggcagtgctttccccaagtagtccgatggctgcggctgcgccgaggcgccctactcaggttgttggtgtggatcaaaagatgaggaggcaccttgtaagcagagaatttctgtacaaagagagtctcagagcaggactcctagggcaggtgtttctcctaagaaggctcacccctgtgaaatgtgtggcctcatcttggaggatgtttttcactttgctgaccaccaggaaactcatcacaagcagaagctgaacaggagtggagcatgtggaaaaaacttggatgacactgcataccttcatcagcaccagaagcagcatattggagagaaattctacagaaagagtgtcagagaagcatcgtttgtaaagaaacgtaagctcagggtgtcac

SEQ ID NO: 122920 - DNA, 606 bp, Homo sapiens
  Payload ID: 4128
  Gene Symbol:
  Gene Name: CTD-2583A14.10
  ENST ID: ENST00000598031
  CDS Start-End: 108-606
aatgaacccagaaggtggagaggaaccgttctcggtgcacagaggcggctctgcagcccggtgagggcgcctgctgctcccgggcagtgctttccccaagtagtccgatggctgcggctgcgccgaggcgccctactcagcagggcactgtgacctttgaagatgtggctgtgaacttttcccaggaggagtggtgtcttcttagtgaggctcagaggtgcttgtaccgtgatgtgatgctagagaacctggctctcatatcctcgctgggttgttggtgtggatcaaaagatgaggaggcaccttgtaagcagagaatttctgtacaaagagagtctcagagcaggactcctagggcaggtgtttctcctaagaaggctcacccctgtgaaatgtgtggcctcatcttggaggatgtttttcactttgctgaccaccaggaaactcatcacaagcagaagctgaacaggagtggagcatgtggaaaaaacttggatgacactgcataccttcatcagcaccagaagcagcatattggagagaaattctacagaaagagtgtcagagaagcatcgtttgtaaagaaacgtaagctcagggtgtcac

SEQ ID NO: 122921 - DNA, 769 bp, Homo sapiens
  Payload ID: 4128
  Gene Symbol:
  Gene Name: CTD-2583A14.10
  ENST ID: ENST00000596498
  CDS Start-End: 370-769
ctcttgtagcggccacgttgatctgcgatacgcgtgtttgcccagtgagtggccccggactgctacgtgggactgcggtgaatgaacccagaaggtggagaggaaccgttctcggtgcacagaggcggctctgcagcccggtgagggcgcctgctgctcccgggcagtgctttccccaagtagtccgatggctgcggctgcgccgaggcgccctactcaggagcaacttggcgaggttcagactcttggagccagaagctacatgacccctaaacgggcactgtgacctttgaagatgtggctgtgaacttttcccaggaggagtggtgtcttcttagtgaggctcagaggtgcttgtaccgtgatgtgatgctagagaacctggctctcatatcctcgctgggttgttggtgtggatcaaaagatgaggaggcaccttgtaagcagagaatttctgtacaaagagagtctcagagcaggactcctagggcaggtgtttctcctaagaaggctcacccctgtgaaatgtgtggcctcatcttggaggatgtttttcactttgctgaccaccaggaaactcatcacaagcagaagctgaacaggagtggagcatgtggaaaaaacttggatgacactgcataccttcatcagcaccagaagcagcatattggagagaaattctacagaaagagtgtcagagaagcatcgtttgtaaagaaacgtaagctcagggtgtcacaggagccatttgtcttccgcgagtttggga

SEQ ID NO: 122922 - DNA, 540 bp, Homo sapiens
  Payload ID: 4128
  Gene Symbol:
  Gene Name: CTD-2583A14.10
  ENST ID: ENST00000597134
  CDS Start-End: 507-540
cggggtcctcttgtagcggccacgttgatctgcgatacgcgtgtttgcccagtgagtggccccggactgctacgtgggactgcggtgaatgaacccagaaggtggagaggaaccgttctcggtgcacagaggcggctctgcagcccggtgagggcgcctgctgctcccgggcagtgctttccccaagtagtccgatggctgcggctgcgccgaggcgccctactcaggagcaacttggcgaggttcagactcttggagccagaagctacatgacccctaaacgggcacagtgacttttgaagacgtggctgtgaaatttacccaggaggaatggaatctccttagtgaggctcagagatgcctgtaccgtgatgtgactctggagaacctggcacttatgtcctccctggcagggcactgtgacctttgaagatgtggctgtgaacttttcccaggaggagtggtgtcttcttagtgaggctcagaggtgcttgtaccgtgatgtgatgctagagaacctggctctcatatcctcgctgg

SEQ ID NO: 122923 - DNA, 580 bp, Homo sapiens
  Payload ID: 4128
  Gene Symbol:
  Gene Name: CTD-2583A14.10
  ENST ID: ENST00000603271
  CDS Start-End: 183-580
gtagcggccacgttgatctgcgatacgcgtgtttgcccagtgagtggccccggactgctacgtgggactgcggtgaatgaacccagaaggtggagaggaaccgttctcggtgcacagaggcggctctgcagcccggtgagggcgcctgctgctcccgggcagtgctttccccaagtagtccgatggctgcggctgcgccgaggcgccctactcagggcactgtgacctttgaagatgtggctgtgaacttttcccaggaggagtggtgtcttcttagtgaggctcagaggtgcttgtaccgtgatgtgatgctagagaacctggctctcatatcctcgctgggttgttggtgtggatcaaaagatgaggaggcaccttgtaagcagagaatttctgtacaaagagagtctcagagcaggactcctagggcaggtgtttctcctaagaaggctcacccctgtgaaatgtgtggcctcatcttggaggatgtttttcactttgctgaccaccaggaaactcatcacaagcagaagctgaacaggagtggagcatgtggaaaaaacttggatgacactgcata

SEQ ID NO: 122924 - DNA, 576 bp, Homo sapiens
  Payload ID: 4128
  Gene Symbol:
  Gene Name: CTD-2583A14.10
  ENST ID: ENST00000604231
  CDS Start-End: 218-400
tttatttgtcggagaggctcctgagcgctaggtcggcactgcggtgactgaacccagaaggcggagaacagttgtcctctgctgcacagaggcgactctggagctctgtgacggcgccaagcgtgacccacccctgggccaggatagggaccgtcatgcccatatctcctggctggtcaccctctcctcccaaccctgctttaaaccacgtggttcgatggcggtggtggccacgctgaggctctctgctcagggcacagtgacttttgaagacgtggctgtgaaatttacccaggaggaatggaatctccttagtgaggctcagagatgcctgtaccgtgatgtgactctggagaacctggcacttatgtcctccctggcagggcactgtgacctttgaagatgtggctgtgaacttttcccaggaggagtggtgtcttcttagtgaggctcagaggtgcttgtaccgtgatgtgatgctagagaacctggctctcatatcctcgctgggttgttggtgtggatcaaaagatgaggaggcaccttgtaagcagagaatttctgtacaaagagagt

SEQ ID NO: 122925 - DNA, 1020 bp, Homo sapiens
  Payload ID: 4129
  Gene Symbol:
  Gene Name: CTD-2583A14.9
  ENST ID: ENST00000602124
  CDS Start-End: 408-536
gtagcggctgtgtatcggtgacgcgggtgtttccccagtttgtggcccctgagtgctggggggggaccgcggtgactgaacctagaaggtggagaggaatcgtcctcggtgcccagaggcggctctgcagccccgtgacggcgaccactgctcccgggccgtgcttccccaagtagtccgatggcagcggctgcgccgaggcgcccgactcagagtgaaaccatgaactgaattccttccctaagttaattcagcctatacccaggaatgaacaaggacagctgaaaggttggaagcaagacggagtcagtaagggcactgtgacctttgaagatgtggctgtgaacttttcccaggaggagtggtgtcttcttagtgaggctcagaggtgcttgtaccgtgatgtgatgctagagaacctggctctcatatcctcgctggattgtcctctgcatctgtgccagtttcctgatttgtccccatgttggagggtctgcctggagaggctcctgagcgctaggtccgcactgtggtgactgaacccagaagtcggggagcagttgtcctccgctgcacagaggctactctggagctctgtgacggcgcccagcgtgacccactcctgggccaggatacggaccgtcgtgcccatatctcctggctggtcgccctatcctcccgactctgcttaaaaccacgtggttcgatggctgccgcggctacgctgaggctctccgctcagggcacagtgacttttgaagatgtggctgtgaactttacctgggaggaatggaatctccttagtgaggctcagagatgcctgtaccgtgatgtgacgctggagaacctggcacttatatcctccctgggtaagttgctcacactcaccctgtgacctgagctagtctctgttttcccctatctttccccattggtaagactttctcatgtcaggagcatggacacagcttcctgcttcagttctgtgggtaggttcttggttggtaggtctgaggtgta

SEQ ID NO: 122926 - DNA, 975 bp, Homo sapiens
  Payload ID: 4130
  Gene Symbol:
  Gene Name: CTD-2587H24.4
  ENST ID: ENST00000587871
  CDS Start-End: 1-517
cgcggagggaagcccggagccagggactccagcagccccgaccccggaatctttcaccgtccacttcctgccgctcaattctgctcagactctccaccacaagagctgctacaacggccgattccagctcctctatgtggcctgtggtatggtccatcttctcatccctgagcttggggcctgtgtggcacccggagggaacttgattgtggaattagcccggtacctggtggacgtgcggcaggagcagctgcagggattcaacacccgggtcagggagctagctcaggcagctggatttgctccacagaccggggccaggccttcagagaccttcgcacgtttctgcaagtcccaggaatcagctctgggcaacactgtcccagctgtggaacccggaactccgccccttgacatcctggcccagcctcttgaagccagcaacccagcccttgagggcctgacccagcctctgcaggtgtcctcggggagtctcaagcagcccggaggagactgacggtccctgggaccctgaaggtcacccgggcggccccctcactgaccctccaaacgcccctgtcctcgccctgcctcctgccattcccggcctgagtctcagcatggcggatgggtgagtgatgccccaagggaacctcgccctgcaccagccccaatcagacgccgctcctccaactaccgcgcttatgccacggagccgcacgccaagaaaaaatctaagatctccgcctcgagaaaattgcagctgaagactctgctgctgcagattgcaaagcaagagctggagcgagaggcggaggagcggcgcggagagaaggggcgcgctctgagcacccgctgccagccgctggagttggccgggctgggcttcgcggagctgcaggacttgtgccgacagctccacgcccgtgtggacaaggtggatgaagagagatacgacatagaggcaaaagtcac

SEQ ID NO: 122927 - DNA, 551 bp, Homo sapiens
  Payload ID: 4131
  Gene Symbol:
  Gene Name: CTD-2616J11.11
  ENST ID: ENST00000600067
  CDS Start-End: 100-231
agcttccggttgcggccgaacccgtagtgactggggcggcgcccgcgggggctgatgcgcccgctctccccagccacgctggcggtgactgtggcgtgcatggtgctggcggtgggtgtcggcgtggtgggcatggtgatgggactgcggattcggtgcgacgagggcgagtcgctgcggggccagaccacgagcgccttcctcttcctcggcgatccgagtgaagcctgacaggaccggtgtggtcacggatggtgtgaagcactccatgaaccccttctgtgagatcgcggtggaggaggctgtgcggctcaaggagaagaagctggtgaaggaggtcatcgccgtcagctgtgggcctgcacagtgccaggagacgattcgtaccgccctggccatgggtgcagaccgaggtatccacgtggaggtgcccccagcagaagcagaacgcttgggtcccctgcaggtggctcgggtcctggccaagctggcagagaaggagaaggtggacctggtgctgctgggcaaacaggccatcgatgatgactgta

SEQ ID NO: 122928 - DNA, 3547 bp, Homo sapiens
  Payload ID: 4132
  Gene Symbol:
  Gene Name: CTD-3074O7.11
  ENST ID: ENST00000419755
  CDS Start-End: 79-1971
gctcagacgtgcagcttctggaatacgaggcgtcagctgctggcctcatccgatccttctctgagcgtttcccagaggatggacccgagttggaggagatcctcacacagctggccacagccgatgcccgattctggaagggccccagtgaggccccatctggccaagcttgaggaagatgtgtggccttgcccccaattccatcagaccaaggctgcaagtggccctccattcgtcaatgaggccaattcgaagtggttggatgcgcactacgacccaatggccaatatccacaccttttctgcctgcctagcgctggcagatttacatggggatggggaatacaagctggtggtaggggaccttggccctggtgggcagcagccccgcctgaaggtgctcaaaggaccactggtgatgaccgaaagcccgctacctgctctgccagctgctgctgccaccttcctcatggagcaacatgagccccggaccccagctctggcacttgcttcaggcccttgtgtctatgtgtataagaatctcagaccctacttcaagttcagcctgccccaattgcctccaaatcctctggaacaagacctttggaaccaggccaaagaggaccgaatcgaccccttaaccctgaaggagatgctggagagcatccgggagacggcagaggagcctttgtccatccagtcactcaggtttctgcagctggagctaagtgaaatggaggcatttgtaaaccaacacaagtccaactccatcaagcggcagacagtcatcaccaccatgaccaccttgaagaagaacctggctgacgaggatgctgtgtcttgcctggtgctgggcaccgagaacaaggagctcctggtgcttgaccccgaggccttcaccattttagccaagatgagccttcccagcgtccccgtcttcctagaggtttctggccagtttgatgttgagttccggcttgccgcggcctgccgcaatggaaacatctatattctgagaagagactccaagcaccccaagtactgcatcgagctgagcgcccagcctgtgggacttatccgggtacacaaggtcctagtggtgggcagcacccaagacagcctgcatggcttcacccacaaggggaagaagctgtggacagtgcagatgcccgcagccatcctgaccatgaacctcctggagcagcattcccggggcctgcaggccgtcatggctgggctggccaatggagaggtccgcatttatcgtgacaaggccctgctcaatgtcatccacaccccggatgcagtgaccagcctttgctttggccggtacgggcgggaggacaacaccctcatcatgaccactcgaggtggtggcctgatcatcaagatcctgaagcgtacagcagtgtttgtagagggaggaagtgaggtgggtcccccaccagcccaggccatgaaactcaatgtgccccgaaagacccggctttacgtggatcagacactgcgagagcgggaggctggcaccgccatgcaccgggccttccagacagacctatacctgctgcgcctacgtgctgcccgcgcctacctgcaggccctcgagtccagcctgagccccctgtccacgacagcccgagagccactcaagctgcacgccgtggttcagggccttggccccacctttaagctcacacttcacctgcagaacacctcaacaacccgtcctgtcctggggctgctggtctgcttcctgtacaacgaggcgctctattccctgccccgggccttcttcaaggtacccttgctggtgccagggctcaactaccccctggagacctttgtggagagtctcagtaacaagggcatctcagacatcatcaaggtgctggtgcttcgagaaggccaaagtgcacccctgctgagtgcccacgtcaacatgcctgggagcgaggggctggcggccgcctgagacctgagctgctgtgaaagcccctgcacaatcagccagggagaactgggcgggtttagtggccccaggcccactcctcatgcagcagtgtgctggggcgacagctcgtctcccctctcttaagcacccgcttcctcaccacccccactgttgggcctatagtagcaggttagtgagtacctagggcggctcaactcctcccacagcaccaacccagcatggtcccactgaagtcctactacgccctcccctccccagccttttccagaaaccatactgggctcagatcagagctccgaagcggtcaaagtgagctgagcaggacaggcccagcctttctccactgccacgtccctcatgcacatcactcatctcctgctgcaggccaaggccaaaattgggctagtcctggccagggaaatcagaagctcttcttgggtgagattgagcctcctgttgctccctggagttccggaggctgggctgcagcccactcagcttgcgggcaaaatacgtgctctcctctctccttgtcagctgagcaaacccagggaatagccctcctctccccaggaaacttctctgaaatcttagacttagccagtcttaggcctacgatgccacacaaaggttgttcagggagaagggggtgcaggaggcagagggtgccccgcagggagctggtggctccagccccactagagctcctaaagatcacacagcagctgctcctgacagggatgctcatgcccagaaagcaagcccaggagaggaaggcagagtgtgacagagcagagccagggccaggcgcaccaggagaggcgtttctggggctccagagaagtgccacgggaggcagaagtccagaactgcccatatagatgcccttctacatcctggagcccaaatcagtcatgtgggtgggaagttcccagggcagtggtcacatcgtgagaattagcaggaaaggcggggcctttcttgtcatagctatttctgaggatgaaatgggagacatatgcccagcacctgatgtaagtttatataatgtaatattatgtacctaccactaagaaatacatgaaccgtgccatgaggacagtaagtgttcataaagcaacatgaagcaagaaacagtgcagggtgcccagtgcacacactagagagaaattgtgaacattaaggacaaggagaattggtgtctttctaaaacatacttatttaaaaacacatacccacttactaatgtggaattacacagtttgtaacaagaaaacagtctctcccattctctagtactgctcccctacccagcagtcacttccagttcattcagctatttttaaaatgtgcttatatgactcttgcttgatatatcaatcttagacattacctgttgactccctgttgtcatacatgaggctttagctctcttttgtcagcaaccctcccccatccctagttattaggttaaaaaatactcagattactatttctattactatgtgaaagttaactgcggagccaagagttggactataattaaattaccttccttgtactttctttttaatgg

SEQ ID NO: 122929 - DNA, 10568 bp, Homo sapiens
  Payload ID: 4133
  Gene Symbol:
  Gene Name: CTD-3088G3.8
  ENST ID: ENST00000598234
  CDS Start-End: 154-9849
gctggcattatcatttctcatcttcttcccagagtaaggtcagtggcccatagcgtggggctatcttatgcctctttctggcctcaccctggttccatctgatttgcgatttcagaaattccagattcgcaggtggggcaggtggcctcctgcatgactgcgtgcacagggtcagctgggccccacctccctgtgggcaccagatacacctatcatttttccaccaacaccagcaccagcctgcaggacgtcctggtggaggggagtggtcttggcctccaaggcttggctgtccttgatgtgcttggcctgtgccagatggctttatggctccaagacttccaggtgacatccatcctgggggccaaggtggagcttctgaaggagtcggagagcctgagtgccaccctgggccgtaacccactccgcttcatcctgcactctgggcgtgtggcccacctgtgtccccatcccactgagccacgctgggtgctgaacgtgaagcgtgctgtgctgagcctcctgcagggccacccaggggcccacagccccaagacctttgatgaggtggacatcctgggccgatgtcctaccacataccagcaccatggggactggctacacaagacaaaggacctggcacggtgctccctgcgcaggggacgctcatcactccattctcaggccctgcctggagtggctcccggcctgacctcccgcctgacctgcgtccagagcttccgggccggagtgctgagggaggcctcctgcacagagctggactccgcggggccacttcctgcaaaggcaagcgctgtgcagatgaggaccctctcctcactcagtctgctgcacgagatgccccaagatccagcgggcacagatccagatgatagagacgatgaagacatgaccccaagcagcctgctgtatgagtgggaggagacaccatcccaggccatggtggccaccgcagccacattagtaaggaggctgtgcctggctcagaccactagcttggaggccatggacttgttcctgacactggtgtcccagctccagggcctttctgggggtgagctgatggaactctggcaatattcttccttcaaatgccgagacaatgggcagccactgttggatgccctgccttcctgtgggacggagcactgtgtgggcctcatgaaggaactcatcgcatcagccgcggtggaggcagacgaggtggaggcgtggctctcatcactggccttcctcccacagcccacagatgctatggtccacatgctgctgccactgctccagaccccgagggccagccctggcgccttcctgggcatctcagccctggtgcacaacctctgtgcttctctggacgggccctgcggccagctgcctggagtcggctccctagtgaggatcctgggagacgccttgggtgagaactgtaccatccaggagccctcggatgatgacaagctccagcttgtgctgaaggcagtcggcaacgcgggcttggcagccatggctctcacccctacgttgagtgcctgtgcatctctgagaagcagcacacccgagatccggctgggggccatccaggccttccgaagggtcccctgctctgcagacagatcggtgctctcccgtctataccaatccctggaggaggatgctgagatccgtatcaatgcctacctggccctgatgagatgccccagtgaggaggtgtttgcccaggtgcggcgcacccaggcaggcgagctctccacccaggtgggttcttttgtgtggagtcacatcctgcagctgctggagacgcacgaccccctgaaacgggccctccgggacaccctccccgaggacatcctcagccaggagttccacccagaaatgtggaaacactcgtcctattctgatgtcaccttccgatcagtgtctggcagcctgggagccaacctggaggggacccttctcttctctcctgcctcctttcttccccgttctgccacagtcaacctgaccatccacaccatgggccgtgccttcaaccttctggagcttgggctccggctggaaaatgctgaggaaattgctcacaggctgtttggcaggaagtcattctggggtcaggaagacgggagagagcctgagccagaggaacccccagggccagaaccagggcctgcaccacagccagccagccccgagtgtccaggagacagagacagaaggatgagatacctacagcagaaggtgacccggaggcgtggggcccggcaggctctgcgatgcgagctgagcgtgaagttgctggggcaggagctgagctttgtgaactgcggggccacggggagtcacgtgaaccactggccccttaacttggccgagctcgccatcaagctcatgaaggggcaggaggtgcagatgaaccggaggctgagcctggccgcacaggaactggtctttcccaccgtgtctggccttcctgcccggctgaccctaaatgcctcggctgccatcagcatccgggtccgaggaaccactgacttccagcagcgctcggatttctctgtgaatggttatgtcaagcccagtgccctgctccagatctcagctcagatgggcacagcgggcatcctggggcaggccgggctgaggtgggtgaccagcgtccgcagcgccgccagcctggatggcgggatccaggtgcagaagggccgggtccttaaggtgcatctgaacacgcctgaggaggccgtggagctgctcagcttcagctctcagctgtacctcatcaccagggatggcgtgaggagcctcagacatgtccctggcccttctgaggtccagtcctgtactggtgaggaagtgtcctacacctggggctggcgactgtgcactggagtgacctggccggtgcctggccagccctacctgctctcattgcctgtgttcgcggccgtgacgctgcagaaacgggacccggggctccgacagtacctgctggaagctgcctataccctgcagccccagaagggcagctggttcccccaagaagccacagcccacgtcttcatgggcacgcccgggtcagaagtgctgagggacgtcggggtggacatgagctacagcttgccccagaacaagttccggctcaagcttctccatcccaagaagaaaatcgagctggacggaaagatggaggctcttgggagtgcccacacgggtcacttggagctggtgctggatgacagggacgtctactacatcaagggctggagtgacctgcagccagccatgggtggcgaggctgagcggttccaggcgcagctggaggtgaaactggtgacggggggcagccccgtcgtcttcaccgggaacctcacacggcaggtgggcagcaagctggccttctccgcatcgctgagccatctgctgagtgaccaggccaacgtgacagcactgctggagaggaaggaggagaatggacggagggtggccgccctgggtgccgagctgtttgtgccagggctggtggggcttcgtgcccttggcctgctgcagcaacggggccagctctggaccaactccctgaggatccagtacagcctcctgggtcaggcaaagcaggcggcacacgagtgcagcaccagccagaagctgcgggcagacagtggctcagacggtgcctacaggctggagctgcgccacgagctccactgcacacagatcctagccttcagccacaaggtccagctctggcatgaggaggactcgggccacctgcactcacagctggaggtgagctacgggaagcactgggacaagaacagcaacaagaggcatctccgtgtcagccagaccttcaagaatgactcggggcccgccctgagcaatcacttcatggagtttgtgctgcaggtgcctgagaggcaggtggattgccgcgtgcagctttaccacttgagcctccgcctgccctatgtggagagcagcagtcacctgaaggtgcagtacaatgggcggccgctgtttgtggcaggcgggcagtggaaggacacatctcgggccaccctgtggaagtgggaaggagccttgaacctggatagtccatggctgatggtctctgcagctcacaggctatactggccacaccgagctgtgttccaggctgtcctggagctaacgctgggcaaggcctggaccctaaaggacctggtggtcagcgtgggctgcaggagtcagggccccaacagggaaggcaagatccaggtttacaccgcagctaccacctacctccgggtttccacagtgacagtcttggcacagagcctcttccacagctggagcgaactcgagtcagcctggaacgcagcagtgcagggcgagatccatgctgagaacagccgggaccgtaagatcctgaactgctggttgaaaggcccccagcaggagctgaacctaacagcggcctacaggcacctggagtggccccggaagacccaggtgtcgctcacggctgtgcggattggtgcccagggccagcctcggggcctgcagttggaaggagagctggaggagctgaggcaagacaggacattgtaccggaaacggggggccttgctccttaggcacccgttgcacctgcccatcccgcagagcctcctcctgcaggagaccttcacagctgataggcgacaccagcgctattccctggagactagggttgtcctgaatggccgagaggaaaccctgcagaccatggtcctgggctgccaggccggacacccctacgtctgtgcaggtctgatgcatccatacgatggcaaagtcatccccaggaacacagaggggtgcctggttacttggaatcagcacacggctaagaacagagaggtcgaggccactttgaaagtccaccggaaagttgtcctgcacttgaagggtttgcatcatgacagatctcagcatggggaaatccggcacagcctggccctggacttggcccattcctaccagctgagcttcccccaggccctgagcttggatgggggcatcatctttagacagagtccccaaggaacattcaactttggcatggatgcacgagctgccgtcaatcacaacgtcacatcccaggcctcggtccagctgaacggatctgactccgactttgcatttttcttccaactcaggcatcctcacggaccaacatttcctccaaacttccaggtgcaggcagctgccgggcgctacagagtgcgcagcctcaacgggtctctatctgtgcaaatgtctggccgggagctggttctgctggaggtcgacgccagccaggacactcggaggagcagccggggctggggtgtgagtgtccttctccaccaggctgtcctcagtgcccccagggctgttcggctgcagctgtctgcaaagatcaccccagcaaggatttggctgttttccaaggcactgctggaccagaacacagcacagttgctcctcaaggcatctgaggaatggaggggaggccggatcctgactttccagagccaaacccggcacacggtggctggctgggcagcgatgccccgcctcctgacactcacaggaaggctgaagcagaaggagacacttcaagagggcaccctcagtgtcactgctgactcagctgtgctgggcttcctcctgcgggaccagcatgagaaggcagggaacggcaccagcgtgcgcagcgtgacctgtgtccttgcccagaacagcagccaggccttgcctggagagctccagctgaagggccggctgcaggcccagacgaggaacctgagggcccaggccagcatccgggcccatgcagccagcctggctctgggtggcgcctgctcctggggcccccggcacggacagcttgcgggtggcccgacacacaatatcagcacgctgagtgatgcaggactcccctccgaggcagggatgctcctgtctctcacccacgtggcttccaactgctcagcacgcctggcgctgtggaacgcgggggctcagctagacggtgccattggcctggaggacgtgacccccgagtcctcgggcctccagctccatgccagcctccgtcacacccacaccatgcccagcctcaagcactggggcctccccttctccttagatggccacgggcacttccaggtcaactgcagtggagacgcctcgcccacccagctgttaggatggtgccgaggggacatcgctgggcagcctctcgaggtctctgtggacattcacaatggcagctccggcttcgagcattctggacgcatcctgatggggcccacattcctcaactactctgtgagctgctattaccatgatgggcacctggagctctccggccggagctggcacaacagtgaggctttgttgtgggcagggttcccaggcgaggcctgccttagtgctgagctgcagatacacgagacccagacccaggccagggtggccctccatggtggggacagtggagtcagcatggacctggcagccctggtggctcggccacgacgtggcccactgcagctggtggccagtgccagccacacagtgcctgctctccagaggctgggcctgcccttcaccaaccagctcgtgttccaaggactctgggaggcagaagagatgagctcctcactgcagctgacctgcgattctcaggccaccttggtccttgacgtccgtggccagaaccaggcagtcagcaaagagctgctgttctcaggccggcatcgcctccccttcctcctgggtctctgccccagctcagcctcagcctcagctaagctacactactccaagggtgaggttcagagcatgttcgccttgggcgtggaggagcgtcattttcacatcagcacccggcaggtagctgctaaggccggtctcaacaatttcatcaaactggaacagacctttctgcagctcagcgctcttcccagggagctgttcctgcagaccgcatacgagcgagctcatgggacccgtgtcctgcgccaggtggtgctgtgggatggccaggaggtggccctcaccgggagcctttctgggcctttccccaagcccaccaggaacctcagcctgcaggtggagctcacccacccgctgcccctccccctgccgcgacactgcagcctccgcctgtcctcagagcatttgggaggcagccaccgggatggcctggttgtcggctgggatggcagggaccaggtgctggtctcctcctccctgtggctggggaagagtgagctggccgcccgcctggccctggctcacccattcaacctcccttggcggcaagccgaggccagtggccttgctgagagcaggggtggcaggcagagccggcaggtgcagctcacctggaacagaggacaacctgcgacgctgcagctcacctgggctgacgggtccttagcacacagcaccgcctgggacggctgcctggccgcctccccggggcagctccaggaaacctggggcctgaacagcctccaggcctgcggggccttcacgcagaccccagctgtgttcgttgaacagctcaacgtgtcctggggccagcaccgcatgcggcagaacttgacctacgagaggcattggccatctcagccagacaagatcatcatggaggccacgctggagcacgtcctcggggcctcttgtacccgtcagagcttctggggagaagtacagactgactatgcacgctggctgcggcactccctccacctggggctctgtgacctgcccagggccctcttggtcgtcggggagcacaccctgggccagggtggactcctgctgcgttcccgctgccacctgggccttgcaccagacccagaccacggcctgcatctcagcctgaccctccaaaaccacagcaggcctcgttcagctgacttctccggggcactggagcttcgtggctccaaggctcagcgggttggcctactgggccgtgtctccacctcgacttctcaaagcctggtccggttggagggaagcgtggacaacagagaggagaaagtgaggctgtctgtgttccgggccccaagctgtctgcaggcctctgtggcccatgaggaggggggcagagaggagagtgtggtgctgcgggcatgtgcccatgggcggacagccgaggcggaggtcctgttccgggatggcaggcagccctcccagccgctgggacgcctgaccctgcaggctgccaaccagagtctcctgctggccgcgcgcggctgccaggggggcctgctgggccatgtggagtccaggattgcagcagttggctcccaggtgcaagcccggctggaagagaaggttcaaggcttgggtgcctctgtgagaaggttccagcaattggtgcagccggcaggcaccctggacggcgtggcaggcctccttctgcagctgtcccaggcggggcgggaggccatgcaggcgagtggttgggcagtagccactttgtgggcccggagccaggcactgacccagcacctgcctctttacctggagtggctgcaggtggggctggagcagctgcgggaggagctggaatggcccctggccacactgaaggatgcctacctggaggtgacactgcggcccctggaggaggtgtggcgggagcgagcagaggaggccatgcggcggctgcaggcctgggtgcccgggatgccaggcaaagggggtccaaggcccatcagggcggccctgggggccatgaaaggagccctggagctggccgcccaacagatgctgtcttgggctgaggccacgttctcacgggcactgaagaggctctgcaaaccactgctggacctgtacagcctgtcggccaggaaccgctcagtggtggtgatgctgccactgttgcctgcgggggacgagcccctggacgtggcccgggtgaccagctacctcatggaggagaagctgctgcggccgctccgagagctgtctggggccaacgtgctggctgagtactactggctcagacgccgcctgctggcgggcccctgggaataccatgccctggtggctggggcccagcacgtggtgaccttcgacggccgggtatgggacctcagcacccagtgcggcagcatcctcctggcccaggactttgctcacaacacattctcgctgacgctgagtcggacaggctcggggctcacagccctgttcgtggaacttaaccacaagaccctcatcctctaccccagtctgcaggcctacaggctgtacaactcctccctgccgggggacagttgtccggacctcaagctgcatcctgccacgacaaggaaggacgtctccaggattgagctggccagcgaggacggggtgtctgtctcctgtgacgtgcccaccggcctctgcagcctgactctgggcctctggcagcacggcatatccgctggccttctgggcaccaatgacaatgaagcaggcaatgagctgatgttgccggatggctctatggcccgcagcctggaggagctcagcctggcctggcaggtgggtggtgactgcagggccactgagaagcctcagcaggagcaggcctgcccgggacagctccccgcctgctgggccttcttcgagggcccccactccagcttgagggactgcttccgggtggtagaccctacaccattcctcagcctgtgtgtgcaggtcccctgtggcacccaggagctccagcctgcctgcaacctggcggccgcctacatccacctgtgtgcccgtggattcgtacccctggcccctcctccacagtgtgtttgagattttgtctatgccagcactaggctgccagacttcaaactccttcaccttctactgcaattccagctccctgacaatgacaagattcatggctgggacagaataaccagcatggaatgccgggaaactcagaaccgcacgtgctgcaaacgcacggaagcagggctcattgccactgggctcaaaatacttccgggggacatgaaactctcccactggtctgagtaattctcccccttcctccacacttccactgcaaaccaggagacagtgcggccagcaagtaccagctctgcagagaaaactccacctggcccctgttcatgcccaagagatttattcacttattcaacagccatttgggaagccactgcttcagaacgctgactgcgtggtgggggacacgaagccaggtcctcagctgcttggtactggctttccctgcctgatccaggggtcttttcaggcaggagtttccttgaagggaagtgatggccccaagcctcttaatcagaagcccaggtaggcagcttctctctttggggtagacacactgggactgaatgcttcaggggaccctggggagggcctctgttttggtaggggcacctgtgaactcaggcctccaggctacatcattggaagtgttttactttcttttgggaatgtaactttttcctttgagttttcaactgaaaaataaagctggcagaatccaa

SEQ ID NO: 122930 - DNA, 3552 bp, Homo sapiens
  Payload ID: 4133
  Gene Symbol:
  Gene Name: CTD-3088G3.8
  ENST ID: ENST00000595170
  CDS Start-End: 1-240
gaggaggtgtttgcccaggtgcggcgcacccaggcaggcgagctctccacccaggtgggttcttttgtgtggagtcacatcctgcagctgctggagacgcacgaccccctgaaacgggccctccgggacaccctccccgaggacatcctcagccaggagttccacccagaaatgtggaaacactcgtcctattctgatgtcaccttccgatcagcttgggctccggctggaaaatgctgaggaaattgctcacaggctgtttggcaggaagtcattctggggtcaggaagacgggagagagcctgagccagaggaacccccagggccagaaccagggcctgcaccacagccagccagccccgagtgtccaggagacagagacagaaggatgagatacctacagcagaaggtgacccggaggcgtggggcccggcaggctctgcgatgcgagctgagcgtgaagttgctggggcaggagctgagctttgtgaactgcggggccacggggagtcacgtgaaccactggccccttaacttggccgagctcgccatcaagctcatgaaggggcaggaggtgcagatgaaccggaggctgagcctggccgcacaggaactggtctttcccaccgtgtctggccttcctgcccggctgaccctaaatgcctcggctgccatcagcatccgggtccgaggaaccactgacttccagcagcgctcggatttctctgtgaatggttatgtcaagcccagtgccctgctccagatctcagctcagatgggcacagcgggcatcctggggcaggccgggctgaggtgggtgaccagcgtccgcagcgccgccagcctggatggcgggatccaggtgcagaagggccgggtccttaaggtgcatctgaacacgcctgaggaggccgtggagctgctcagcttcagctctcagctgtacctcatcaccagggatggcgtgaggagcctcagacatgtccctggcccttctgaggtccagtcctgtactggtgaggaagtgtcctacacctggggctggcgactgtgcactggagtgacctggccggtgcctggccagccctacctgctctcattgcctgtgttcgcggccgtgacgctgcagaaacgggacccggggctccgacagtacctgctggaagctgcctataccctgcagccccagaagggcagctggttcccccaagaagccacagcccacgtcttcatgggcacgcccgggtcagaagtgctgagggacgtcggggtggacatgagctacagcttgccccagaacaagttccggctcaagcttctccatcccaagaagaaaatcgagctggacggaaagatggaggctcttgggagtgcccacacgggtcacttggagctggtgctggatgacagggacgtctactacatcaagcttggcagctgggcgccgtggctcacgcctgtaatcccaacacttggggaggccaaggaggatggatcacttgaggccaggagtttgagaccagcctggccaacatgggctggagtgacctgcagccagccatgggtggcgaggctgagcggttccaggcgcagctggaggtgaaactggtgacggggggcagccccgtcgtcttcaccgggaacctcacacggcaggtgggcagcaagctggccttctccgcatcgctgagccatctgctgagtgaccaggccaacgtgacagcactgctggagaggaaggaggagaatggacggagggtggccgccctgggtgccgagctgtttgtgccagggctggtggggcttcgtgcccttggcctgctgcagcaacggggccagctctggaccaactccctgaggatccagtacagcctcctgggtcaggcaaagcaggcggcacacgagtgcagcaccagccagaagctgcgggcagacagtggctcagacggtgcctacaggctggagctgcgccacgagctccactgcacacagatcctagccttcagccacaaggtccagctctggcatgaggaggactcgggccacctgcactcacagctggaggtgagctacgggaagcactgggacaagaacagcaacaagaggcatctccgtgtcagccagaccttcaagaatgactcggggcccgccctgagcaatcacttcatggagtttgtgctgcaggtgcctgagaggcaggtggattgccgcgtgcagctttaccacttgagcctccgcctgccctatgtggagagcagcagtcacctgaaggtgcagtacaatgggcggccgctgtttgtggcaggcgggcagtggaaggacacatctcgggccaccctgtggaagtgggaaggagccttgaacctggatagtccatggctgatggtctctgcagctcacaggctatactggccacaccgagctgtgttccaggctgtcctggagctaacgctgggcaaggcctggaccctaaaggacctggtggtcagcgtgggctgcaggagtcagggccccaacagggaaggcaagatccaggtttacaccgcagctaccacctacctccgggtttccacagtgacagtcttggcacagagcctcttccacagctggagcgaactcgagtcagcctggaacgcagcagtgcagggcgagatccatgctgagaacagccgggaccgtaagatcctgaactgctggttgaaaggcccccagcaggagctgaacctaacagcggcctacaggcacctggagtggccccggaagacccaggtgtcgctcacggctgtgcggattggtgcccagggccagcctcggggcctgcagttggaaggagagctggaggagctgaggcaagacaggacattgtaccggaaacggggggccttgctccttaggcacccgttgcacctgcccatcccgcagagcctcctcctgcaggagaccttcacagctgataggcgacaccagcgctattccctggagactagggttgtcctgaatggccgagaggaaaccctgcagaccatggtcctgggctgccaggccggacacccctacgtctgtgcaggtctgatgcatccatacgatggcaaagtcatccccaggaacacagaggggtgcctggttacttggaatcagcacacgagtctcactctgttgtctaggctggagtctggagtgcaatgacttgatctcagctcaccgcaacctccacgtcccaggctgggcgagatggctcacgcctgtaatactagcactttgggaggccgaggcaggcggatcatttgaggtcaggagttcgagaccagcctgaccaacatggtgaaacccccatctctactaaatacaaaaaaaattagccaggcatggtggcgggctcctgtaatcccagttactcaggaggctgaggcaggagaatcgcttgaacctgggaggtggaggttgcagtgagccgagatcacgccactgcactccagcctgggtgacagagcgaggctgtctctaaaataaaataaaatataaaatagaataaaataagctgtttaatgacat

SEQ ID NO: 122931 - DNA, 550 bp, Homo sapiens
  Payload ID: 4133
  Gene Symbol:
  Gene Name: CTD-3088G3.8
  ENST ID: ENST00000595168
  CDS Start-End: 1-141
gcggccgcctacatccacctgtgtgcccgtggattcgtacccctggcccctcctccacagtgtgacacgattccaacccgttggatacaccttcccccagtcattcaatcgaacacgaatctaggtgttgctgtgcagtgattctggagaggtaaagtcccaagtcacctgaccttaaggtagggggcctgagccaatcacatgagccctctctaaacctgggcccaggaaatcagaggctggagagcaggaggcagattcaaggctcgttcctgaagatggaggggacctctaggagcctccagtttacagccggcaaggaaatgggacctcagccctacaattgcaaggaactgaattctgccaacagcctgatgagcctggatgcccattcgggattcttcccagagcctcctgaagagagctcagctggctgacaccttgattttggcctgaagaggtcctgagcagagaacctaacaacaccctaccagaccccgacccacagaaactgtgagatattaatacatttgtttttttaagctgctaa

SEQ ID NO: 122932 - DNA, 2085 bp, Homo sapiens
  Payload ID: 4133
  Gene Symbol:
  Gene Name: CTD-3088G3.8
  ENST ID: ENST00000599216
  CDS Start-End: 1-1366
ggctggaagagaaggttcaaggcttgggtgcctctgtgagaaggttccagcaattggtgcagccggcaggcaccctggacggcgtggcaggcctccttctgcagctgtcccaggcggggcgggaggccatgcagggcccctggccacactgaaggatgcctacctggaggtgacactgcggcccctggaggaggtgtggcgggagcgagcagaggaggccatgcggcggctgcaggcctgggtgcccgggatgccaggcaaagggggtccaaggcccatcagggcggccctgggggccatgaaaggagccctggagctggccgcccaacagatgctgtcttgggctgaggccacgttctcacgggcactgaagaggctctgcaaaccactgctggacctgtacagcctgtcggccaggaaccgctcagtggtggtgatgctgccactgttgcctgcgggggacgagcccctggacgtggcccgggtgaccagctacctcatggaggagaagctgctgcggccgctccgagagctgtctggggccaacgtgctggctgagtactactggctcagacgccgcctgctggcgggcccctgggaataccatgccctggtggctggggcccagcacgtggtgaccttcgacggccgggtatgggacctcagcacccagtgcggcagcatcctcctggcccaggactttgctcacaacacattctcgctgacgctgagtcggacaggctcggggctcacagccctgttcgtggaacttaaccacaagaccctcatcctctaccccagtctgcaggcctacaggctgtacaactcctccctgccgggggacagttgtccggacctcaagctgcatcctgccacgacaaggaaggacgtctccaggattgagctggccagcgaggacggggtgtctgtctcctgtgacgtgcccaccggcctctgcagcctgactctgggcctctggcagcacggcatatccgctggccttctgggcaccaatgacaatgaagcaggcaatgagctgatgttgccggatggctctatggcccgcagcctggaggagctcagcctggcctggcaggtgggtggtgactgcagggccactgagaagcctcagcaggagcaggcctgcccgggacagctccccgcctgctgggccttcttcgagggcccccactccagcttgagggactgcttccgggtggtagaccctacaccattcctcagcctgtgtgtgcaggtcccctgtggcacccaggagctccagcctgcctgcaacctggcggccgcctacatccacctgtgtgcccgtggattcgtacccctggcccctcctccacagtgtgtttgagattttgtctatgccagcactaggctgccagacttcaaactccttcaccttctactgcaattccagctccctgacaatgacaagattcatggctgggacagaataaccagcatggaatgccgggaaactcagaaccgcacgtgctgcaaacgcacggaagcagggctcattgccactgggctcaaaatacttccgggggacatgaaactctcccactggtctgagtaattctcccccttcctccacacttccactgcaaaccaggagacagtgcggccagcaagtaccagctctgcagagaaaactccacctggcccctgttcatgcccaagagatttattcacttattcaacagccatttgggaagccactgcttcagaacgctgactgcgtggtgggggacacgaagccaggtcctcagctgcttggtactggctttccctgcctgatccaggggtcttttcaggcaggagtttccttgaagggaagtgatggccccaagcctcttaatcagaagcccaggtaggcagcttctctctttggggtagacacactgggactgaatgcttcaggggaccctggggagggcctctgttttggtaggggcacctgtgaactcaggcctccaggctacatcattggaagtgttttactttcttttgggaatgtaactttttcctttgagttttcaactgaaaaataaagctggcagaatccaa

SEQ ID NO: 122933 - DNA, 2593 bp, Homo sapiens
  Payload ID: 4134
  Gene Symbol:
  Gene Name: CTD-3105H18.14
  ENST ID: ENST00000435033
  CDS Start-End: 205-345
actgtcaatcaggcgcgcttcccagaggagtgtgtggttgaaaaagcccgcggcgtcttctccacccacctgcgctgggcgctcggtgctcggctctgtagctaagagacgacctggaagttccgtggcagcctgtgtcccgcgggaacccgcattggcagcgggagccgtccggaggacctgggacaccgcggaagtcgggaaatggactcagttgcctttgaggatgtggctgtgaacttcacccaggaagagtgggctttgctgggtccttgccagaagaatctctacgaagatgtgatgcaggaaaccatcaggaacctggactgtgtaggaatgaaatgagaagaccagatcagggaagatcaatacgaaagtcacaggataaatgtaagatgcgatatggtagagcgcttcggtgaaagtaaagacagtagtcattgtggagaaacatctagccagattggagatactgttgtgaacaagcacatgcctcctggagtaggtccacgtgaaaacaatgagtggagaagtcgtcacgggtctttcatcccttcattgccacatcagagttgatgctgggcacaaaccacatgagtatcaggaatatggagagaagcgtaatacacgtaaacaattttggaaaaccttcagttattgccactcgtttcaaacccacaaaatttctcacacaggacacaaaccatatgattgtaaggaatgtaggaagtccttcaattctttgggaaaccttcaaagacacatggcagtgcagcatggagatggaccttataaatgtaagttgtgtgggaaagcatttttctggcccagtttatttcgtatgcatgaaagaactcactctggagagaaactatatgaatgtaagcagtgttctaaagcctttcatttttacagttcttatctaagacatgaaagaacacgtactggggagaaactgtatgaatgtaagcagtgttctaaagccttccctgattacagttcttgtctaagacatgaaaaaactcacactggagagaaactctgtacatgtaaacaatgtgggaaagccttcagtgcttccacttcccttcaaagacgtgaaaccactcacagtgcagagaaaccccatgaatgtaagcaatgtgggaaagcatttgatcatctgggaagcttccaaagacacatgataaggcacactagagatggacctcataaatgtaagatatgtgggaaaggctttgattgttccagtacactgcaaagtcatgaaagaactcacactggagagaagaaactctatgaatgcaagcagtgtgggaaagcgttatctcatagctcaagctttcgaagacacatgacaatgcacactggagatggacctcacaaaatgcaagatatgtgggaaagcctttgtttatttcattggatttcaaagacatgaaaggactcacactagggagaaaatctataaatgtaaatgtgggaaagcctttagtgatctttattcccttcaaaatcatgagacaactcatatgggagagaagccatatgaatgtaaataatgtgggaaagcatttggttgtttccagtacctttctcttcataaaaaaatcatacagcagaaaaaccttatgagtgtcaaacatgtagaaaagccttcagtcattttggtcacttaaagcaacatgaaaggattcacactggagagaagccgtatgaatgtaaggaatgcaggaaagcattctcttggctcacttgccttctacaacatgaaagaattcacactcgagagaaaccttatgaaggtaaacaatgtggtaaagccttcactcattcccgtttccttcaaggacatgaaagaactcataccgcaaagaagctatgtgaatgtaaggaatgtggaaaagcattgagttctctcagctccttgcacagacacaaaaggactcattggaaagatactctataaatgtgtggaatgtgggaaagcattcattaattttattttacctgagaaaattaaacaaatcacattggaaataaactctatggcttgggcacggtggctcatgcctgtaatccctaacactttgggaggccgaggtgggcggatcacgaggtcaggagatcaagaccatcctggccaacatggtgaaaccctgtctctactaaaatacaaaaacttagccaggcatggtggtgcgcacctgtagtcccagctactctggaggctgaggcaggggaatggctcgaacacaggagacggagattgcagtgagctgagatggcgccactgcactccagcctggcaacagagtgagactccatctcaaaaaaaataaaaaaaaagaaaaagaaataaactctatgaatgtaaaccatgtggtgaaggcttaagtgatttcagtttatttcaaatacagttttcccctgacatatgcaggggattaattccagcagtccctgatcatacctaaatccacacatgccaagtttcttttataaaattacatatttgcatgttatctacccacatctccctgtacactctaagtcatctctggattaaatacctcatgcattgtaaaaacta

SEQ ID NO: 122934 - DNA, 617 bp, Homo sapiens
  Payload ID: 4135
  Gene Symbol:
  Gene Name: CTD-3105H18.16
  ENST ID: ENST00000595562
  CDS Start-End: 169-617
gtgtgtggttgaaaaagcccgcggcgtctgctccacccacctgcgctcggctctgggttctgtagctgagagacgacctggaagttctgaggcagcctttgtctggctggaacacgcattggcagcgggagctgtcggtaggacctgggacaccgcggaagtcgggaaatggcctcagtggctttagaggatgtggctgtgaacttcacccgagaagagtgggctttgctgggtccttgtcagaagaatctctacaaagatgtgatgcaggaaaccatcaggaacctggattgtgtaggaatgaaatggaaagaccagaacattgaagatcaatatagatatcccaggaaaaatctaagatgtcgtatgttagagagatttgttgaaagtaaagatggaactcaatgtggagaaacatctagccagattcaagatagtattgtgaccaagaacactcttcctggagtaggtccatatgaaagccgtatgagtggagaagtcatcatgggtcattcatcccttaattgttacatcagagttggtgctgggcacaaaccatatgagtatcatgaatgtggagagaagccagatacgcataaacaacgtgggaaagcctt

SEQ ID NO: 122935 - DNA, 588 bp, Homo sapiens
  Payload ID: 4136
  Gene Symbol:
  Gene Name: CTD-3105H18.18
  ENST ID: ENST00000598753
  CDS Start-End: 160-402
gcaaacggcgagggcgtggctaccagccgctgcgctccgctctggggtctcctcaccccagaaggccctcaggtggaggaagggcctcaggtggaggtaggacctgtgctggccgcgggagaggtaaacagaacaccaggacatcccagagtctgggaaatggactcagtggtctttgaggatgtggctgtgaacttcacccaggaggagtgggctttgctgggtccctctcagaagaaactctacagagatgtgatgcaagaaacctttgttaacttggcctctataggggaaaactgggaggagaagaacattgaagatcacaaaaatcaggggagaaagctaagagatggggttttgccatgttgcccagactggtctcaaactcctgagctcaagtgatccacctgcttcagcctcccaaaatactgggattataggcgtgagccaccatgcccagccaaaaactttaaacttagaagaacattgcaaggcctcagtggctttagaggatgtggctgtgaacttcacccgagaagagtgggctttgctgggtccttgtcagaagaatctctacaaagatgtgat

SEQ ID NO: 122936 - DNA, 675 bp, Homo sapiens
  Payload ID: 4137
  Gene Symbol:
  Gene Name: CTD-3148I10.9
  ENST ID: ENST00000599536
  CDS Start-End: 1-217
acaggtgttccaggctggtgatgtgccttcggaacgcccattctatcccccaaccttggtctccaacctgcccccagcctccccatgtgcccaggtggaggctccaggtgggcactgtctggatcaacgcccacggcctcagagacccttcggtgcccacaggcggctgcaaggagagtgggtgttcctggcacgggggcccagacgggctgtatgagtatctgcggccctcagggacccctgcccggctgtcctgcctctccaagaacctgaactatgacacctttggcctcgctgttccctcaaccctgccggctgggcctgaaatagggcccagacccggcgacaggaggcatgaggggcccccggccgaaatgacagtgctggcgccagcctggagcccaacacggagccttaaacaacgcagtgagacagacatctatcatcccattttacaggggaggatactgaggcacacagaggggagtcaccagccagaggatgcatagcctggacacagaggaagttggctagaggccggtcccttccttgggcccctctcattccctccccagaatggaggcaacgccagaatccagcaccggccccatttacccaactctgtacaaagcccttgtccccatgaaattgtatataaatcatccttttctacca

SEQ ID NO: 122937 - DNA, 777 bp, Homo sapiens
  Payload ID: 4138
  Gene Symbol:
  Gene Name: CTD-3214H19.16
  ENST ID: ENST00000597959
  CDS Start-End: 1-412
cgtacaagcatgcgaagagagacagaagagaggctgggattccgttcagcagagcatcaccatggtcaggagcaagattgatagattagagacgacattagcaggcataaaaaacattgacacaaaggtacagaaaatcttggaggtgctgcagaaaatgccacggtggcggcggcatggaggcgcgcttcacgcgcgggaagtcggcgctgctggagcgcgcgctggcgcggccgcgcaccgaggtgagcctgagcgccttcgcactgctgttctccgagctggtacagcactgccagagccgcgtcttctccgtggccgagctgcagtcgcgcctggccgcgctgggccgccaggtgggcgcgcgcgtgctggatgcgctggtggcgcgcgaaaagggtgcccggcgtgagaccaaggtgctaggcgcgttgctcttcgtcaagggcgccgtgtggaaggcgctcttcggcaaggaggcggacaagctggagcaggccaacgatgacgcgcgcaccttctacatcatcgagcgcgagccgctcatcaacacctacatctccgtgcccaaggagaacagcacgctcaactgcgccagcttcacggcgggcatcgtggaggcggtgctcacacacagcggcttccctgccaaggtcacggcgcactggcacaagggcaccacgctcatgatcaagttcgaggaggcagtcatcgctcgagaccgggccctggagggccgctgaccctgccggagataaaggatacagagagcccctc

SEQ ID NO: 122938 - DNA, 762 bp, Homo sapiens
  Payload ID: 4139
  Gene Symbol:
  Gene Name: CTD-3214H19.4
  ENST ID: ENST00000595866
  CDS Start-End: 1-145
gggggtgaagctggagatatttcggatgataatctacctcactttccctgtggctatgttctgggtttccaatcaggccgagtggtttgaggacgatgtcatacagcgcaagagggagctgtggccacctgagaagaaattctgagcggagttattcggagtgtcaagaaggatggggagtggaaggtgcttatcatggatcacccaagcatgcgcatcttgtcttcctgctgcaaaatgtcagatatcctggctgagggcatcaccattgttgaagacatcaacaaacggcgggaacccattcccagtctggaggccatttatttgctgagccccacggagaagtcggttcaggccctgatcaaagacttccaggggaccccgactttcacctacaaagcggcccatatcttcttcaccgacacctgccccgagcccctgttcagtgagctaggccgctctcgtctggcaaaggtggtgaagacgttgaaggagattcaccttgccttcctcccctacgaggcccaggtgttctccctcgatgctccccacagcacctacaacctctactgccccttccgggcagaggagcgcacgcggcagctcgaggtgctggcccagcagattgccacgctgtgcgccaccctgcaggagtacccggccatccgctaccgcaagggcccagaggacacagcccagttggcccacgccgtcctggccaagctgaacgccttcaaggcagacactcccagtctgggcgag

SEQ ID NO: 122939 - DNA, 570 bp, Homo sapiens
  Payload ID: 4139
  Gene Symbol:
  Gene Name: CTD-3214H19.4
  ENST ID: ENST00000599243
  CDS Start-End: 23-178
tttgttgaccgggagaaacgagatgggggtgaagctggagatatttcggatgataatctacctcactttccctgtggctatgttctgggtttccaatcaggccgagtggtttgaggacgatgtcatacagcgcaagagggagctgtggccacctgagaagtttttgggggccgagtgagacccaggatgcctcaggccctcagggggcttgtgtcgggggctgggggctgctgttccgacggaagccgagagcggtcgggtcctgagggggtggcatttgagtgtgaggtggcaggtcttggggccctcgctgggatcttgatcagaacccaagcttcgtgtatgtgtgaagtcaacagataaattctgagcggagttattcggagtgtcaagaaggatggggagtggaaggtgcttatcatggatcacccaagcatgcgcatcttgtcttcctgctgcaaaatgtcagatatcctggctgagggcatcaccattgttgaagacatcaacaaacggcgggaacccattcccagtctggaggccatttatttgctgagccccacggagaag

SEQ ID NO: 122940 - DNA, 537 bp, Homo sapiens
  Payload ID: 4139
  Gene Symbol:
  Gene Name: CTD-3214H19.4
  ENST ID: ENST00000598664
  CDS Start-End: 39-224
tttgggcggaactggctttgttgaccgggagaaacgagatgggggtgaagctggagatatttcggagggagctgtggccacctgagaaggggcccagaggacacagcccagttggcccacgccgtcctggccaagctgaacgccttcaaggcagacactcccagtctgggcgagggcccagagaaaacccgctcccagctgctgataatggaccgggcagctgaccccgtgtccccactactgcatgagctcacgttccaggccatggcgtatgatctgctggacatagagcaggacacatacaggtatgagaccaccgggctgagcgaggcgcgggagaaggccgtcttgctggacgaggacgatgacttgtgggtggagcttcgccacatgcatatcgcagatgtgtccaagaaggtcacggagctcctgaggaccttctgtgagagcaagaggctgaccacggacaaggcgaacatcaaagacctatcccagatcctgaaaaagatgccgcagtaccagaaggagctgaataag

SEQ ID NO: 122941 - DNA, 2567 bp, Homo sapiens
  Payload ID: 4140
  Gene Symbol:
  Gene Name: CTD-3222D19.2
  ENST ID: ENST00000409035
  CDS Start-End: 262-1545
actggagtttggttctcgaggcggcggcagcgagcggcggcggctccggcggctcctcctcctcctttggtggcggcggcggcccgggaccgagacccggccccggctcccctctccgccaccccgcgcgcccccaaccccccggcgccgcggggaacatgcggctccggctcccggaggccggcgagtgagtgacccccgtcccccgcctcagcccgcccgcccgctggcccggccgcaaccccccgcctcgcccaggcaatgacagcggctccggcgtctccgcagcagatcagggaccggctgctgcaggccatcgacccccagagcaacgaagtgcggtgtgaaacaacagtgatccggaacatggtggcggtgctggaagtcatctccagcctggagaaataccctattaccaaagaggcacttgaggaaacacgacttgggaagctcatcaacgacgtccgcaagaaaaccaagaacgaggagctcgccaagcgggccaagaagctgctgcggagctggcagaagctcatcgagccggcacaccagcatgaggcggcgctgcgggggctggcgggggccaccggctctgccaacgggggcgcacacaactgccggccggaggtgggggcggctggcccacccaggagcatccatgacctgaagagccgcaatgacctccagaggctgcccgggcagcggctggacaggctgggcagccgcaagcgccggggtgaccagcgtgacctcggccacccagggccgccacccaaggtctccaaagctagccacgaccccctggtccccaactcatcccccctccccaccaacgggatcagtgggagtccagagagcttcgccagctccctggatggcagtgggcatgcaggcccagagggcagccgcctggagcgtgacgagaatgacaagcacagtggcaagatccccgtcaacgccgtgcgaccgcacaccagctccccgggcctgggcaagccccctggaccctgcttgcagccaaaggcttcggtgctgcagcagctggacagggtggacgagactccggggcctccccatcccaagggaccccctcgctgctctttcagtcctcggaactcacggcatgagggctcctttgcccggcagcagagcttgtatgcacccaagggctccgtgcccagcccctcaccgcggccccaggcactcgatgccacacaggtgccgtcaccgcttccactggcacagccgtccacaccccccgtacggcggctcgagctgctgcccagtgcggaaagcccagtgtgctggcttgagcagcctgagagccaccagcggctggcggggccgggctgcaaggcagggctgtccccagccgagcccctcctgtcccgggcaggcttttccccagactcctccaaggcggacagtgatgctgcctcctcagggggctcggacagtaaaaagaagaagaggtcttgcgagattcacggatccaccatctccggctgctcaacatcctgggctgccacgccgtcttctttatgatccccacctgggttctggtggacctctcggctttcctggtcagcagcgacttgaccaagtacgatgcaaaccagcaagccaggaagcacctcctccccgtcaccacagcagacctgagcagcaaggagcgtcaccggagcccactggagaagccccacaacggcctcctcttcccccagcacggggactatcagctggagcggctcaggcggcctcggtgcgaaggagcaagggatccaggaccccatcaagggcggggacgtccgggataagtgggaccagtataaaggcgtgggcgtggctctggatgacccctatgagaactaccgcaggaacaagagctactccttcatcgcccgcatgaaggccagggacgagtagcattggagaaaccgatggttgcagtccaccaatgactcccgatttgggcattttagactttcgtcgggcaagttttatggtcataaagagaaagataaaggactgggagaagcattttctggacgccagcaccagcaagcagagcgactggaacggtgacctggatggggactggccagcgccgatgctccagaagcccccgtaccaggatggcctgaaaccagaaggtattcataaagacgtctggctccaccgtaagatgaagaataccgactatttgacgcagtatgacctctcagaatttgagaacattggtgccattggcctggagctttggcaggtgagatctggaaccatttttgataactttctgatcacagatgatgaagagtacgcagataattttggcaaggccacctggggcgaaaccaagggtccagaaagggagatggatgccatacaggccaaggaggaaatgaagaaggcccgcgaggaagaggaggaagagctgctgtcgggaaaaattaacaggcacgaacattacttcaatcaatttcacagaaggaatgaactttagtgatccccattggatataaggatgactggtaaaatctcattgctactttaatctatgtttcaaa

SEQ ID NO: 122942 - DNA, 2297 bp, Homo sapiens
  Payload ID: 4141
  Gene Symbol: CTBP1
  Gene Name: C-terminal binding protein 1
  Uniprot ID: Q13363
  ENST ID: ENST00000290921
  CDS Start-End: 183-1505
tgtccccgcccgcgcggtcgtcggagcgcggctcagcggcgcggcggagactcggcacggcggcggccaggcgcaggcgggcgggcggagcagcggacggcgccgaggccgccccacgcgccgggctcgcggcggcgcagcgcgccggagtggtcggggcccgcggccgctcgcgcctctcgatgggcagctcgcacttgctcaacaagggcctgccgcttggcgtccgacctccgatcatgaacgggcccctgcacccgcggcccctggtggcattgctggatggccgggactgcacagtggagatgcccatcctgaaggacgtggccactgtggccttctgcgacgcgcagtccacgcaggagatccatgagaaggtcctgaacgaggctgtgggggccctgatgtaccacaccatcactctcaccagggaggacctggagaagttcaaagccctccgcatcatcgtccggattggcagtggttttgacaacatcgacatcaagtcggccggggatttaggcattgccgtctgcaacgtgcccgcggcgtctgtggaggagacggccgactcgacgctgtgccacatcctgaacctgtaccggcgggccacctggctgcaccaggcgctgcgggagggcacacgagtccagagcgtcgagcagatccgcgaggtggcgtccggcgctgccaggatccgcggggagaccttgggcatcatcggacttggtcgcgtggggcaggcagtggcgctgcgggccaaggccttcggcttcaacgtgctcttctacgacccttacttgtcggatggcgtggagcgggcgctggggctgcagcgtgtcagcaccctgcaggacctgctcttccacagcgactgcgtgaccctgcactgcggcctcaacgagcacaaccaccacctcatcaacgacttcaccgtcaagcagatgagacaaggggccttcctggtgaacacagcccggggtggcctggtggatgagaaggcgctggcccaggccctgaaggagggccggatccgcggcgcggccctggatgtgcacgagtcggaacccttcagctttagccagggccctctgaaggatgcacccaacctcatctgcaccccccatgctgcatggtacagcgagcaggcatccatcgagatgcgagaggaggcggcacgggagatccgcagagccatcacaggccggatcccagacagcctgaagaactgtgtcaacaaggaccatctgacagccgccacccactgggccagcatggaccccgccgtcgtgcaccctgagctcaatggggctgcctataggtaccctccgggcgtggtgggcgtggcccccactggcatcccagctgctgtggaaggtatcgtccccagcgccatgtccctgtcccacggcctgccccctgtggcccacccgccccacgccccttctcctggccaaaccgtcaagcccgaggcggatagagaccacgccagtgaccagttgtagcccgggaggagctctccagcctcggcgcctgggcagagggcccggaaaccctcggaccagagtgtgtggaggaggcatctgtgtggtggccctggcactgcagagactggtccgggctgtcaggaggcgggagggggcagcgctgggcctcgtgtcgcttgtcgtcgtccgtcctgtgggcgctctgccctgtgtccttcgcgttcctcgttaagcagaagaagtcagtagttattctcccatgaacgttcttgtctgtgtacagtttttagaacattacaaaggatctgtttgcttagctgtcaacaaaaagaaaacctgaaggagcatttggaagtcaatttgaggtttttttttttgttttttttttttttgtatgttggaacgtgccccagaatgaggcagttggcaaacttctcaggacaatgaatccttcccgtttttctttttatgccacacagtgcattgttttttctacctgcttgtcttatttttagaataatttagaaaaacaaaacaaaggctgtttttcctaattttggcatgaacccccccttgttccaaatgaagacggcatcacgaagcagctccaaaaggaaaagcttgggcggtgcccagcgtgcccgctgcccatcgacgtctgtcctggggacgtggagggtggcagcgtccccgcctgcaccagtgccgtcctgctgatgtggtaggctagcaatattttggttaaaatcatgtttgtgactgtaaccatttgtatgaattattttaaagaaataaaaatcctggaaagag

SEQ ID NO: 122943 - DNA, 2467 bp, Homo sapiens
  Payload ID: 4141
  Gene Symbol: CTBP1
  Gene Name: C-terminal binding protein 1
  Uniprot ID: Q13363
  ENST ID: ENST00000382952
  CDS Start-End: 386-1675
gcgcggctcagcggcgcggcggagactcggcacggcggcggccaggcgcaggcgggcgggcggagcagcggacggcgccgaggccgccccacgcgccgggctcgcggcggcgcagcgcgccggagtggtcggggcccgcggccgctcgcgcctctcgatgggcagctcgcacttgctcaacaagggcctgccgcttgtaagactttgaccccgacgcaggcttcagtgattgccgcggatcagaagcctgagcactttggctcgagacaattaaggacgtgggatgaggctccgagacaggacgcggttctgcctggggatcctgaagataaaaagctttgaaaagtcgaattcatggtcgtggaagctgagcccatattaagagatgtcaggcgtccgacctccgatcatgaacgggcccctgcacccgcggcccctggtggcattgctggatggccgggactgcacagtggagatgcccatcctgaaggacgtggccactgtggccttctgcgacgcgcagtccacgcaggagatccatgagaaggtcctgaacgaggctgtgggggccctgatgtaccacaccatcactctcaccagggaggacctggagaagttcaaagccctccgcatcatcgtccggattggcagtggttttgacaacatcgacatcaagtcggccggggatttaggcattgccgtctgcaacgtgcccgcggcgtctgtggaggagacggccgactcgacgctgtgccacatcctgaacctgtaccggcgggccacctggctgcaccaggcgctgcgggagggcacacgagtccagagcgtcgagcagatccgcgaggtggcgtccggcgctgccaggatccgcggggagaccttgggcatcatcggacttggtcgcgtggggcaggcagtggcgctgcgggccaaggccttcggcttcaacgtgctcttctacgacccttacttgtcggatggcgtggagcgggcgctggggctgcagcgtgtcagcaccctgcaggacctgctcttccacagcgactgcgtgaccctgcactgcggcctcaacgagcacaaccaccacctcatcaacgacttcaccgtcaagcagatgagacaaggggccttcctggtgaacacagcccggggtggcctggtggatgagaaggcgctggcccaggccctgaaggagggccggatccgcggcgcggccctggatgtgcacgagtcggaacccttcagctttagccagggccctctgaaggatgcacccaacctcatctgcaccccccatgctgcatggtacagcgagcaggcatccatcgagatgcgagaggaggcggcacgggagatccgcagagccatcacaggccggatcccagacagcctgaagaactgtgtcaacaaggaccatctgacagccgccacccactgggccagcatggaccccgccgtcgtgcaccctgagctcaatggggctgcctataggtaccctccgggcgtggtgggcgtggcccccactggcatcccagctgctgtggaaggtatcgtccccagcgccatgtccctgtcccacggcctgccccctgtggcccacccgccccacgccccttctcctggccaaaccgtcaagcccgaggcggatagagaccacgccagtgaccagttgtagcccgggaggagctctccagcctcggcgcctgggcagagggcccggaaaccctcggaccagagtgtgtggaggaggcatctgtgtggtggccctggcactgcagagactggtccgggctgtcaggaggcgggagggggcagcgctgggcctcgtgtcgcttgtcgtcgtccgtcctgtgggcgctctgccctgtgtccttcgcgttcctcgttaagcagaagaagtcagtagttattctcccatgaacgttcttgtctgtgtacagtttttagaacattacaaaggatctgtttgcttagctgtcaacaaaaagaaaacctgaaggagcatttggaagtcaatttgaggtttttttttttgttttttttttttttgtatgttggaacgtgccccagaatgaggcagttggcaaacttctcaggacaatgaatccttcccgtttttctttttatgccacacagtgcattgttttttctacctgcttgtcttatttttagaataatttagaaaaacaaaacaaaggctgtttttcctaattttggcatgaacccccccttgttccaaatgaagacggcatcacgaagcagctccaaaaggaaaagcttgggcggtgcccagcgtgcccgctgcccatcgacgtctgtcctggggacgtggagggtggcagcgtccccgcctgcaccagtgccgtcctgctgatgtggtaggctagcaatattttggttaaaatcatgtttgtgactgtaaccatttgtatgaattattttaaagaaataaaaatcctggaaagag

SEQ ID NO: 122944 - DNA, 704 bp, Homo sapiens
  Payload ID: 4141
  Gene Symbol: CTBP1
  Gene Name: C-terminal binding protein 1
  ENST ID: ENST00000513420
  CDS Start-End: 269-704
gggaagggtcttgcgcatgcgcgggccgctgcgtgtgcgcgagcgccgcagtctgctctccccgcccgcggcccgtgcagtaagactttgaccccgacgcaggcttcagtgattgccgcggatcagaagcctgagcactttggctcgagacaattaaggacgtgggatgaggctccgagacaggacgcggttctgcctggggatcctgaagataaaaagctttgaaaagtcgaattcatggtcgtggaagctgagcccatattaagagatgtcaggcgtccgacctccgatcatgaacgggcccctgcacccgcggcccctggtggcattgctggatggccgggactgcacagtggagatgcccatcctgaaggacgtggccactgtggccttctgcgacgcgcagtccacgcaggagatccatgagaaggtcctgaacgaggctgtgggggccctgatgtaccacaccatcactctcaccagggaggacctggagaagttcaaagccctccgcatcatcgtccggattggcagtggttttgacaacatcgacatcaagtcggccggggatttaggcattgccgtctgcaacgtgcccgcggcgtctgtggaggagacggccgactcgacgctgtgccacatcctgaacctgtaccggcgggccacctggctgcaccaggcgctgcgggagggcacacgagtcc

SEQ ID NO: 122945 - DNA, 1108 bp, Homo sapiens
  Payload ID: 4141
  Gene Symbol: CTBP1
  Gene Name: C-terminal binding protein 1
  ENST ID: ENST00000503594
  CDS Start-End: 1-553
ggccttcctggtgaacacagcccggggtggcctggtggatgagaaggcgctggcccaggccctgaaggagggccggatccgcggcgcggccctggatgtgcacgagtcggaacccttcagctttagccagggccctctgaaggatgcacccaacctcatctgcaccccccatgctgcatggtacagcgagcaggcatccatcgagatgcgagaggaggcggcacgggagatccgcagagccatcacaggccggatcccagacagcctgaagaactgtgtcaacaaggaccatctgacagccgccacccactgggccagcatggaccccgccgtcgtgcaccctgagctcaatggggctgcctatagcaggtaccctccgggcgtggtgggcgtggcccccactggcatcccagctgctgtggaaggtatcgtccccagcgccatgtccctgtcccacggcctgccccctgtggcccacccgccccacgccccttctcctggccaaaccgtcaagcccgaggcggatagagaccacgccagtgaccagttgtagcccgggaggagctctccagcctcggcgcctgggcagagggcccggaaaccctcggaccagagtgtgtggaggaggcatctgtgtggtggccctggcactgcagagactggtccgggctgtcaggaggcgggagggggcagcgctgggcctcgtgtcgcttgtcgtcgtccgtcctgtgggcgctctgccctgtgtccttcgcgttcctcgttaagcagaagaagtcagtagttattctcccatgaacgttcttgtctgtgtacagtttttagaacattacaaaggatctgtttgcttagctgtcaacaaaaagaaaacctgaaggagcatttggaagtcaatttgaggtttttttttttgttttttttttttttgtatgttggaacgtgccccagaatgaggcagttggcaaacttctcaggacaatgaatccttcccgtttttctttttatgccacacagtgcattgttttttctacctgcttgtcttatttttagaataatttagaaaaacaaaacaaaggctgtttttcctaattttggcatgaaccccccc

SEQ ID NO: 122946 - DNA, 920 bp, Homo sapiens
  Payload ID: 4141
  Gene Symbol: CTBP1
  Gene Name: C-terminal binding protein 1
  ENST ID: ENST00000504092
  CDS Start-End: 1-862
cctggagaagttcaaagccctccgcatcatcgtccggattggcagtggttttgacaacatcgacatcaagtcggccggggatttaggtcgcgtggggcaggcagtggcgctgcgggccaaggccttcggcttcaacgtgctcttctacgacccttacttgtcggatggcgtggagcgggcgctggggctgcagcgtgtcagcaccctgcaggacctgctcttccacagcgactgcgtgaccctgcactgcggcctcaacgagcacaaccaccacctcatcaacgacttcaccgtcaagcagatgagacaaggggccttcctggtgaacacagcccggggtggcctggtggatgagaaggcgctggcccaggccctgaaggagggccggatccgcggcgcggccctggatgtgcacgagtcggaacccttcagctttagccagggccctctgaaggatgcacccaacctcatctgcaccccccatgctgcatggtacagcgagcaggcatccatcgagatgcgagaggaggcggcacgggagatccgcagagccatcacaggccggatcccagacagcctgaagaactgtgtcaacaaggaccatctgacagccgccacccactgggccagcatggaccccgccgtcgtgcaccctgagctcaatggggctgcctataggtaccctccgggcgtggtgggcgtggcccccactggcatcccagctgctgtggaaggtatcgtccccagcgccatgtccctgtcccacggcctgccccctgtggcccacccgccccacgccccttctcctggccaaaccgtcaagcccgaggcggatagagaccacgccagtgaccagttgtagcccgggaggagctctccagcctcggcgcctgggcagagggcccggaaaccctcggacc

SEQ ID NO: 122947 - DNA, 418 bp, Homo sapiens
  Payload ID: 4141
  Gene Symbol: CTBP1
  Gene Name: C-terminal binding protein 1
  ENST ID: ENST00000504784
  CDS Start-End: 1-74
ggatccgcggggagaccttgggcatcatcggacttggtgcacacaggaaaacattgtacacattcaccccatgaacccaccagcacgttgacagagcaggctcctgcacacagacagctccctcgggcccccttctcccgtggcggccccgcgacgaccctgcgaggacccgggtcccgcttcctagagcagagggccttccccagctgtgccgaggtgggatcacgggcacgcagccttctgtgtccgcctcccgtcagtcggggtgatgcctctgggtctcacctgtgttttcatacgacccagcagtttctgataacggttccatcacgtgaacacagcacgatttgcttctccagactcttggtgatgcattttgtaagtttttggctaatattacaaacaaaacttgtgtgaa

SEQ ID NO: 122948 - DNA, 4250 bp, Homo sapiens
  Payload ID: 4141
  Gene Symbol: CTBP1
  Gene Name: C-terminal binding protein 1
  ENST ID: ENST00000510568
  CDS Start-End: 593-1099
gcttccagaacaggaggcagagcctttccgcagtttccctgcccacagcacacaccctgtgccctccgtcccctggttcttggacactggggacatctggatgcggctagagcctgtgggggtggccgcagccctgggggactgttcccaggagtaggcctcggggccacaggggcgcggcctcgggcctggcactgcaacctcagggtgagcgcccttcgtgtgtgcggcaggagccggggcccctggctgtcagcaggcccccgagtccaggtaggtcccagacagcagtcccgggtgtggcagatgcagtgaggtccacttctgaggcgttccctggagtctgtgagttctggtcggaccttcgatggcattttaatgtgtctcttgtgtttgatttttagtaagactttgaccccgacgcaggcttcagtgattgccgcggatcagaagcctgagcactttggctcgagacaattaaggacgtgggatgaggctccgagacaggacgcggttctgcctggggatcctgaagataaaaagctttgaaaagtcgaattcatggtcgtggaagctgagcccatattaagagatgtcaggcgtccgacctccgatcatgaacgggcccctgcacccgcggcccctggtggcattgctggatggccgggactgcacagtggagatgcccatcctgaaggacgtggccactgtggccttctgcgacgcgcagtccacgcaggagatccatgagaaggtaccaccacgtggtcgcctggggctggcagaaccgcacgttggggggagttggagggacgggagcacggcaggcccgggccacagcaggtctgggtgccactggggcaggagcagcctctgtcccagtcgtcccgcgccgtcaggaggtggacacggggttttccctggacaccatcaggaggtggacatcgggtttgccctgagccccatcaggaggtggacacggggttttccctgtgccccatcaggaggtggacaccacgtttgtcctgagccccatcaggaggtggacattcggtttgccctgtgccccatcaggaggtggacacggggttttccctgagccccatcaggaggtggacactcgttttgccctgtgccccatcaggaggtggacacggggtttgtcctgagccccatcaggaggtggacacggggttttccctgagccccatcaggaggtggacacggggtttgtcctgagccccatcaggaggtggacacggggtttgtcctgagccccatcaggaggtggacacggggtttgtcctgagccccatcaggaggtgaacaccgggttttccctgagccccatcaggaggtggacacagggtttgtcctgagccccatcaggaggtggacacggggtttgtcctaagccccatcaggaggtggacacggggttttccctgcacaccatcaggaggtgaacaccgggttttcactgagctccatcaggaggtggacacggggtttgtcctgagccccatcaggaggtggacacggggttttccctgagccccatcaggaggtggacatggggttttccctgagccccatcaggaggtggacactcggtttgtcctgagccccatcaggaggtggacaccgggttttccctgagccccatgaggaggtggacactcggtttgtcctgagccccatcaggaggtggacactcggtttgccctgtgccccatcaggaggtggacactcggtttatcctgagccccatcaggaggtggacactcggtttgccctgtgccccatcaggaggtggacactcggtttctcctgagcctcatcaggaggtggacacggggttttccctgagccccacactcggtttgtcctgagcgccatcaggaggtggacactgggtttgccctgtgccccatcaggagatggacgctcggtttctcctgagccccatcaggaggtggacacggggtttgccctgagccccatcaggaggtggacaccgggtttgccctgagccccatcaggaggtggacattcggtttgccctgagccccatcaggaggtggacaccgggtttgtcctgagccccatcaggaggtggacattcggtttgccctgagccccatcaggaggtggacaccgggtttgtcctgagccccatcaggaggtggacacttggtttgccctgtgccccatcaggaggtggacacttggtttgccctgtgccccatcaggaggtggacaccgggtttgccctgagccccatcaggaggtggacaccgggtttgccctgagccccatcaggaggtggacacggggtttgtcctgagccccatcaggaggtggacactcggtttgtcctgagccccatcaggaggtggacaccgggtttgccctgtggcttcttgattcattttcagttttttcccagagagcaggtcctcgggatgccagcttttgtggcgggggtggagtaaggtgcttcccccggccccagttgcgcggcggtcttcacacgggcggtctcggcattgcccgcggcctggctttggtccagcagtgagcagcctttgggcagctttcctgattcttgtttgctcaggagacccacaggctcctccgtgatgagaactaggttggtctggcttctacttgtagccagggatcagtgattcagagcagcttttccctgaagacagacgaagaagctgggcccccaggagctcacaggatagggccaggcccaggctgcagcctggagaggcctataacctgcaggaacgggcgggccttgccaactctggcctggggtgttggctgttctggaagaagtagctgagaggctgaatttggctttggtggcatcactggcctgctgggtgtggggccctgccgggatatccatggcctgaaaggtgacatctggagtgagggtgacctggactctgacgcgccacacgatcggcacccagcctgctgatgtccaggaaaccttgaatctggatttttggggaccccgcactgccggccccaggtgcctggcaaaagaagtaagacggcccctttagaggaagacagcgtcagccgaggcctcgggtcatttctacaaatcaccatctggtgcggggtccatcacatgcaaacagaggtaaccaggcagtcaaggagatgcgcaaaacgcagaagccagggaagcagtgccacccgcaggagctccccgtgctgcccacgagccgatcaccccagcccagcccccaggaggctgggccagacaccgacgaagagctgatgactctggaacggggcgtagcagcgttaggggagaaaatgagatgcggatctgagaaaacggcgaagctgatcggtggaactgaggggcgggtttaccagctgaccaggcggcagcggacaggagggaaggagagaacgcgggagagggcgagatgaggaagggtcgctcttgcagaaacttcagaacaggagagggaaggggttggaagtgatgatgacagcaaaaccctttccaaaatggacggaagaaaatctgatgttaaaaatgcgcgtggtctgccgggagcgtctgctggggcgttcgctctggaagattcttcatggtttctcacacgggtagatgcgtgcttgtaatgcagcccagtggccacactcctttatcccggagactcggaatgcgcgtccacacacagacctgcacgtcatgctccctagcagcttaactcaccatagcccaaaccagaaggacgccccccaccggctgtccttcagtgggtgagtggccaggcaaatgctggccacctccctcggtgtcctcctcagcaacaggcatgaacgctgggtccctgccacaccctgggtgatctcggcagcatgatggcgagtgaagaagctggtttcaaggggtgcacactgtatgatctcttcatccccaggtgataggattagcgtgacggaaacagtggcccggggtgtaggtgggggggccgccggcaggccggtgtctggaatcggcacatgggcacgttggcacgtcacgtgggcatgtccacacgcatgcaaggggctgtgggtgaactgcccgtggtgcacacctgagggagttgtgtggcaccagctcggtttggacagtgccctttgttaggtacggttttctcattgggaagctggatttgtattaaagatgcacacgtaagaataaaaaagaggctcgtagaaaa

SEQ ID NO: 122949 - DNA, 774 bp, Homo sapiens
  Payload ID: 4141
  Gene Symbol: CTBP1
  Gene Name: C-terminal binding protein 1
  ENST ID: ENST00000510739
  CDS Start-End: 1-437
gcggggagaccttgggcatcatcggacttggtcgcgtggggcaggcagtggcgctgcgggccaaggccttcggcttcaacgtgctcttctacgacccttacttgtcggatggcgtggagcgggcgctggggctgcagcgtgtcagcaccctgcaggacctgctcttccacagcgactgcgtgaccctgcactgcggcctcaacgagcacaaccaccacctcatcaacgacttcaccgtcaagcagatgagacaaggggccttcctggtgaacacagcccggggtggcctggtggatgagaaggcgctggcccaggccctgaaggagggccggatccgcggcgcggccctggatgtgcacgagtcggaacccttcaggtgcccccacggccagtgccgcccccctgctcttccctgtccaccatcctgccggccttgacctccagacggcgcctctgccaggccggacacttgcctgtactcaggcctctcgctggccagcagtgggggagtttgccgcccgctgcgggctttagccagggccctctgaaggatgcacccaacctcatctgcaccccccatgctgcatggtacagcgagcaggcatccatcgagatgcgagaggaggcggcacgggagatccgcagagccatcacaggccggatcccagacagcctgaagaactgtgtcaacaaggaccatctgacagccgccacccactgggccagcatggaccccgccgtcgtgcaccctgagctcaatggggctgcctatag

SEQ ID NO: 122950 - DNA, 843 bp, Homo sapiens
  Payload ID: 4141
  Gene Symbol: CTBP1
  Gene Name: C-terminal binding protein 1
  ENST ID: ENST00000506180
  CDS Start-End: 284-843
ccagtgcggcctctccctgaagggactttcgggccctcccgggtcggggcttcaccggtagcaggcagggctttgatattaatgcttaaagggaaagcagagctgagctgtcaggacgttggttagctacaaaccctactcttgttaaaagagaaatggggtcggggaaggggttctccagccctgaacttcccgggccgggcaggacgcggtccctccaggagtcggggctcccccgcctggggacgcactggggcaggcgcgcttctcctctcggggtcccatgtgccgccggctctcggacggcgtccgacctccgatcatgaacgggcccctgcacccgcggcccctggtggcattgctggatggccgggactgcacagtggagatgcccatcctgaaggacgtggccactgtggccttctgcgacgcgcagtccacgcaggagatccatgagaaggtcctgaacgaggctgtgggggccctgatgtaccacaccatcactctcaccagggaggacctggagaagttcaaagccctccgcatcatcgtccggattggcagtggttttgacaacatcgacatcaagtcggccggggatttaggcattgccgtctgcaacgtgcccgcggcgtctgtggaggagacggccgactcgacgctgtgccacatcctgaacctgtaccggcgggccacctggctgcaccaggcgctgcgggagggcacacgagtccagagcgtcgagcagatccgcgaggtggcgtccggcgctgccaggatccgcggggagaccttgggcatcatcggacttggtcgcgtggggcaggcagtggcgctgcgggc

SEQ ID NO: 122951 - DNA, 985 bp, Homo sapiens
  Payload ID: 4141
  Gene Symbol: CTBP1
  Gene Name: C-terminal binding protein 1
  ENST ID: ENST00000515399
  CDS Start-End: 472-985
ggactttcgggccctcccgggtcggggcttcaccggtagcaggcagggctttgatattaatgcttaaagggaaagcagagctgagctgtcaggacgttggttagctacaaaccctactcttgttaaaagagaaatggggtcggggaaggggttctccagccctgaacttcccgggccgggcaggacgcggtccctccaggagtcggggctcccccgcctggggacgcactggggcaggcgcgcttctcctctcggggtcccatgtgccgccggctctcggacgtaagactttgaccccgacgcaggcttcagtgattgccgcggatcagaagcctgagcactttggctcgagacaattaaggacgtgggatgaggctccgagacaggacgcggttctgcctggggatcctgaagataaaaagctttgaaaagtcgaattcatggtcgtggaagctgagcccatattaagagatgtcaggcgtccgacctccgatcatgaacgggcccctgcacccgcggcccctggtggcattgctggatggccgggactgcacagtggagatgcccatcctgaaggacgtggccactgtggccttctgcgacgcgcagtccacgcaggagatccatgagaaggtcctgaacgaggctgtgggggccctgatgtaccacaccatcactctcaccagggaggacctggagaagttcaaagccctccgcatcatcgtccggattggcagtggttttgacaacatcgacatcaagtcggccggggatttaggcattgccgtctgcaacgtgcccgcggcgtctgtggaggagacggccgactcgacgctgtgccacatcctgaacctgtaccggcgggccacctggctgcaccaggcgctgcgggagggcacacgagtccagagcgtcgagcagatccgcgaggtggcgtccggcgctgccaggatccgcggggagaccttgggcatcatcggacttg

SEQ ID NO: 122952 - DNA, 856 bp, Homo sapiens
  Payload ID: 4141
  Gene Symbol: CTBP1
  Gene Name: C-terminal binding protein 1
  ENST ID: ENST00000514210
  CDS Start-End: 250-856
cgcggccgctcgcgcctctcgatgggcagctcgcacttgctcaacaagggcctgccgcttgtaagactttgaccccgacgcaggcttcagtgattgccgcggatcagaagcctgagcactttggctcgagacaattaaggacgtgggatgaggctccgagacaggacgcggttctgcctggggatcctgaagataaaaagctttgaaaagtcgaattcatggtcgtggaagctgagcccatattaagagatgtcaggcgtccgacctccgatcatgaacgggcccctgcacccgcggcccctggtggcattgctggatggccgggactgcacagtggagatgcccatcctgaaggacgtggccactgtggccttctgcgacgcgcagtccacgcaggagatccatgagaaggtcctgaacgaggctgtgggggccctgatgtaccacaccatcactctcaccagggaggacctggagaagttcaaagccctccgcatcatcgtccggattggcagtggttttgacaacatcgacatcaagtcggccggggatttaggcattgccgtctgcaacgtgcccgcggcgtctgtggaggagacggccgactcgacgctgtgccacatcctgaacctgtaccggcgggccacctggctgcaccaggcgctgcgggagggcacacgagtccagagcgtcgagcagatccgcgaggtggcgtccggcgctgccaggatccgcggggagaccttgggcatcatcggacttggcagcccactcctgctgaccgctgtccttgtcccgccagcgtttggggaatcggacgtttcgggtggtctcggtgaggcggccacacctaggt

SEQ ID NO: 122953 - DNA, 210 bp, Homo sapiens
  Payload ID: 4141
  Gene Symbol: CTBP1
  Gene Name: C-terminal binding protein 1
  ENST ID: ENST00000629223
  CDS Start-End: 1-210
gccccatcaggaggtggacacggggttttccctgcacaccatcaggaggtggacactcggtttgtcctgagccccatcaggaggtggacactcggtttgccctgtgccccatcaggaggtggacactcggtttatcctgagccccatcaggaggtggacactcggtttgccctgtgccccatcaggaggtggacactcggtttctcctga

SEQ ID NO: 122954 - DNA, 3669 bp, Homo sapiens
  Payload ID: 4142
  Gene Symbol: CTBP2
  Gene Name: C-terminal binding protein 2
  Uniprot ID: P56545
  ENST ID: ENST00000309035
  CDS Start-End: 132-3089
aaacccccagttggttgtccctgccgtctcggaagggttagcacacagccaggtctgtttttgatgtatgtaattgaagatttataaagaaaagcttctcctctgcctcatccgcagtcattttttttccaatgccagttcccagcaggcatataaatattggtcgttctcagagctgggatgctgctgggtggtacgagggcccctgggagaacgccgagtccctgcggcctctggggaggagaagctccctgacgtatggcacagcagaggggacttggtttgagccaaaccaccgaccacaggacgctgccctgcccgtggccgccgagccctacctgtaccgggaggccgtttataactcagtggctgcaagaaaggggtctactcctgacttcaccttctacgacagcagacaggcagtgatgtctggtcgcagccccctgctgccacgggagtactacagtgatccgtctggagctgctagggtacccaaagagcctcccctctatcgggacccaggagtcagccggccggtccccagctacggagtgcttggcagcagaacgtcatgggatccaatgcaaggccggtcacctgccctgcaggacgccggtcacctgtaccgggatcctggaggtaaaatgatccctcaggggcggcagacacagagcagggctgcatctcccgggcggtatggacgggagcagcccgacaccaggtatggggcggaggtgcctgcctaccccctcagccaggtcttcagcgacatcagcgaaagacccattgaccctgcccctgccagacaggtggccccgacgtgcctggttgtggaccccagttcagctgctgcccccgaaggcagcacaggggtggccccaggggccctgaatcgtggctacgggcctgcccgggaaagcatcccatccaagatggcttacgagacttacgaagctgacctgtccaccttccagggtcctggtggcaagaggaccgtgctccctgagttcctggcctttctgcgggcggaggggctggcagaggccacgctgggagccctactgcagcagggctttgactccccggccgtcctggctaccctggaggacgcggatatcaagtctgtcgcacccaacctgggccaggcccgtgttctgagccgcctggccaatagctgcaggaccgaaatgcagctgcggaggcaggaccgggggggcccgctgccccgggcgcggtccagcagcttcagccaccgaagcgaactgctccatggtgacttggcttctctgggcgctgcggctcctctgcagacagcatccccccgagctggagacccggctcgccgtccctccagcgcaccatctcagcacctcctggagacggcagccacctattctgcccctggcgtgggcacccatgccccacacttcccctccaactccgggtacagctctcccaccccttgcgccctgacagcgcgtctgagccccacgtaccccctgcaggcaggggtggccttgactaacccgggcccctcaaacccccttcacccaggccccagaacagcctactccacggcatacacggtgcccatggagctgctaaagagggagcgcaacgtggccgcctctccgctgcccagccctcacggcagcccccaggtcttgcggaagccaggtgcacccctggggccatccaccctgccgccggccagccagagcctccacacgcctcactcaccgtaccagaaggtggcccggcgcacaggggcacccatcatcgtgtccaccatgcttgcaccagaaccaagtatccgcccccagatcatgaacggccccctgcacccccgccccctggtggcgctgctggacggccgcgactgcactgtggagatgcccatcctgaaggacctggccactgtggccttctgtgacgcgcagtcgacgcaggaaatccacgagaaggttctaaacgaagccgtgggcgccatgatgtaccacaccatcaccctcaccagggaggacctggagaagttcaaggccctgagagtgatcgtgcggataggcagtggctatgacaacgtggacatcaaggctgccggcgagctcggaattgccgtgtgcaacatcccgtctgcagccgtggaagagacagcggactctaccatctgccacatcctcaacctgtaccggaggaacacgtggctgtaccaggcactgcgggaaggcacgcgggttcagagcgtggagcagatccgcgaggtggcctcgggagcggcccgcatccgtggggagacgctgggcctcattggctttggtcgcacggggcaggcggttgcagttcgagccaaggcctttggattcagcgtcatattttatgacccctacttgcaggatgggatcgagcggtccctgggcgtgcagagggtctacaccctgcaggatttgctgtatcagagcgactgcgtctccttgcactgcaatctcaacgaacataaccaccacctcatcaatgactttaccataaagcagatgaggcagggagcattccttgtgaacgcagcccgtggcggcctggtggacgagaaagccttagcacaagccctcaaggagggcaggatacgaggggcagccctcgacgtgcatgagtcagagcccttcagctttgctcagggtccgttgaaagatgccccgaatctcatctgcactcctcacactgcctggtacagtgagcaggcgtcactggagatgagggaggcagctgccaccgagatccgccgagccatcacaggtcgcatcccagaaagcttaagaaattgtgtgaacaaggaattctttgtcacatcagcgccttggtcagtaatagaccagcaagcaattcatcctgagctcaatggtgccacatacagatatccgccaggcatcgtgggtgtggctccaggaggacttcctgcagccatggaagggatcatccctggaggcatcccagtgactcacaacctcccgacagtggcacatccttcccaagcgccctctcccaaccagcccacaaaacacggggacaatcgagagcaccccaacgagcaatagcagagaatgccagaaggtaatcactcagatacacttgggaccaagagacagtgaaaaatagatgaactaagagaaaaagaatcggatggtctttgtaactgattctggacatatgcatcattgatgttgcagtgttgaaactacaagagctagaaaactgaagatgtcgtctgcttacggaagcgctgaaagactaggatgtgatttattaacgaccaacttctgttattgtgtgttaagtttttcatctgtgcatcaaatcacaaaaagaataaatagagctttttcctttatcagtcccttgggcacagcaggtcctgaacaccctgctctacaatgttgcatcaagagttcaaacaacaaaataaaaaatattaagaggaaatccccatcctgtgacttgagtcccttaagtctacaggggctggtgacctctttttgctaataggaaaatcacattactacaaaatggggagaaaactgtttgcctgtggtagacacctgcacgcataggattgaagacagtacaggctgctgtacagagaagcgcctctcacatctgaactgcatactgagcggg

SEQ ID NO: 122955 - DNA, 6939 bp, Homo sapiens
  Payload ID: 4142
  Gene Symbol: CTBP2
  Gene Name: C-terminal binding protein 2
  Uniprot ID: P56545
  ENST ID: ENST00000337195
  CDS Start-End: 401-1738
gggagcggcccggaggagccggcggcggcccgaggagcgagggaccgaaccgggagccatgccgcgctgagggggggccgcacagccgccgccaccgccaccgccgccgggtggggtgggaggggcgggagacgccgccgccgccgcctccagggtgggcgcctttcgccgtggacgccgaccgtccgggacgagggtttcatcaccttaaatggttttgaaccaatgaaggtgtattcccttaaaaagacggacagcccatcgtgtgaactatagagtttgtggacagatttatattgggttcatagtggcgtcatgcacgcagactcctgcaagttcccctaagttcttagaggactgctttgccttttgatctgagagttgcaaagttccataaagaatggcccttgtggataagcacaaagtcaagagacagcgattggacagaatttgtgaaggtatccgcccccagatcatgaacggccccctgcacccccgccccctggtggcgctgctggacggccgcgactgcactgtggagatgcccatcctgaaggacctggccactgtggccttctgtgacgcgcagtcgacgcaggaaatccacgagaaggttctaaacgaagccgtgggcgccatgatgtaccacaccatcaccctcaccagggaggacctggagaagttcaaggccctgagagtgatcgtgcggataggcagtggctatgacaacgtggacatcaaggctgccggcgagctcggaattgccgtgtgcaacatcccgtctgcagccgtggaagagacagcggactctaccatctgccacatcctcaacctgtaccggaggaacacgtggctgtaccaggcactgcgggaaggcacgcgggttcagagcgtggagcagatccgcgaggtggcctcgggagcggcccgcatccgtggggagacgctgggcctcattggctttggtcgcacggggcaggcggttgcagttcgagccaaggcctttggattcagcgtcatattttatgacccctacttgcaggatgggatcgagcggtccctgggcgtgcagagggtctacaccctgcaggatttgctgtatcagagcgactgcgtctccttgcactgcaatctcaacgaacataaccaccacctcatcaatgactttaccataaagcagatgaggcagggagcattccttgtgaacgcagcccgtggcggcctggtggacgagaaagccttagcacaagccctcaaggagggcaggatacgaggggcagccctcgacgtgcatgagtcagagcccttcagctttgctcagggtccgttgaaagatgccccgaatctcatctgcactcctcacactgcctggtacagtgagcaggcgtcactggagatgagggaggcagctgccaccgagatccgccgagccatcacaggtcgcatcccagaaagcttaagaaattgtgtgaacaaggaattctttgtcacatcagcgccttggtcagtaatagaccagcaagcaattcatcctgagctcaatggtgccacatacagatatccgccaggcatcgtgggtgtggctccaggaggacttcctgcagccatggaagggatcatccctggaggcatcccagtgactcacaacctcccgacagtggcacatccttcccaagcgccctctcccaaccagcccacaaaacacggggacaatcgagagcaccccaacgagcaatagcagagaatgccagaaggtaatcactcagatacacttgggaccaagagacagtgaaaaatagatgaactaagagaaaaagaatcggatggtctttgtaactgattctggacatatgcatcattgatgttgcagtgttgaaactacaagagctagaaaactgaagatgtcgtctgcttacggaagcgctgaaagactaggatgtgatttattaacgaccaacttctgttattgtgtgttaagtttttcatctgtgcatcaaatcacaaaaagaataaatagagctttttcctttatcagtcccttgggcacagcaggtcctgaacaccctgctctacaatgttgcatcaagagttcaaacaacaaaataaaaaatattaagaggaaatccccatcctgtgacttgagtcccttaagtctacaggggctggtgacctctttttgctaataggaaaatcacattactacaaaatggggagaaaactgtttgcctgtggtagacacctgcacgcataggattgaagacagtacaggctgctgtacagagaagcgcctctcacatctgaactgcatactgagcgggcaagtcggttgtaagttcagtaaaaccctctgatgatgcaaaaaaaaaaaaaaaagtattaagtttcacaagctgtttgtactcaaatatattttctcagtttcagatcctctgctattttattgagtggaaagtcttgagctaaaagggttcaagaagaataatgttgcatttccttatgtctcaggaaacactttttatggtaacttgtcagattgtctatgaacaaacccacttttttagacattgataaagtcttcttttcttcacgtgatattttatacaagaacacttcagatgtattagatgtgactgattttaacaaatcctattagatttgtatcaactagttacatgttctattcatagtcttttgtgaatcattgcctttttgtttaaaaagatggcctattttgagcctttgtataggtacattcctgtttttgtgacaaaagaaaaactttaaaattgtcccaaacagaaaaataatggctatcagaagtatgttttgttttagtgtgagttaccgttactgtatttgtttattgtaaaggtggacatttagcgttcagtgcagttttcaataaaaagtaattaaaatttgttaagttctgaaattcaagtacatctcactaatgtaaatgttctctacttgagatgtttaaggcaattgcattgtcaattagccaatttccagctcttgttactacagggttccataaccagactcaagaccgctgacaattaattacctgtgataacaaaaagtttaattgaaaaatcaaaacctcacacaagtccatcattatcacgtcatgccatccttaagatgcaatggtgggttagtgctaaatcaattcaaaaaaaaacaaagttgctcaacttttagagttctgactttaatctaccccaaagcaaaatgacctggacctggttcaagggagggaagtgaaccttgaaactgttttgccaataacctaacaaacaaaatgatatttacaaagaagtgttgcaaatagtcccatgagttaagagcttgatttaatggatcttctttttaaatagaattaaacctttatactaaaagtatttgcaagtgtcaattaagtccaacaattccaggtatgaaactccctctgagctcttccttatacttcccttcccaattaaaacaaaacaagaaaatcatggtgtcttaaagcctttggcttgcctggccttgtctgctcactcattttaaggtggtggccccatcccaactctaccataaaagtgtctattaacacaagctcacatggagagagacggcgctcatagttactgacctattaccccagggaacaaaaaggtagtttaacgtcttcgtaaccactcatcaaagaggcaatgaaatatgcgtgaaaaggaggccaagcgcacacagaatatcttaccttcacgaatatgtgaagaagtctgggacacgatgaacctaagagtcaaaaacataaaaaggcaggtctgaatccatggtccacctgggttttaattattagatcttggtcgcccaaacaaaaatttatatatatatatataaatttgaccccaaggaagaacaagtcaaaacaaaatgccacgctctgtttgctctagaaaaagaaccatcaagtccacagagtgcaggtatgacttactctccagagtcagtcattaatgtctgtcacctagccacgtataatcatctttgaaaaaggactatattctatcttgggacaataattatggctgttttaatagttcaagagcataatatagcattgatttaccaaaatttttggcctttaacagccagtctatgaaaaccatttagagccccattcctgtctgtagcctaggaaatggaaccatctttaattctttcccacagggaagaatgctgcacctatcacactatgtggtcagggtcactgattgataataaataaataaataatagagcgctcaggggaaacaacactcaccagaccacaacacacagtagaagctaagtgctgagcgtgtactctggacaacgctggctgcaatgcagactgcaatggctacatgcttttccctctaacaattctctttggctttttcaattgggagggcagattttgcttaacaggcaactagaacaggatctctgcccactaaaaaattatccctatacatagagaaattactacagatgctaagtagtcagaatgctaacattttctacaaacttgattacttattggccaaaatgaaagcaaacagccaatttttaacaacacattcaccacttgaaacaaacagcagcatttacattatatcaaagattcatttctacagaatcgtactaaaaaatcatttttcctgcaagatttagcatgcagcaaaaaatgatcttttcatcctgggaacacctttttactgagttttcggggggaaagaactaaagacatgacagttttgtgggtatttttctatttttagtattctggcagcaaatttgaggttgtacacatttcattatcaactaaacaaaacaagaagcaagcaaatactttaaggttttcacagcctttttcatcacagggaaggaaaaaactgtgtgtgtgtgtgtgtgtgtgtgtgtgtgtgcgcgcgcgcgcgtgcgtgtgtcgtctttccaaattcctggccacatcaatagtctagaaagtgcttatcaggacaccaaatatttctgtgttcctgagataggtctgaaatttttacccagtattgaatgtatacctgaagtggtcaaataatacttcttataaaaaagtttttctacctaagattatagttttaactttaaattaaagaatggccacaattaaccaacatgcaaaaattctcagactaaacactgagaaattcttcatacaatgcatttgccaccttattgcatttttaaaatctttattctgtagtgaattggtattcccaatctgcctaagcaaaggcatgcccttctaacaagatttgcttagagcagaggtgatagaaggaagaatccgaagaccctctggcatggcaatctgggagcagcacattgttgatggagtccaagtgagcacatttcacacaattcatttagtgacaagtgggcttgctcccttttcatccaggaaaaaaactactcacagaccactgcccagaatctggaataagaaccctcattttaaggtattcttcccaacaaataaatatctaaatattgaaagggggcatatcagaaaacttaaagacacaataaccaaaaccaaaaccctcttcaaaacaagtaagcaatgtctgtatttagttcactctaaaacattcttagcttttcttgcagtttgttcctaaaagatttgattgggcacaagaggaacgaaattattaataaaataaaagcttatttttgttttgctgtggataatcggtacaaaacgtttccagatctgagacttagatggatcttttaaggtgaaagtagaatgccaggttctactgaaataatatctgaaaggaacaaagagccatttgccatgtgctttttctaagtgcccatgctggaaaaaattttctcaataatatgaagatgctggtacaacttttcctattaaacaatgtcttacacaaccacatgcgttacatttatagacagatttacaatttggaaggaaaaaaagttctgtcttaataaaattagttttttttacaaactgtagtccaactaaagttctctgtctcctcacgcagcagaggcattatctccataaggtgtgtgtggtccaggaaaacacttccccgagcagatcctgccagatttggttcattccatgatgtcgactctgcttggagcaccacactaactttagggtcattacagatctgatgccttggtcttctgctgtttgattttttttttcattcatcttcatcatcctcatcttcctctccatcagacagggatgtacacggccggatctgtcggtagcggtcaagccatttttctaccatctgagtgaccagggggtgatttcgccgccgagaactcttctgcatggcaaccagaactcccccctccgtcacacagcagtccagccactccctgagcagtttttcttgctgttcctcattacctagcttttggaggaatatgaagacaaagggaaaatcatacaacagatcagagacttggtaggaatgtgacatggaaacctacagctggtatgctaactcatgaaaaggccaaagcaatcaacttttcacatggttttgacctcttggaagttttgtgattaaagtccagtttgctctggttaaatttaaaaagacataaatgggaaatttctcagaaaaaaactaaagaggagcacactagagggtaatttgttagataaaataaaaaacaaatgtcctaataaactgatcctggcaagccacagcttcaaacacatgacaaggtaagtttacttagtcaattatgtacaagctgaaattatacaagttacggtctatgaactttttttcttcatgttgtgattataaacgttttataattactagtatattaaataaaagaccaatacttttataagaa

SEQ ID NO: 122956 - DNA, 2130 bp, Homo sapiens
  Payload ID: 4142
  Gene Symbol: CTBP2
  Gene Name: C-terminal binding protein 2
  ENST ID: ENST00000334808
  CDS Start-End: 206-1747
gtgacaatggcctctcaggctccccagacgcatcagcggctctggattcccaccttgcgcccagcgtggttttcctgtgtggctaccatttaacgaacagcttggatttcttataatcaggcactctctccgataaccatcctgccagcacccctgaaagtgaagttggggtgttcctcactgtgtgtgggcgaccgcctggggcatgagaccaggacttccaggccccacagggttgtgcgctcagacctcaagtaggggccagaagagtgtactgaaacagaaggaatcttgtggaatttggcagttgtaccattttcttagcagaaaacaggagcccaggtgggagccatgtgtgtcgggttcctcgtcaggtgacggtgctgttgcggatctcgcggatgagctgagggggtatccagctttgtgctgcacgcttcctgtccactcatacaggtcgtgggctggtatccgcccccagatcatgaacggccccctgcacccccgccccctggtggcgctgctggacggccgcgactgcactgtggagatgcccatcctgaaggacctggccactgtggccttctgtgacgcgcagtcgacgcaggaaatccacgagaaggttctaaacgaagccgtgggcgccatgatgtaccacaccatcaccctcaccagggaggacctggagaagttcaaggccctgagagtgatcgtgcggataggcagtggctatgacaacgtggacatcaaggctgccggcgagctcggaattgccgtgtgcaacatcccgtctgcagccgtggaagagacagcggactctaccatctgccacatcctcaacctgtaccggaggaacacgtggctgtaccaggcactgcgggaaggcacgcgggttcagagcgtggagcagatccgcgaggtggcctcgggagcggcccgcatccgtggggagacgctgggcctcattggctttggtcgcacggggcaggcggttgcagttcgagccaaggcctttggattcagcgtcatattttatgacccctacttgcaggatgggatcgagcggtccctgggcgtgcagagggtctacaccctgcaggatttgctgtatcagagcgactgcgtctccttgcactgcaatctcaacgaacataaccaccacctcatcaatgactttaccataaagcagatgaggcagggagcattccttgtgaacgcagcccgtggcggcctggtggacgagaaagccttagcacaagccctcaaggagggcaggatacgaggggcagccctcgacgtgcatgagtcagagcccttcagctttgctcagggtccgttgaaagatgccccgaatctcatctgcactcctcacactgcctggtacagtgagcaggcgtcactggagatgagggaggcagctgccaccgagatccgccgagccatcacaggtcgcatcccagaaagcttaagaaattgtgtgaacaaggaattctttgtcacatcagcgccttggtcagtaatagaccagcaagcaattcatcctgagctcaatggtgccacatacagatatccgccaggcatcgtgggtgtggctccaggaggacttcctgcagccatggaagggatcatccctggaggcatcccagtgactcacaacctcccgacagtggcacatccttcccaagcgccctctcccaaccagcccacaaaacacggggacaatcgagagcaccccaacgagcaatagcagagaatgccagaaggtaatcactcagatacacttgggaccaagagacagtgaaaaatagatgaactaagagaaaaagaatcggatggtctttgtaactgattctggacatatgcatcattgatgttgcagtgttgaaactacaagagctagaaaactgaagatgtcgtctgcttacggaagcgctgaaagactaggatgtgatttattaacgaccaacttctgttattgtgtgttaagtttttcatctgtgcatcaaatcacaaaaagaataaatagagctttttcctttatcagtcccttgggcacagcaggtcctgaacaccctgctctacaatgttgcatcaagagttcaaacaacaaaataaaaaatattaagagga

SEQ ID NO: 122957 - DNA, 2036 bp, Homo sapiens
  Payload ID: 4142
  Gene Symbol: CTBP2
  Gene Name: C-terminal binding protein 2
  Uniprot ID: P56545
  ENST ID: ENST00000411419
  CDS Start-End: 406-1743
cgcctcccgcctagctcctgcgcagccagcgggtaccgggagctgcggccagcgccgcttctttcctttccttttctctccgttttccttctccttccccggaggagaaaacaaataaagaagagcaaatagccgggaggcgctcggcatccaggacgttccctcccccgatccaagttggaattagcatcctctcggggggtttcatcaccttaaatggttttgaaccaatgaaggtgtattcccttaaaaagacggacagcccatcgtgtgaactatagagtttgtggacagatttatattgggttcatagtggcgtcatgcacgcagactcctgcaagttcccctaagttcttagaggactgctttgccttttgatctgagagttgcaaagttccataaagaatggcccttgtggataagcacaaagtcaagagacagcgattggacagaatttgtgaaggtatccgcccccagatcatgaacggccccctgcacccccgccccctggtggcgctgctggacggccgcgactgcactgtggagatgcccatcctgaaggacctggccactgtggccttctgtgacgcgcagtcgacgcaggaaatccacgagaaggttctaaacgaagccgtgggcgccatgatgtaccacaccatcaccctcaccagggaggacctggagaagttcaaggccctgagagtgatcgtgcggataggcagtggctatgacaacgtggacatcaaggctgccggcgagctcggaattgccgtgtgcaacatcccgtctgcagccgtggaagagacagcggactctaccatctgccacatcctcaacctgtaccggaggaacacgtggctgtaccaggcactgcgggaaggcacgcgggttcagagcgtggagcagatccgcgaggtggcctcgggagcggcccgcatccgtggggagacgctgggcctcattggctttggtcgcacggggcaggcggttgcagttcgagccaaggcctttggattcagcgtcatattttatgacccctacttgcaggatgggatcgagcggtccctgggcgtgcagagggtctacaccctgcaggatttgctgtatcagagcgactgcgtctccttgcactgcaatctcaacgaacataaccaccacctcatcaatgactttaccataaagcagatgaggcagggagcattccttgtgaacgcagcccgtggcggcctggtggacgagaaagccttagcacaagccctcaaggagggcaggatacgaggggcagccctcgacgtgcatgagtcagagcccttcagctttgctcagggtccgttgaaagatgccccgaatctcatctgcactcctcacactgcctggtacagtgagcaggcgtcactggagatgagggaggcagctgccaccgagatccgccgagccatcacaggtcgcatcccagaaagcttaagaaattgtgtgaacaaggaattctttgtcacatcagcgccttggtcagtaatagaccagcaagcaattcatcctgagctcaatggtgccacatacagatatccgccaggcatcgtgggtgtggctccaggaggacttcctgcagccatggaagggatcatccctggaggcatcccagtgactcacaacctcccgacagtggcacatccttcccaagcgccctctcccaaccagcccacaaaacacggggacaatcgagagcaccccaacgagcaatagcagagaatgccagaaggtaatcactcagatacacttgggaccaagagacagtgaaaaatagatgaactaagagaaaaagaatcggatggtctttgtaactgattctggacatatgcatcattgatgttgcagtgttgaaactacaagagctagaaaactgaagatgtcgtctgcttacggaagcgctgaaagactaggatgtgatttattaacgaccaacttctgttattgtgtgttaagtttttcatctgtgcatcaaatcacaaaaagaataaatagagctttttccttta

SEQ ID NO: 122958 - DNA, 578 bp, Homo sapiens
  Payload ID: 4142
  Gene Symbol: CTBP2
  Gene Name: C-terminal binding protein 2
  ENST ID: ENST00000530884
  CDS Start-End: 570-578
aggagcgaggagtgagcgagcggcgaccctcacctcgcctcccgcctagctcctgcgcagccagcgggtaccgggagctgcggccagcgccgcttctttcctttccttttctctccgttttccttctccttccccggaggagaaaacaaataaagaagagcaaatagccgggaggcgctcggcatccaggacgttccctcccccgatccaagttggaattagcatcctctcggggggtttcatcaccttaaatggttttgaaccaatgaaggtgtattcccttaaaaagacggacagcccatcgtgtgaactatagagtttgtggacagatttatattgaatcccccacagcggtccacgccccttgccaacttccttccactatcctggttctgttgttactcctgccgactgcagtgctgttccgtgagcttcttgaatgacatcgtacagtatctccgacgcacaggttcatagtggcgtcatgcacgcagactcctgcaagttcccctaagttcttagaggactgctttgccttttgatctgagagttgcaaagttccataaagaatggccctt

SEQ ID NO: 122959 - DNA, 1918 bp, Homo sapiens
  Payload ID: 4142
  Gene Symbol: CTBP2
  Gene Name: C-terminal binding protein 2
  Uniprot ID: P56545
  ENST ID: ENST00000531469
  CDS Start-End: 288-1625
aaatccccgctctgcgtgctcgtggtggaggctgctggcaatggcctacgtcgtcataccgggcttccttgccctgtccgggggtttcatcaccttaaatggttttgaaccaatgaaggtgtattcccttaaaaagacggacagcccatcgtgtgaactatagagtttgtggacagatttatattgggttcatagtggcgtcatgcacgcagactcctgcaagttcccctaagttcttagaggactgctttgccttttgatctgagagttgcaaagttccataaagaatggcccttgtggataagcacaaagtcaagagacagcgattggacagaatttgtgaaggtatccgcccccagatcatgaacggccccctgcacccccgccccctggtggcgctgctggacggccgcgactgcactgtggagatgcccatcctgaaggacctggccactgtggccttctgtgacgcgcagtcgacgcaggaaatccacgagaaggttctaaacgaagccgtgggcgccatgatgtaccacaccatcaccctcaccagggaggacctggagaagttcaaggccctgagagtgatcgtgcggataggcagtggctatgacaacgtggacatcaaggctgccggcgagctcggaattgccgtgtgcaacatcccgtctgcagccgtggaagagacagcggactctaccatctgccacatcctcaacctgtaccggaggaacacgtggctgtaccaggcactgcgggaaggcacgcgggttcagagcgtggagcagatccgcgaggtggcctcgggagcggcccgcatccgtggggagacgctgggcctcattggctttggtcgcacggggcaggcggttgcagttcgagccaaggcctttggattcagcgtcatattttatgacccctacttgcaggatgggatcgagcggtccctgggcgtgcagagggtctacaccctgcaggatttgctgtatcagagcgactgcgtctccttgcactgcaatctcaacgaacataaccaccacctcatcaatgactttaccataaagcagatgaggcagggagcattccttgtgaacgcagcccgtggcggcctggtggacgagaaagccttagcacaagccctcaaggagggcaggatacgaggggcagccctcgacgtgcatgagtcagagcccttcagctttgctcagggtccgttgaaagatgccccgaatctcatctgcactcctcacactgcctggtacagtgagcaggcgtcactggagatgagggaggcagctgccaccgagatccgccgagccatcacaggtcgcatcccagaaagcttaagaaattgtgtgaacaaggaattctttgtcacatcagcgccttggtcagtaatagaccagcaagcaattcatcctgagctcaatggtgccacatacagatatccgccaggcatcgtgggtgtggctccaggaggacttcctgcagccatggaagggatcatccctggaggcatcccagtgactcacaacctcccgacagtggcacatccttcccaagcgccctctcccaaccagcccacaaaacacggggacaatcgagagcaccccaacgagcaatagcagagaatgccagaaggtaatcactcagatacacttgggaccaagagacagtgaaaaatagatgaactaagagaaaaagaatcggatggtctttgtaactgattctggacatatgcatcattgatgttgcagtgttgaaactacaagagctagaaaactgaagatgtcgtctgcttacggaagcgctgaaagactaggatgtgatttattaacgaccaacttctgttattgtgtgttaagtttttcatctgtgcatcaaatcacaaaaagaataaatagagctttttccttta

SEQ ID NO: 122960 - DNA, 2014 bp, Homo sapiens
  Payload ID: 4142
  Gene Symbol: CTBP2
  Gene Name: C-terminal binding protein 2
  Uniprot ID: P56545
  ENST ID: ENST00000494626
  CDS Start-End: 384-1721
ggagccggcggcggcccgaggagcgagggaccgaaccgggagccatgccgcgctgagggggggccgcacagccgccgccaccgccaccgccgccgggtggggtgggaggggcgggagacgccgccgccgccgcctccagggtgggcgcctttcgccgtggacgccgaccgtccgggacgagatggagaaaacaaaggattcagattgaaggactgctcagacaccctccgaagaggtggccctgcctgcgctcctcctggctgcagagtaccccaccagcgcggttcatagtggcgtcatgcacgcagactcctgcaagttcccctaagttcttagaggactgctttgccttttgatctgagagttgcaaagttccataaagaatggcccttgtggataagcacaaagtcaagagacagcgattggacagaatttgtgaaggtatccgcccccagatcatgaacggccccctgcacccccgccccctggtggcgctgctggacggccgcgactgcactgtggagatgcccatcctgaaggacctggccactgtggccttctgtgacgcgcagtcgacgcaggaaatccacgagaaggttctaaacgaagccgtgggcgccatgatgtaccacaccatcaccctcaccagggaggacctggagaagttcaaggccctgagagtgatcgtgcggataggcagtggctatgacaacgtggacatcaaggctgccggcgagctcggaattgccgtgtgcaacatcccgtctgcagccgtggaagagacagcggactctaccatctgccacatcctcaacctgtaccggaggaacacgtggctgtaccaggcactgcgggaaggcacgcgggttcagagcgtggagcagatccgcgaggtggcctcgggagcggcccgcatccgtggggagacgctgggcctcattggctttggtcgcacggggcaggcggttgcagttcgagccaaggcctttggattcagcgtcatattttatgacccctacttgcaggatgggatcgagcggtccctgggcgtgcagagggtctacaccctgcaggatttgctgtatcagagcgactgcgtctccttgcactgcaatctcaacgaacataaccaccacctcatcaatgactttaccataaagcagatgaggcagggagcattccttgtgaacgcagcccgtggcggcctggtggacgagaaagccttagcacaagccctcaaggagggcaggatacgaggggcagccctcgacgtgcatgagtcagagcccttcagctttgctcagggtccgttgaaagatgccccgaatctcatctgcactcctcacactgcctggtacagtgagcaggcgtcactggagatgagggaggcagctgccaccgagatccgccgagccatcacaggtcgcatcccagaaagcttaagaaattgtgtgaacaaggaattctttgtcacatcagcgccttggtcagtaatagaccagcaagcaattcatcctgagctcaatggtgccacatacagatatccgccaggcatcgtgggtgtggctccaggaggacttcctgcagccatggaagggatcatccctggaggcatcccagtgactcacaacctcccgacagtggcacatccttcccaagcgccctctcccaaccagcccacaaaacacggggacaatcgagagcaccccaacgagcaatagcagagaatgccagaaggtaatcactcagatacacttgggaccaagagacagtgaaaaatagatgaactaagagaaaaagaatcggatggtctttgtaactgattctggacatatgcatcattgatgttgcagtgttgaaactacaagagctagaaaactgaagatgtcgtctgcttacggaagcgctgaaagactaggatgtgatttattaacgaccaacttctgttattgtgtgttaagtttttcatctgtgcatcaaatcacaaaaagaataaatagagctttttccttta

SEQ ID NO: 122961 - DNA, 580 bp, Homo sapiens
  Payload ID: 4142
  Gene Symbol: CTBP2
  Gene Name: C-terminal binding protein 2
  ENST ID: ENST00000395705
  CDS Start-End: 1-352
tggctatgacaacgtggacatcaaggctgccggcgagctcggaattgccgtgtgcaacatcccgtctgcagccgtggaagagacagcggactctaccatctgccacatcctcaacctgtaccggaggaacacgtggctgtaccaggcactgcgggaaggcacgcgggttcagagcgtggagcagatccgcgaggtggcctcgggagcggcccgcatccgtggggagacgctgggcctcattggctttggatgggatcgagcggtccctgggcgtgcagagggtctacaccctgcaggatttgctgtatcagagcgactgcgtctccttgcactgcaatctcaacgaacataaccaccacctcatcaatgactttaccataaagcagatgaggcagggagcattccttgtgaacgcagcccgtggcggcctggtggacgagaaagccttagcacaagccctcaaggagggcaggatacgaggggcagccctcgacgtgcatgagtcagagcccttcagctttgctcagggtccgttgaaagatgccccgaatctcatctgcactcctcacactgcctggta

SEQ ID NO: 122962 - DNA, 2037 bp, Homo sapiens
  Payload ID: 4143
  Gene Symbol: CTPS1
  Gene Name: CTP synthase 1
  Uniprot ID: P17812
  ENST ID: ENST00000372616
  CDS Start-End: 131-1906
gaaactgaggcttcaagagggttcatagctaataattggcagagccagtgtttgaacccagatgagtttggtttgttgagatacatttatatcatctgtaatttttccttcttccaggtcaaagagtaaaatgaagtacattctggttactggtggtgttatatcaggaattggaaaaggaatcattgccagcagtgtgggcacaatactcaagtcatgtggtttacatgtaacttcaatcaaaattgacccctacattaacattgatgcaggaacattctctccttatgagcatggtgaggtttttgtgctggatgatggtggggaagtagaccttgacctgggtaactatgagcggttccttgacatccgcctcaccaaggacaataatctgaccactggaaagatataccagtatgtcattaacaaggaacggaaaggagattacttggggaaaactgtccaagttgtccctcatatcacagatgcaatccaggagtgggtgatgagacaggcgttaatacctgtagatgaagatggcctggaacctcaagtgtgtgttattgagcttggtggaaccgtgggggacatagaaagcatgccctttattgaggccttccgtcagttccaattcaaggtcaaaagagagaacttttgtaacatccacgtcagtctagttccccagccaagttcaacaggggaacagaagactaaacctacccagaatagtgttcgggaacttagaggacttgggctttccccagatctggttgtatgcaggtgctcaaatccacttgacacatcagtgaaggagaaaatatcaatgttctgccatgttgagcctgaacaagtgatctgtgtccacgatgtctcatccatctaccgagtccccttgttgttagaggagcaaggggttgtagattattttcttcgaagacttgaccttcctattgagaggcagccaagaaaaatgctgatgaaatggaaagagatggctgacagatatgatcgcttgctggagacctgctctattgcccttgtgggcaaatacacgaagttctcagactcctatgcctctgtcattaaggctctggagcattctgcactggccatcaaccacaaattggaaatcaagtacatagattctgcggacttggagcccatcacctcgcaagaagagcccgtgcgctaccacgaagcttggcagaagctctgtagtgctcatggagtgctggttccaggaggatttggtgttcgaggaacagaaggaaaaatccaagcaattgcctgggctcggaatcagaaaaagccttttttgggcgtgtgcttagggatgcagttggcagtggttgaattctcaagaaacgtgctgggatggcaagatgccaattctacagagtttgaccctacgaccagtcatcccgtggtcgtagacatgccagaacacaacccagggcagatgggcggaaccatgaggctgggcaagaggagaaccctgttccagaccaagaactcagtcatgaggaaactctatggagacgcagactacttggaagagaggcaccgccaccgatttgaggtgaatccagtctggaaaaagtgtttggaagaacaaggcttgaagtttgttggccaagatgttgaaggagagagaatggaaattgtggagttagaagatcatcccttttttgttggggttcagtaccaccctgagttcctgtccaggcctatcaagccctccccaccatactttggcctcctcctggcctctgtggggcggctctcacattacctccagaaaggctgcaggctctcacccagggacacctatagtgacaggagtggaagcagctcccctgactctgaaatcaccgaactgaagtttccatcaataaatcatgactgatcttgtagcggatgattcttcaagagacccttcaaacttgggtagagtttacagctctgactttacactcggctttggagactttctttaaattatgtttttattaagattattttattatgcggaaaggt

SEQ ID NO: 122963 - DNA, 3201 bp, Homo sapiens
  Payload ID: 4143
  Gene Symbol: CTPS1
  Gene Name: CTP synthase 1
  Uniprot ID: P17812
  ENST ID: ENST00000372621
  CDS Start-End: 509-2284
tccctcgcccggaggcagagatgcgctggcgcatcaccgccaggagcccacagtgaaagaccatcggatggaaggcgacgcccagaactccaggagaccgctgtgggaggacgcgaggccaggtgacgaataggccaggcgtgagttcccaaacagcctcctccccttcaagagagtaagcttgggccacaggctgggacggaagcagaggggcagacacgccaccacccgcccggcctcgaacctacggcggcacagttcagcggaggcggcccagcggtcctgtcccgcgcctgcgcactccaggccccgccccgccccgcgccctccaggcccggcccgccctccaacctctgcgtgcgcacagcctagagcccgcctccgtgaaagactgccgggcgcatgcggtcggggttgttcactggctgtccggggctccgcgcgcgtcgccggcccagctctgtcgctgacgggaggatctgaagccggccgcaggtcaaagagtaaaatgaagtacattctggttactggtggtgttatatcaggaattggaaaaggaatcattgccagcagtgtgggcacaatactcaagtcatgtggtttacatgtaacttcaatcaaaattgacccctacattaacattgatgcaggaacattctctccttatgagcatggtgaggtttttgtgctggatgatggtggggaagtagaccttgacctgggtaactatgagcggttccttgacatccgcctcaccaaggacaataatctgaccactggaaagatataccagtatgtcattaacaaggaacggaaaggagattacttggggaaaactgtccaagttgtccctcatatcacagatgcaatccaggagtgggtgatgagacaggcgttaatacctgtagatgaagatggcctggaacctcaagtgtgtgttattgagcttggtggaaccgtgggggacatagaaagcatgccctttattgaggccttccgtcagttccaattcaaggtcaaaagagagaacttttgtaacatccacgtcagtctagttccccagccaagttcaacaggggaacagaagactaaacctacccagaatagtgttcgggaacttagaggacttgggctttccccagatctggttgtatgcaggtgctcaaatccacttgacacatcagtgaaggagaaaatatcaatgttctgccatgttgagcctgaacaagtgatctgtgtccacgatgtctcatccatctaccgagtccccttgttgttagaggagcaaggggttgtagattattttcttcgaagacttgaccttcctattgagaggcagccaagaaaaatgctgatgaaatggaaagagatggctgacagatatgatcgcttgctggagacctgctctattgcccttgtgggcaaatacacgaagttctcagactcctatgcctctgtcattaaggctctggagcattctgcactggccatcaaccacaaattggaaatcaagtacatagattctgcggacttggagcccatcacctcgcaagaagagcccgtgcgctaccacgaagcttggcagaagctctgtagtgctcatggagtgctggttccaggaggatttggtgttcgaggaacagaaggaaaaatccaagcaattgcctgggctcggaatcagaaaaagccttttttgggcgtgtgcttagggatgcagttggcagtggttgaattctcaagaaacgtgctgggatggcaagatgccaattctacagagtttgaccctacgaccagtcatcccgtggtcgtagacatgccagaacacaacccagggcagatgggcggaaccatgaggctgggcaagaggagaaccctgttccagaccaagaactcagtcatgaggaaactctatggagacgcagactacttggaagagaggcaccgccaccgatttgaggtgaatccagtctggaaaaagtgtttggaagaacaaggcttgaagtttgttggccaagatgttgaaggagagagaatggaaattgtggagttagaagatcatcccttttttgttggggttcagtaccaccctgagttcctgtccaggcctatcaagccctccccaccatactttggcctcctcctggcctctgtggggcggctctcacattacctccagaaaggctgcaggctctcacccagggacacctatagtgacaggagtggaagcagctcccctgactctgaaatcaccgaactgaagtttccatcaataaatcatgactgatcttgtagcggatgattcttcaagagacccttcaaacttgggtagagtttacagctctgactttacactcggctttggagactttctttaaattatgtttttattaagattattttattatgcggaaaggtatttgggaaacttgtcacttgcatgtcccatcacgtgtactggctcctctgtggtgtctgcctgttgcgtgacactctccttgcagttcttgagttgcggcagaacatcgcgatgggaaccgatggtgggtggggctgcagagtgccccatcggtcaccttgtttctcaactacctcgcatcattgcagatgctagcgcgttgcctgtcgctttcccttggatacctagaccgttataaagtgtgccacatggacttaccgagcatggagagaggattttagctaggatttgaacacttggtgctgggaacctcagggtattgcttgccactaagccatgaaaccagagacaaaatctctatactgccctgagttggggggaattctcagtgccaactgtggctggtcctcattcaaagggacggtcagtttggtgtcaacatgaaacaccaagatgtctgtctctgaagcgtgattttaaaatccccatgcctgtggctgcgcttcctatttctagggctgggaaacactccttgcatcaaggggtcacttacagaacaaagaatcttttgggggaaacttcctctaaaaccctctcatatatagacagctttgactggagggtccatttttcttccaggatggtgttactgcagttgaaagggcaatatgaagttactttcttaatgtgacctagcaataggcatagctacgtggcactatattctggccagactcgatgtgtactctaacttaagaaataaatcagtaaggcagaacaagaga

SEQ ID NO: 122964 - DNA, 3629 bp, Homo sapiens
  Payload ID: 4144
  Gene Symbol: CTPS2
  Gene Name: CTP synthase 2
  Uniprot ID: Q9NRF8
  ENST ID: ENST00000359276
  CDS Start-End: 358-2118
gggtgacgggagctgcctgtgctggaggaatcactttttaggcgcttgttttggaccattgcacaaacccgggtgcaaaccccaagctcaccagcgtgagtgagctgggccagcagcagggaggagaggggaaggtgggcgaggagggcgccgcgcaccccgaggcccgtgtgggcggtgggaagatcccgggggcggctttggacagccccggcagcgaccccttccccagcccgacaggtgagcgccaggccagccgcggggtggagcccgccgtgcccaccggccaccctccccggtgctaccaccaccgcgcagattatatctgggtgttggcacccagccactattctgccaatgaagtacatcctggtcacgggtggggtcatctcaggcattggtaaagggatcattgccagcagcattggaacgattctaaaatcatgtggactccgagttactgccataaaaatcgacccctatattaacatcgatgctggcactttttcaccttatgaacacggtgaagtcttcgtcttaaatgatggtggagaagttgatttagaccttggaaattatgaaagatttttggatattaatctttataaagacaacaatatcaccacggggaagatatatcagcatgtgatcaataaagagaggcgtggtgattacctggggaaaacagtgcaagttgtccctcacattactgatgctgtccaggagtgggttatgaatcaagccaaggtgccggtggatggtaataaggaagagccccaaatatgcgttattgagctgggaggcaccattggagacatcgaaggaatgccgtttgtggaggcgtttagacaattccagtttaaggcgaaaagagagaatttctgtaatatccacgttagccttgtcccacagctcagtgctaccggagaacaaaaaaccaaacccacccaaaacagcgtccgcgcactgaggggtttaggcctgtctccagatctgattgtctgccgaagttcaacgcccattgagatggccgtgaaggagaagatttctatgttttgtcacgtgaaccctgaacaggtcatatgtatccatgatgtttcttccacataccgagttcctgtgcttttagaggaacaaagcattgtgaaatattttaaggagagattgcacctgcccatcggtgattctgcaagtaatttgctttttaagtggagaaatatggctgacaggtatgaaaggttacagaaaatatgctccatagccctggttggcaaatacaccaagctcagagactgctacgcctctgtgttcaaagccctggaacactcagccctggccatcaaccacaagttgaatctgatgtacatagactccattgatctggagaagatcactgaaaccgaggaccctgtgaaatttcatgaagcttggcagaagctatgcaaagctgatggtattcttgtgcctggaggctttggaatcagaggaacattgggaaaactccaggcgatttcttgggcaaggacaaagaagattccttttctgggagtttgtcttgggatgcaactagcagtgatagagtttgcaagaaactgccttaacttgaaagatgctgattccacagagtttaggccaaatgccccagttcctctggtgattgatatgcccgagcacaaccctggcaatttgggaggaacaatgagactgggaataagaagaactgttttcaaaactgaaaattcaatattaaggaaactttatggtgatgttccttttatagaagaaagacacagacatcggttcgaggtaaaccctaacctgatcaaacaatttgagcagaatgacttaagttttgtaggtcaggatgttgatggagacaggatggaaatcattgaactggcaaatcatccttattttgttggtgtccagttccatcctgagttttcttctaggccgatgaagccttcccctccgtatctggggctgttacttgcagcaactgggaacctgaatgcctacttgcaacagggttgcaaactgtcttccagtgatagatacagtgatgccagtgatgacagcttttcagagccaaggatagctgagttggaaataagctgaaatgaatacatgactgggaataatggggactgcctgtgaggcctctgaaataattgaaggcaagatgaaggaactatctgaagaaatcactacactcttagagaatccctctgttctccagcaaacatgggatgtaaagcctcacagggaatctgataatacatacttctgtcaaccagaaccagaggggtagttttcttttccctccagaggcagcctttggtacttaaaatatctgtagctgattaaatttttcccaacaacctcactggggagaaagtgtgttcatgttttgtccagcggatcaggatgttaggatgacgagcaagagtccaggtcactgtgcctttgctgtgttgtatggaaaggatggcagggaacatgctgtaagtaattttgagtaagaaaatgagtcactgtgttacctggaactcagccacagatttgtgtgtggtccaagatcattgcagtttctcaccctgtttatttcctggtaaaagtaaaattgaataggtccaagacttgggggtggcaagtaaggctttgcctcaggcacaaaatttaagggggctccaaaaaactcaggaatcaagatcagcaatacagtctgagtatcccttatgtgaaatgcttggggctagaagtgttttgaatttcagattttggaatatttgcatatacatgcgatatcttggggatgagactcaagactaaacatgaaattcatttatgcttcatatacaccttatatacatagcctaaaggtaatttgatacaatattttaaataattttgtgcatgaaacaaagtttcgactgcattttgactgtgatttctggcatgagatcagttatggaattttccacttctagcgtcatgttggcattcagaaattttgaaattttggagcattttggattttcagattagggatgctcaacctgtatatatattttttaatcgacgtgaaattcacgtaacatagaattaaccattttgaagtgaacaatttggttgcattcactgatgttgagcaaccaccacctttaactatttccaaaacattttcatcactccaaaataaatgcctgtacacactagcagtcactccctatcttcccctccacctgtccgctggcaaccactgatctcctttttatttctgtggctttttctattctggatatttcatataagtggaattacacaatatatgtggtcttttgtgtctggcttcttctgagacagtaggaaggggggcttggctttggctcacccccactagagcattttttcatgcattcccactgatcacaaaacccatactactacctcattgacaccatacctgctaacctcgaggctttagtcatacaaagaaaatggcctttctgtattgttcttctgtgctctcataatgcttaaccatgtcttttacttaaacaattccaggaactggccttaggagatccaaatagggaaccaagattgcagagtgtcccatcttggga

SEQ ID NO: 122965 - DNA, 3526 bp, Homo sapiens
  Payload ID: 4144
  Gene Symbol: CTPS2
  Gene Name: CTP synthase 2
  Uniprot ID: Q9NRF8
  ENST ID: ENST00000380241
  CDS Start-End: 255-2015
aaaggcaggcattctctttccttttccttctctcctgagcgctcctgcagttcctggggcgtagtaggggatccacaagcgtttgtgaccagtgaagttctttacaagggtgagatctgcacgggaggacccgagcgagggtctcggcttgccaggaagccggggttccccgggaagcgtggagttcacccgcgcactcgaagtgcctttgcaaaattatatctgggtgttggcacccagccactattctgccaatgaagtacatcctggtcacgggtggggtcatctcaggcattggtaaagggatcattgccagcagcattggaacgattctaaaatcatgtggactccgagttactgccataaaaatcgacccctatattaacatcgatgctggcactttttcaccttatgaacacggtgaagtcttcgtcttaaatgatggtggagaagttgatttagaccttggaaattatgaaagatttttggatattaatctttataaagacaacaatatcaccacggggaagatatatcagcatgtgatcaataaagagaggcgtggtgattacctggggaaaacagtgcaagttgtccctcacattactgatgctgtccaggagtgggttatgaatcaagccaaggtgccggtggatggtaataaggaagagccccaaatatgcgttattgagctgggaggcaccattggagacatcgaaggaatgccgtttgtggaggcgtttagacaattccagtttaaggcgaaaagagagaatttctgtaatatccacgttagccttgtcccacagctcagtgctaccggagaacaaaaaaccaaacccacccaaaacagcgtccgcgcactgaggggtttaggcctgtctccagatctgattgtctgccgaagttcaacgcccattgagatggccgtgaaggagaagatttctatgttttgtcacgtgaaccctgaacaggtcatatgtatccatgatgtttcttccacataccgagttcctgtgcttttagaggaacaaagcattgtgaaatattttaaggagagattgcacctgcccatcggtgattctgcaagtaatttgctttttaagtggagaaatatggctgacaggtatgaaaggttacagaaaatatgctccatagccctggttggcaaatacaccaagctcagagactgctacgcctctgtgttcaaagccctggaacactcagccctggccatcaaccacaagttgaatctgatgtacatagactccattgatctggagaagatcactgaaaccgaggaccctgtgaaatttcatgaagcttggcagaagctatgcaaagctgatggtattcttgtgcctggaggctttggaatcagaggaacattgggaaaactccaggcgatttcttgggcaaggacaaagaagattccttttctgggagtttgtcttgggatgcaactagcagtgatagagtttgcaagaaactgccttaacttgaaagatgctgattccacagagtttaggccaaatgccccagttcctctggtgattgatatgcccgagcacaaccctggcaatttgggaggaacaatgagactgggaataagaagaactgttttcaaaactgaaaattcaatattaaggaaactttatggtgatgttccttttatagaagaaagacacagacatcggttcgaggtaaaccctaacctgatcaaacaatttgagcagaatgacttaagttttgtaggtcaggatgttgatggagacaggatggaaatcattgaactggcaaatcatccttattttgttggtgtccagttccatcctgagttttcttctaggccgatgaagccttcccctccgtatctggggctgttacttgcagcaactgggaacctgaatgcctacttgcaacagggttgcaaactgtcttccagtgatagatacagtgatgccagtgatgacagcttttcagagccaaggatagctgagttggaaataagctgaaatgaatacatgactgggaataatggggactgcctgtgaggcctctgaaataattgaaggcaagatgaaggaactatctgaagaaatcactacactcttagagaatccctctgttctccagcaaacatgggatgtaaagcctcacagggaatctgataatacatacttctgtcaaccagaaccagaggggtagttttcttttccctccagaggcagcctttggtacttaaaatatctgtagctgattaaatttttcccaacaacctcactggggagaaagtgtgttcatgttttgtccagcggatcaggatgttaggatgacgagcaagagtccaggtcactgtgcctttgctgtgttgtatggaaaggatggcagggaacatgctgtaagtaattttgagtaagaaaatgagtcactgtgttacctggaactcagccacagatttgtgtgtggtccaagatcattgcagtttctcaccctgtttatttcctggtaaaagtaaaattgaataggtccaagacttgggggtggcaagtaaggctttgcctcaggcacaaaatttaagggggctccaaaaaactcaggaatcaagatcagcaatacagtctgagtatcccttatgtgaaatgcttggggctagaagtgttttgaatttcagattttggaatatttgcatatacatgcgatatcttggggatgagactcaagactaaacatgaaattcatttatgcttcatatacaccttatatacatagcctaaaggtaatttgatacaatattttaaataattttgtgcatgaaacaaagtttcgactgcattttgactgtgatttctggcatgagatcagttatggaattttccacttctagcgtcatgttggcattcagaaattttgaaattttggagcattttggattttcagattagggatgctcaacctgtatatatattttttaatcgacgtgaaattcacgtaacatagaattaaccattttgaagtgaacaatttggttgcattcactgatgttgagcaaccaccacctttaactatttccaaaacattttcatcactccaaaataaatgcctgtacacactagcagtcactccctatcttcccctccacctgtccgctggcaaccactgatctcctttttatttctgtggctttttctattctggatatttcatataagtggaattacacaatatatgtggtcttttgtgtctggcttcttctgagacagtaggaaggggggcttggctttggctcacccccactagagcattttttcatgcattcccactgatcacaaaacccatactactacctcattgacaccatacctgctaacctcgaggctttagtcatacaaagaaaatggcctttctgtattgttcttctgtgctctcataatgcttaaccatgtcttttacttaaacaattccaggaactggccttaggagatccaaatagggaaccaagattgcagagtgtcccatcttggga

SEQ ID NO: 122966 - DNA, 733 bp, Homo sapiens
  Payload ID: 4144
  Gene Symbol: CTPS2
  Gene Name: CTP synthase 2
  ENST ID: ENST00000455276
  CDS Start-End: 1-398
tgggaaaactccaggcgatttcttgggcaaggacaaagaagattccttttctgggagtttgtcttgggatgcaactagcagtgatagagtttgcaagaaactgccttaacttgaaagatgctgattccacagagtttaggccaaatgccccagttcctctggtgattgatatgcccgagcacaaccctggcaatttgggaggaacaatgagactgggaataagaagaactgttttcaaaactgaaaattcaatattaataagcttgtcccttgggctggcctcagtagaacacactgaatgcccctccgcatttgatctgcgtgactccctgttcattgggctgttttgtgagttaccgatgctcctggagatgaacttggactgggacttggactgattcacactcagttcttttgaatccacagttctctccattacatttgaaccggttccctgtttaatgtctgtttgcctggtcttagtgactcacaaatgaacttccgagtaggagggcagttatgcacctcagaagcgtatttctctgttccctggcagccccagtgtggggagatggctcgccatttgatatttgctgatctttccactccccataaggttaattctaatttctgtggaactttttcataaattagcatattatataagaataacttattgtttaaaacaaactaaagcctttaattcaatttaataaatgtatcttgagtgccc

SEQ ID NO: 122967 - DNA, 4319 bp, Homo sapiens
  Payload ID: 4144
  Gene Symbol: CTPS2
  Gene Name: CTP synthase 2
  Uniprot ID: Q9NRF8
  ENST ID: ENST00000443824
  CDS Start-End: 745-2505
tcctttgtccgctctctgatggcgccggctccctgcccagcgctgagtcgggtccggccgccagccccgcgctcgcagacctcggctgccgggtgtggcgcggggactggggaacgctggcccgtgcccagtgcggttggagcctgtcccgcgcgtccccgggacgcgcttcttcccgcctccgcccgcgccagcgcccgcacccggatccccacttctcccggccctcgggagccaggagagccctgagatggcgttggcggaagtgaagccccgagcgggggtctgcgaggctggtgatcagcgccggtaacatggcctttctgtcctctccccggtcccagtgcaccccttaaacaacgacccccgcgttttccccgtactagatggttagggcgcatagtgccgaactacgctgctgctacagaatagcttttttgggggcaacataaaaaagaattgtatgtatggtttatatacaacaaaatgtcccattttcagtgtgcaaatcgacgggatttgacaaattatacactcctgtaaccattatcccaaagtgaacattgaccatttccttcaccctgcaaagttccctggtacctcctttctgtcaatccaccccaggccccgcactcaaccccggttctgattgttatcatagcttagctttgactgttctagaacttcatagaacaagatcatcagattatatctgggtgttggcacccagccactattctgccaatgaagtacatcctggtcacgggtggggtcatctcaggcattggtaaagggatcattgccagcagcattggaacgattctaaaatcatgtggactccgagttactgccataaaaatcgacccctatattaacatcgatgctggcactttttcaccttatgaacacggtgaagtcttcgtcttaaatgatggtggagaagttgatttagaccttggaaattatgaaagatttttggatattaatctttataaagacaacaatatcaccacggggaagatatatcagcatgtgatcaataaagagaggcgtggtgattacctggggaaaacagtgcaagttgtccctcacattactgatgctgtccaggagtgggttatgaatcaagccaaggtgccggtggatggtaataaggaagagccccaaatatgcgttattgagctgggaggcaccattggagacatcgaaggaatgccgtttgtggaggcgtttagacaattccagtttaaggcgaaaagagagaatttctgtaatatccacgttagccttgtcccacagctcagtgctaccggagaacaaaaaaccaaacccacccaaaacagcgtccgcgcactgaggggtttaggcctgtctccagatctgattgtctgccgaagttcaacgcccattgagatggccgtgaaggagaagatttctatgttttgtcacgtgaaccctgaacaggtcatatgtatccatgatgtttcttccacataccgagttcctgtgcttttagaggaacaaagcattgtgaaatattttaaggagagattgcacctgcccatcggtgattctgcaagtaatttgctttttaagtggagaaatatggctgacaggtatgaaaggttacagaaaatatgctccatagccctggttggcaaatacaccaagctcagagactgctacgcctctgtgttcaaagccctggaacactcagccctggccatcaaccacaagttgaatctgatgtacatagactccattgatctggagaagatcactgaaaccgaggaccctgtgaaatttcatgaagcttggcagaagctatgcaaagctgatggtattcttgtgcctggaggctttggaatcagaggaacattgggaaaactccaggcgatttcttgggcaaggacaaagaagattccttttctgggagtttgtcttgggatgcaactagcagtgatagagtttgcaagaaactgccttaacttgaaagatgctgattccacagagtttaggccaaatgccccagttcctctggtgattgatatgcccgagcacaaccctggcaatttgggaggaacaatgagactgggaataagaagaactgttttcaaaactgaaaattcaatattaaggaaactttatggtgatgttccttttatagaagaaagacacagacatcggttcgaggtaaaccctaacctgatcaaacaatttgagcagaatgacttaagttttgtaggtcaggatgttgatggagacaggatggaaatcattgaactggcaaatcatccttattttgttggtgtccagttccatcctgagttttcttctaggccgatgaagccttcccctccgtatctggggctgttacttgcagcaactgggaacctgaatgcctacttgcaacagggttgcaaactgtcttccagtgatagatacagtgatgccagtgatgacagcttttcagagccaaggatagctgagttggaaataagctgaaatgaatacatgactgggaataatggggactgcctgtgaggcctctgaaataattgaaggcaagatgaaggaactatctgaagaaatcactacactcttagagaatccctctgttctccagcaaacatgggatgtaaagcctcacagggaatctgataatacatacttctgtcaaccagaaccagaggggtagttttcttttccctccagaggcagcctttggtacttaaaatatctgtagctgattaaatttttcccaacaacctcactggggagaaagtgtgttcatgttttgtccagcggatcaggatgttaggatgacgagcaagagtccaggtcactgtgcctttgctgtgttgtatggaaaggatggcagggaacatgctgtaagtaattttgagtaagaaaatgagtcactgtgttacctggaactcagccacagatttgtgtgtggtccaagatcattgcagtttctcaccctgtttatttcctggtaaaagtaaaattgaataggtccaagacttgggggtggcaagtaaggctttgcctcaggcacaaaatttaagggggctccaaaaaactcaggaatcaagatcagcaatacagtctgagtatcccttatgtgaaatgcttggggctagaagtgttttgaatttcagattttggaatatttgcatatacatgcgatatcttggggatgagactcaagactaaacatgaaattcatttatgcttcatatacaccttatatacatagcctaaaggtaatttgatacaatattttaaataattttgtgcatgaaacaaagtttcgactgcattttgactgtgatttctggcatgagatcagttatggaattttccacttctagcgtcatgttggcattcagaaattttgaaattttggagcattttggattttcagattagggatgctcaacctgtatatatattttttaatcgacgtgaaattcacgtaacatagaattaaccattttgaagtgaacaatttggttgcattcactgatgttgagcaaccaccacctttaactatttccaaaacattttcatcactccaaaataaatgcctgtacacactagcagtcactccctatcttcccctccacctgtccgctggcaaccactgatctcctttttatttctgtggctttttctattctggatatttcatataagtggaattacacaatatatgtggtcttttgtgtctggcttcttctgagacagtaggaaggggggcttggctttggctcacccccactagagcattttttcatgcattcccactgatcacaaaacccatactactacctcattgacaccatacctgctaacctcgaggctttagtcatacaaagaaaatggcctttctgtattgttcttctgtgctctcataatgcttaaccatgtcttttacttaaacaattccaggaactggccttaggagatccaaatagggaaccaagattgcagagtgtcccatcttgggagggaatgctgaataattaattgatttacagccttgttgccgctggccagaccaccaggtggcccattactcgagatgatcatcacaaccagatgatgctaacctatatcctctacccttcgcgtgctttgtctgggaagtcttttggccccatgtcagtttctattgcattgagagcccaagagcccctggtcagtcaggcttccatttagcatggcgtttgcaaggtttacccatgttgtagcatgtgtcagaatttcattcctttctatggctgaataaaattccattgtatgaatatacc

SEQ ID NO: 122968 - DNA, 4586 bp, Homo sapiens
  Payload ID: 4145
  Gene Symbol: CTR9
  Gene Name: CTR9 homolog, Paf1/RNA polymerase II complex component
  Uniprot ID: Q6PD62
  ENST ID: ENST00000361367
  CDS Start-End: 427-3948
accaagcggctacgccttccaagttttcattcggggccgcgccagcgctgaggagagtcagacgccagatggttccgaaggtcctgcaggctctcggggcaccctacagccgacacgccaacaaaagcttcggagccgccaaccccaaaacggaaacaccggagccacaagctgagctcgcgtagggcacgctcccccgggagtgcttccgggacagggggcggggtcgccggaagtggccgtccgccgtccgctgctcgttgtttaagcggctgacgggaaggagaagccagagctccagcggcgccgcggggcggcagtcaagaccagagccggagccgtcactcacctctggattagcctgaagcggagactaccggctgcggagcggcggggcgagacacttgctcgccttttgaccccatcatgtcgcggggctccatcgagattcccctccgggacactgacgaggtcattgaacttgacttcgatcagttaccggagggagatgaagttatcagtattctgaaacaggaacacacacaactgcacatatggattgctttggcgctggaatactacaagcaaggaaaaacagaagagtttgtaaaattgttggaagcagcacgtatagatggcaatttggactatagagaccatgaaaaagaccagatgacttgcttggatacattggcagcgtattatgtacaacaggctcggaaagaaaagaataaggacaataaaaaggatcttattacacaggccaccttgttgtatacaatggccgataaaattattatgtatgatcagaaccatttgttgggaagagcctgcttctgcctacttgagggtgacaaaatggatcaagctgatgcacagtttcattttgtactcaatcagtctccaaataatattccagcccttcttggtaaagcttgcatttccttcaacaagaaggattacagaggagctcttgcttactataagaaagcattgcgtactaacccaggatgtccagcggaagttcgtttaggaatgggtcattgctttgtgaaacttaacaaactggaaaaagctcgtctggcattcagcagagccctggaactcaattccaaatgcgtgggagcattggttggactggctgttctagaactcaacaataaagaggctgattccattaaaaatggtgtccagcttctttccagagcctatactattgatcctagcaaccctatggtattgaaccatttggcaaatcactttttcttcaaaaaggattatagtaaagtccagcatctggccctccatgcattccataatacagaagtggaagctatgcaagcagagagctgctatcagctagctagatcattccatgttcaggaagattatgaccaagcttttcagtactattatcaagccacacagtttgcctcatcctcttttgtgctcccattttttggtttgggacaaatgtatatttatcgaggtgacaaagaaaatgcatctcagtgctttgagaaggttttgaaagcttatcctaataattacgaaactatgaaaattctcggctctctctatgctgcctcagaagatcaagaaaaacgagatattgccaagggccatttgaagaaggtcacagaacagtatcccgatgatgttgaagcttggattgaattggcacaaatcttagaacagactgatatacagggtgccctttcagcctatggaacagcaacacgaatccttcaggagaaagtgcaggccgatgttcctccagagattctcaataatgtgggtgccctccattttagacttggaaacctaggggaggctaagaaatattttttggcgtcattggaccgtgcaaaagcagaagcggaacacgatgagcattactataacgccatttccgttaccacgtcatataatctcgccaggctatatgaggcgatgtgtgaattccatgaagcagaaaaactgtataaaaacatcttacgcgaacatcctaattatgttgactgctatttgcgcctaggagccatggctagagataagggaaacttttatgaggcttcagattggtttaaggaagctcttcagattaatcaggatcatccagatgcttggtctttgattggcaatcttcatttggcaaaacaagaatggggtcctgggcagaagaagtttgagaggatattaaaacagccatccacacagagtgatacctattctatgctagcccttggcaacgtgtggctccaaactttacatcagcccacccgagatcgagaaaaggaaaagcgtcatcaagatcgtgctctggccatctacaaacaagtactcagaaatgatgcaaagaatctgtatgctgccaatggcataggagctgttttggcccacaaaggatattttcgtgaagctcgtgatgtatttgcccaagtaagagaagcaacagcagatattagtgatgtgtggctgaacttagcacacatctatgtggagcaaaagcagtacatcagcgccgttcagatgtatgaaaactgcctccgaaagttctataagcaccaaaacactgaagttgtactctatttggcccgggccctcttcaagtgtggcaagttacaggaatgcaaacagactttgctgaaggctagacatgtggcacccagtgatacagttcttatgtttaatgtggccttggtcctgcaaagattagctacctctgtcctgaaagatgaaaaaagtaatctgaaggaagtacttaatgctgtgaaagaactggagcttgcacatagatacttcagttatttgagtaaagtgggagataaaatgagatttgatttggcccttgctgctacagaagccaggcagtgttctgacttactgagccaggcccagtaccatgtggcccgggcacgcaaacaagatgaagaagagcgggagctgcgggccaagcaagagcaagaaaaggagctgttaaggcagaaacttcttaaagaacaggaagagaaacgtctcagagaaaaggaagagcaaaagaaacttttggaacagcgggcccagtatgtggagaagaccaaaaatattcttatgtttactggtgagactgaagcaacaaaagagaagaaaagaggtggtggtggtggacggcgttctaagaagggaggagagtttgatgaatttgtcaatgatgacactgatgatgacctacctatatccaaaaagaagaagagaagaaagggtagtggcagtgaacaagaaggtgaagatgaggagggtggtgagagaaagaagaaaaagaggagaagacatccaaagggagaagaaggatctgatgatgatgaaacagaaaatggccccaaaccaaaaaaacgacgtccaccaaaagcagagaagaaaaaggctcccaagccagaacgtctgcctccatcaatgaagggaaaaataaaatccaaagccataatttcatcaagtgatgactcttcggatgaggataaacttaaaattgctgatgaaggacatcccaggaacagcaacagcaacagtgactcagacgaggacgaacaacgaaagaaatgtgcctcatcagagagtgattccgatgagaaccagaacaagtctggcagcgaggccggcagtccccggaggccacgaagacagcggtcagatcaggactcagacagtgaccagccatccagaaagagaaggccctccggttctgagcagtctgacaatgaatctgtgcagtcagggagaagccactcaggagtttctgagaacgactctcgcccagcttctccaagtgccgaatcagatcacgaatcggagagaggatctgataatgagggttctggccaaggctctggaaatgaatcggaaccagagggatccaacaatgaggcctcagatagaggctcagaacatgggtcagatgatagtgactaggttttatttcatcaataagcttcatctctggaggaaacttttttaatatatgaaagctgtgataaaaatgtttcagatgtttagtcaattgtgaaatttttcttaaggcaattttcttttctatcagtttgtatattactaagccccaagagacatttcctgtgctagagtccaatatttgagtctctcgtgcaaatgagactattctttgtggtacaattccacctatcatatgtgaaaactgcagtaaaaataaacccagatgctaaatcattcctacaaaggtttgactgaaactgtggcagatgtctcatcttctttatatgttaagcagcatactcttctgatttttattgcaatcttttaccaagtggtgcacaaacttggtattgatgtctttattccattttgagtttagattgagaatatttttattttctgaaggcagagatatctactgtataattgcaccaaagtacatttgaaaggaaggttttcaatagtgtaatactgcagcgatgtagataaaatcacaaatgtataatgtgttaggttgaataaggtgtggaaaatgcttttctgttagtagaatgcaaaaacctacctaagccacataataataaaattcttttaccaac

SEQ ID NO: 122969 - DNA, 902 bp, Homo sapiens
  Payload ID: 4145
  Gene Symbol: CTR9
  Gene Name: CTR9 homolog, Paf1/RNA polymerase II complex component
  ENST ID: ENST00000524523
  CDS Start-End: 1-902
gacgaggtcattgaacttgacttcgatcagttaccggagggagatgaagttatcagtattctgaaacaggaacacacacaactgcacatatggattgctttggcgctggaatactacaagcaaggaaaaacagaagagtttgtaaaattgttggaagcagcacgtatagatggcaatttggactatagagaccatgaaaaagaccagatgacttgcttggatacattggcagcgtattatgtacaacaggctcggaaagaaaagaataaggacaataaaaaggatcttattacacaggccaccttgttgtatacaatggccgataaaattattatgtatgatcagaaccatttgttgggaagagcctgcttctgcctacttgagggtgacaaaatggatcaagctgatgcacagtttcattttgtactcaatcagtctccaaataatattccagcccttcttggtaaagcttgcatttccttcaacaagaaggattacagaggagctcttgcttactataagaaagcattgcgtactaacccaggatgtccagcggaagttcgtttaggaatgggtcattgctttgtgaaacttaacaaactggaaaaagctcgtctggcattcagcagagccctggaactcaattccaaatgcgtgggagcattggttggactggctgttctagaactcaacaataaagaggattatagtaaagtccagcatctggccctccatgcattccataatacagaagtggaagctatgcaagcagagagctgctatcagctagctagatcattccatgttcaggaagattatgaccaagcttttcagtactattatcaagccacacagtttgcctcatcctcttttgtgctcccattttttggtttgggacaaat

SEQ ID NO: 122970 - DNA, 7021 bp, Homo sapiens
  Payload ID: 4146
  Gene Symbol: CTC1
  Gene Name: CTS telomere maintenance complex component 1
  Uniprot ID: Q2NKJ3
  ENST ID: ENST00000315684
  CDS Start-End: 9-3662
ggcgcatcatggcggctggccgggcccaggtcccttcctccgaacaagcctggcttgaggatgctcaggtcttcatccaaaagaccctgtgtccagctgtcaaggagcctaatgtccagttgactccattggtaattgattgtgtgaagactgtctggttgtcccagggaaggaaccaaggttctacactgcccctcagctatagcttcgtctcagtacaggacctcaagactcaccagcgtctcccatgctgcagccacctgtcgtggagcagtagtgcataccaggcctgggcccaagaggctggaccaaatgggaaccccctgccccgagagcagctgttacttttagggacactaacagacctatcggcagacttggaacaagagtgcaggaacggaagcctctatgtgagagataacactggcgtcctgagctgtgagctcatagacctggacctttcttggttgggccatctttttctgttcccccgttggagttacctccctcctgccaggtggaattcctcaggggaagggcacttggagctgtgggatgcccctgtgccagtgtttcctttgaccatcagtcctggccccgtcacgcctatccctgtcctctacccagagagtgcttcctgcctgctcaggctcagaaacaagctcagaggtgtgcagcgaaacctggctgggagtctagttcgattgagtgctctggtgaaaagtaaacagaaagcttacttcatcctgtctcttggtagatcacacccagctgtcacccacgtgtccatcatcgtgcaggtccctgcccagctggtgtggcacagagcccttcggcctggtacagcctatgtgctgacagaactgcgagtgtccaagatccgtggtcagcgccagcatgtttggatgaccagtcagtcctcccgtctgttgctgctgaaaccagaatgtgtgcaggagctggaactggagctggaaggacccctcttagaggctgaccccaagccactccccatgcccagcaactcggaggacaagaaggatccagaaagtcttgtccggtattctagactcctatcctattcgggagcagtcactggcgtgttgaatgagcccgctggcctctatgagctggatgggcagctggggctctgccttgcctaccagcagttccgtggccttaggcgggtgatgcgacctggagtgtgtctgcagctccaggatgttcacctgctccagtcagtgggaggggggacaagaaggccagtgctcgccccctgcctccgtggcgccgttctgcttcaaagcttctctcgtcagaagcctggggctcactcatcccgtcaagcctacggggcctccctgtacgagcagctggtgtgggaacgtcagttaggacttcccctctacctgtgggctaccaaggccctggaggagctggcctgcaagctgtgtccccatgtgctgagacaccaccagttcctgcaacattcctctcctgggagccccagcctgggactgcaactcctggctcctaccctggatcttctagctccgccaggcagccctgttcggaatgcacacaatgagatccttgaagagccacatcactgtcccctccagaaatacactcggctgcagactccctcctccttccccactctggccaccctgaaagaagaaggacagcgtaaggcctgggcctcctttgaccctaaggcccttctgcccctcccggaggcctcctacctgcccagctgccaactcaatcgccgcctggcttggtcctggctctgtctgctgccctctgccttctgcccagcccaggttttacttggggttctggtggcttcatctcataaaggttgtctgcaacttcgggaccaaagtggttccctgccctgcctgctcctggccaagcactctcaacccctcagtgacccacggctgataggctgcctggtgcgggcagagaggtttcagttgatcgtagagagggacgtgagaagcagcttcccttcctggaaggagctgagcatgccaggcttcatccagaagcagcaggccagagtctatgtccagttctttctggctgatgccctgatcctgcctgtgcccagaccctgccttcattcagcaacaccctcaacacctcagacagatcccaccggcccagagggaccccacctaggacagagccggctcttcttgctctgccacaaggaggccctcatgaagcgtaatttttgtgtccccccaggagcaagtccagaggtgcccaagcccgccctcagtttctatgtgttggggagctggcttgggggcacccagaggaaggagggtactggatgggggctgcccgagccccagggaaatgacgacaatgatcagaaggttcacctcattttctttggctcttcagtccgctggtttgagttcttgcacccgggacaggtgtaccgactcatagctcctggccccgctacaccaatgttgtttgaaaaggatggttcatcctgcatatctcggcgtcctctggagttggctggctgtgcatcctgcctcactgtccaggacaactggactctggagcttgaaagctcccaggatatccaagatgtgctggatgcaaacaagtcattgcctgaatcctcactgaccgacctgctcagtgacaatttcacagattccttggtgtctttctccgctgagattttgtcacggacactatgtgaaccccttgtggcgtctctctggatgaaactggggaacacgggggccatgagaaggtgtgtgaagctaacagtcgctcttgagactgctgaatgtgaattcccccctcacctggatgtatatatagaagacccacacttgcctccctcactaggactacttccaggagcccgggtccacttcagccagttggagaaaagggtttccagatctcacaatgtttattgttgtttccggtcatccacttatgtgcaggtcctgagttttccccctgagaccaccatcagcattcccctgccccacatctacctggctgaacttctgcagggtggtcagtccccattccaggccactgcctcttgccatatcgtctctgtcttcagccttcagctcttctgggtgtgtgcttattgtaccagcatctgccggcagggaaagtgcactcgcctgggctccacttgccctacgcagacagctataagccaggccatcatcaggctcctggtggaggatgggactgccgaagccgtggtgacctgtaggaatcaccatgtggcagcagcactagggctgtgtcctagagagtgggcctccctcctagatttcgtccaagtgccaggcagagtggtcttgcagtttgcagggcctggagcccaacttgagtcttcagccagggttgacgagcccatgaccatgttcctctggacactttgtactagcccctctgtcctccgtcctattgtgctttcttttgagctggaaaggaaaccgtcgaagatcgtcccattagaacctcctcggctacagcgattccagtgtggagagctccctttcctgactcacgtgaaccccaggctccgattgtcctgcctttctatccgagagtcagagtactccagctctctggggatccttgcttcctcctgttaactgaactgcaaggatggcctgagagtccttccttgctgaaaacctgaaggcctaggtcctggctcctctccctacttgttctgtgattgaaccaaggactccagattcacaaactgctactccactataatttcccttctttggtgttctggtgccagcctgccttggcaaaattgtggcaacaggaaatcatggccctattaatatgtcctctgattgggacaaggcacctgcattcacaggcggccctgagcacctgggttctgactttgtcgcaggagctgagggaacaaaagacttgctcgctgtggggtgatggtgacaggcctattgacctgcaatgaagccctctggtgtcatttctcactggtactcatctctggggtcccaggcctcctgactcctagttgtccacctcctaggaactcctagtcgttcatcatcatttcagccctttgccgccagggccaaaggtggaaagtgatttggaagagaagagcttttcgtccagcagaagaaatggtaccaaaatcagtctgtaaaggaagtaaattggggagttggcggcaaggcagagagcatagctatgatggtctcagtcagtaaggctgggccctgcaggaagtcaaatatgaatgcctagaggtgttcacaagcacaaagaaggtgtagggggaggcaagtgccaggcacaagcaggggcaggtgaggactctgggtgactgtgctatagggccccaggctacggttagccctgtaggtttcccaagggcctggcctaaggcagatccttgatcgatataccttgagaccagaaggtgctccgaaatcacaaccgtacaattaggggatctaggaacaattctttggagataccaatgcctttggctggtgttgctgcatttctttactggggactgatagatggagaggtggaaagatgagctgaggcacatctttcagagctactgggaggccatttcttcctggctgttaggatttgttcgtgtttgggagacctttagagcgtggttaaacccatatgttgggatttatgctgcttttatggtagcaataccctatattaagatttgaagtagacccggaaagttagtggccggttagctcagttggttagagcgtggtgctaataacgccaaggtcgcgggttcgaaccccgtacgggccagtgggtggcttttttttgtgtgtgttttgttttctgaccctctgctgttatccggaagtttctacccggagccagttgccttctggtaacagaattatattgcacctactgcttcctattccctgaatcactagcgctcccgaaggcttggagggaggagtctctgggcacccgggtgaaaggaaggttcacgtgcaaccgccgcgtctttttttccctgaagcgctttcatggaggcagatgtttgtcagtcaagggaagtaagaaaggcattggatgaaaacgaagccctaagcctcgtagtcgtggccgagtggttaaggcgatggactagaaatccattggggtctccccgcgcaggttcgaatcctgccgactacgtcatatttttttcttcagcatactgaccatatttctctccaggatgggatgatccagtcggcaccctccaaacctctcatctaggaactctagaatcgagaatttgatttagagtctatgattttggtttgaaatctatgattaacgtctttggacattgaaggaaatccgaggaatggacaagtgatgcaagagccagttgagttaccaaattagttctagaaagatctgaaaaagctcggtccgggttcctagctctatattcttgtagatgaatttcaggaacctttatggcagcttcggcgccgtggcttagttggttaaagcgcctgtctagtaaacaggagatcctgggttcgaatcccagcggtgcctttattcaattgaaacagcgtgattttgcggctaaatccacatcctttcatgtattgtttttatatcagaacgcgtaagagtttctgttctgcactcatagcacccacatttcctgcagagtcaagctgccactcccatgagatcgccactctaaaaggtggttctctaacttaggggcagaaatgttgcataggcctaagggtcctttgcttaactgatgccacaccccactggtgcaggtggactgggtcaggcggccgccccaccctcgatggaaggggctgcccaccttccaggcctctttctccaccctaggacgtcccctagaacctgagccactttgttttgtttggctcttcattatagttctttgggtttggtggctcataatgttatatatatagtatataatataaaaatatatatttaaatatacagtatttaaaatttggcacagcttccagatgcggtcctctaactggtctttcacttgcagttacctccatccctctccaccagcgggatgtcagggtaaggagtaagcagggatccggctggcctggcctggcctggcaccaggtttcgtgcagcagggtgcagaagggctgaggccatgtgaacagagtccaagaaagcatcattcgggagtcgctagggatcctggtgtggaagggcagggcacttttctggagcactgaagctaggctggttaaggaagaaataaatgccagagataaggcaagaaataggatctgtgagctcttggcaggacctaaacctccttggaagataggcagaaagctctcgacaccattccatggcccacgaaccaatgtaagatgagcaaatggcttgaaggaattgctacctccaggtcaagccagggatgcagcactgccgagaccacgtttgtgccaagcactgggctggaccctgtgcagaaccaaatgaacaaggcacgttcccctttcagcactaacggcactgtaagaacagggagaagtggaatctaatctggcctgagggtagagggtgatcagctaagtctgaaacaccatgtagaaacttgccatgtatggccgggcgcggtggctcacgcctgtaatcccagcgctttgggaggccaaggtgggcggatcacgaggtcaggagttccagaccagcagcctggccaacatagtgaaacctggtaacatagtgaaacctcgtctctactaaaaatgcaaaaaattagccaggcgtggtggcaggcgcctgcagtcctagctacttgggaggctgaggcaagagaatcgcttcaaccttggaggggggaggaggtgttgtcagccgagatcgcgccactgcatcccagcctgggcaacaagagtgaaactccgtctcaaaaaaatgaaataaaataaacgaatgatca

SEQ ID NO: 122971 - DNA, 4797 bp, Homo sapiens
  Payload ID: 4146
  Gene Symbol: CTC1
  Gene Name: CTS telomere maintenance complex component 1
  Uniprot ID: Q2NKJ3
  ENST ID: ENST00000449476
  CDS Start-End: 7-3102
cgcatcatggcggctggccgggcccaggtcccttcctccgaacaagcctggcttgaggatgctcaggtcttcatccaaaagaccctgtgtccagctgtcaaggagcctaatgtccagttgactccattggtaattgattgtgtgaagactgtctggttgtcccagggaaggaaccaaggttctacactgcccctcagctatagcttcgtctcagtacaggacctcaagactcaccagcgtctcccatgctgcagccacctgtcgtggagcagtagtgcataccaggcctgggcccaagaggctggaccaaatgggaaccccctgccccgagagcagctgttacttttagggacactaacagacctatcggcagacttggaacaagagtgcaggaacggaagcctctatgtgagagataacactggcgtcctgagctgtgagctcatagacctggacctttcttggttgggccatctttttctgttcccccgttggagttacctccctcctgccaggtggaattcctcaggggaagggcacttggagctgtgggatgcccctgtgccagtgtttcctttgaccatcagtcctggccccgtcacgcctatccctgtcctctacccagagagtgcttcctgcctgctcaggctcagatcacacccagctgtcacccacgtgtccatcatcgtgcaggtccctgcccagctggtgtggcacagagcccttcggcctggtacagcctatgtgctgacagaactgcgagtgtccaagatccgtggtcagcgccagcatgtttggatgaccagtcagtcctcccgtctgttgctgctgaaaccagaatgtgtgcaggagctggaactggagctggaaggacccctcttagaggctgaccccaagccactccccatgcccagcaactcggaggacaagaaggatccagaaagtcttgtccggtattctagactcctatcctattcgggagcagtcactggcgtgttgaatgagcccgctggcctctatgagctggatgggcagctggggctctgccttgcctaccagcagttccgtggccttaggcgggtgatgcgacctggagtgtgtctgcagctccaggatgttcacctgctccagtcagtgggaggggggacaagaaggccagtgctcgccccctgcctccgtggcgccgttctgcttcaaagcttctctcgtcagaagcctggggctcactcatcccgtcaagcctacggggcctccctgtacgagcagctggtgtgggaacgtcagttaggacttcccctctacctgtgggctaccaaggccctggaggagctggcctgcaagctgtgtccccatgtgctgagacaccaccagttcctgcaacattcctctcctgggagccccagcctgggactgcaactcctggctcctaccctggatcttctagctccgccaggcagccctgttcggaatgcacacaatgagatccttgaagagccacatcactgtcccctccagaaatacactcggctgcagactccctcctccttccccactctggccaccctgaaagaagaaggacagcgtaaggcctgggcctcctttgaccctaaggcccttctgcccctcccggaggcctcctacctgcccagctgccaactcaatcgccgcctggcttggtcctggctctgtctgctgccctctgccttctgcccagcccaggttttacttggggttctggtggcttcatctcataaaggttgtctgcaacttcgggaccaaagtggttccctgccctgcctgctcctggccaagcactctcaacccctcagtgacccacggctgataggctgcctggtgcgggcagagaggtttcagttgatcgtagagagggacgtgagaagcagcttcccttcctggaaggagctgagcatgccaggcttcatccagaagcagcaggccagagtctatgtccagttctttctggctgatgccctgatcctgcctgtgcccagaccctgccttcattcagcaacaccctcaacacctcagacagatcccaccggcccagagggaccccacctaggacagagccggctcttcttgctctgccacaaggaggccctcatgaagcgtaatttttgtgtccccccaggagcaagtccagaggtgcccaagcccgccctcagtttctatgtgttggggagctggcttgggggcacccagaggaaggagggtactggatgggggctgcccgagccccagggaaatgacgacaatgatcagaaggttcacctcattttctttggctcttcagtccgctggtttgagttcttgcacccgggacaggtgtaccgactcatagctcctggccccgctacaccaatgttgtttgaaaaggatggttcatcctgcatatctcggcgtcctctggagttggctggctgtgcatcctgcctcactgtccaggacaactggactctggagcttgaaagctcccaggatatccaagatgtgctggatgcaaacaagtcattgcctgaatcctcactgaccgacctgctcagtgacaatttcacagattccttggtgtctttctccgctgagattttgtcacggacactatgtgaaccccttgtggcgtctctctggatgaaactggggaacacgggggccatgagaaggtgtgtgaagctaacagtcgctcttgagactgctgaatgtgaattcccccctcacctggatgtatatatagaagacccacacttgcctccctcactaggactacttccaggagcccgggtccacttcagccagttggagaaaagggtttccagatctcacaatgtttattgttgtttccggtcatccacttatgtgcaggtcctgagttttccccctgagaccaccatcagcattcccctgccccacatctacctggctgaacttctgcagggtggtcagtccccattccaggccactgcctcttgccatatcgtctctgtcttcagccttcagctcttctgggtgtgtgcttattgtaccagcatctgccggcaggctcctggtggaggatgggactgccgaagccgtggtgacctgtaggaatcaccatgtggcagcagcactagggctgtgtcctagagagtgggcctccctcctagatttcgtccaagtgccaggcagagtggtcttgcagtttgcagggcctggagcccaacttgagtcttcagccagggttgacgagcccatgaccatgttcctctggacactttgtactagcccctctgtcctccgtcctattgtgctttcttttgagctggaaaggaaaccgtcgaagatcgtcccattagaacctcctcggctacagcgattccagtgtggagagctccctttcctgactcacgtgaaccccaggctccgattgtcctgcctttctatccgagagtcagagtactccagctctctggggatccttgcttcctcctgttaactgaactgcaaggatggcctgagagtccttccttgctgaaaacctgaaggcctaggtcctggctcctctccctacttgttctgtgattgaaccaaggactccagattcacaaactgctactccactataatttcccttctttggtgttctggtgccagcctgccttggcaaaattgtggcaacaggaaatcatggccctattaatatgtcctctgattgggacaaggcacctgcattcacaggcggccctgagcacctgggttctgactttgtcgcaggagctgagggaacaaaagacttgctcgctgtggggtgatggtgacaggcctattgacctgcaatgaagccctctggtgtcatttctcactggtactcatctctggggtcccaggcctcctgactcctagttgtccacctcctaggaactcctagtcgttcatcatcatttcagccctttgccgccagggccaaaggtggaaagtgatttggaagagaagagcttttcgtccagcagaagaaatggtaccaaaatcagtctgtaaaggaagtaaattggggagttggcggcaaggcagagagcatagctatgatggtctcagtcagtaaggctgggccctgcaggaagtcaaatatgaatgcctagaggtgttcacaagcacaaagaaggtgtagggggaggcaagtgccaggcacaagcaggggcaggtgaggactctgggtgactgtgctatagggccccaggctacggttagccctgtaggtttcccaagggcctggcctaaggcagatccttgatcgatataccttgagaccagaaggtgctccgaaatcacaaccgtacaattaggggatctaggaacaattctttggagataccaatgcctttggctggtgttgctgcatttctttactggggactgatagatggagaggtggaaagatgagctgaggcacatctttcagagctactgggaggccatttcttcctggctgttaggatttgttcgtgtttgggagacctttagagcgtggttaaacccatatgttgggatttatgctgcttttatggtagcaataccctatattaagatttgaagtagacccggaaagttagtggccggttagctcagttggttagagcgtggtgctaataacgccaaggtcgcgggttcgaaccccgtacgggccagtgggtggcttttttttgtgtgtgttttgttttctgaccctctgctgttatccggaagtttctacccggagccagttgccttctggtaacagaattatattgcacctactgcttccta

SEQ ID NO: 122972 - DNA, 375 bp, Homo sapiens
  Payload ID: 4146
  Gene Symbol: CTC1
  Gene Name: CTS telomere maintenance complex component 1
  ENST ID: ENST00000580299
  CDS Start-End: 1-375
cctcacctggatgtatatatagaagacccacacttgcctccctcactaggactacttccaggagcccgggtccacttcagccagttggagaaaagggtttccagatctcacaatgtttattgttgtttccggtcatccacttatgtgcaggtcctgagttttccccctgagaccaccatcagcattcccctgccccacatctacctggctgaacttctgcagggtggtcagtccccattccaggccactgcctcttgccatatcgtctctgtcttcagccttcagctcttctggtcttcagccagggttgacgagcccatgaccatgttcctctggacactttgtactagcccctctgtcctccgtcctattgtg

SEQ ID NO: 122973 - DNA, 569 bp, Homo sapiens
  Payload ID: 4146
  Gene Symbol: CTC1
  Gene Name: CTS telomere maintenance complex component 1
  ENST ID: ENST00000581729
  CDS Start-End: 1-371
gtggtcagtccccattccaggccactgcctcttgccatatcgtctctgtcttcagccttcagctcttctgggtgtgtgcttattgtaccagcatctgccggcagtcttcagccagggttgacgagcccatgaccatgttcctctggacactttgtactagcccctctgtcctccgtcctattgtgctttcttttgagctggaaaggaaaccgtcgaagatcgtcccattagaacctcctcggctacagcgattccagtgtggagagctccctttcctgactcacgtgaaccccaggctccgattgtcctgcctttctatccgagagtcagagtactccagctctctggggatccttgcttcctcctgttaactgaactgcaaggatggcctgagagtccttccttgctgaaaacctgaaggcctaggtcctggctcctctccctacttgttctgtgattgaaccaaggactccagattcacaaactgctactccactataatttcccttctttggtgttctggtgccagcctgccttggcaaaattgtggcaacaggaaatcatggccc

SEQ ID NO: 122974 - DNA, 943 bp, Homo sapiens
  Payload ID: 4146
  Gene Symbol: CTC1
  Gene Name: CTS telomere maintenance complex component 1
  ENST ID: ENST00000578537
  CDS Start-End: 1-404
tgcccagaccctgccttcattcagcaacaccctcaacacctcagacagatcccaccggcccagagggaccccacctaggacagagccggctcttcttgctctgccacaaggaggccctcatgaagcgtaatttttgtgtccccccaggagcaagtccagaggtgcccaagcccgccctcagtttctatgtgttggggagctggcttgggggcacccagaggaaggagggtactggatgggggctgcccgagccccagggaaatgacgacaatgatcagaaggttcacctcattttctttggctcttcagtccgctggtttgagttcttgcacccgggacaggtgtaccgactcatagctcctggccccgcttttcacagattccttggtgtctttctccgctgagattttgtcacggacactatgtgaaccccttgtggcgtctctctggatgaaactggggaacacgggggccatgagaaggtgtgtgaagctaacagtcgctcttgagactgctgaatgtgaattcccccctcacctggatgtatatatagaagacccacacttgcctccctcactaggactacttccaggagcccgggtccacttcagccagttggagaaaagggtttccaggtcctgagttttccccctgagaccaccatcagcattcccctgccccacatctacctggctgaacttctgcagggtggtcagtccccattccaggccactgcctcttgccatatcgtctctgtcttcagccttcagctcttctgggtgtgtgcttattgtaccagcatctgccggcagggaaagtgcactcgcctgggctccacttgccctacgcagacagctataagccaggccatcatcaggctcctggtggaggatgggactgccgaagccgtggtgacctgtaggaatcaccatgtggcagcagc

SEQ ID NO: 122975 - DNA, 5897 bp, Homo sapiens
  Payload ID: 4147
  Gene Symbol: CTTNBP2NL
  Gene Name: CTTNBP2 N-terminal like
  Uniprot ID: Q9P2B4
  ENST ID: ENST00000271277
  CDS Start-End: 226-2145
gcccccgccgggcggctgagggggcggagcctcagccgctgtggatggggagtggaggcggaggggagcggagcccggagcgtcgtggaaagcattggacacatttccaccatgctaatggcattttaaatatatttggcaattttcccaattttttactgaagaaaactgtaagtttatacttgaggactgaagtgtgactctgccgattatcaggctttcaagatgaatctggaaaaactcagcaagcctgaactcctgacactatttagtattcttgaaggagagcttgaagcaagggaccttgttatagaagccttaaaggcccaacacagagatactttcattgaagaacgctatggaaaatataacatcagtgatcctttaatggctctacagagagattttgaaacactgaaggagaaaaatgatggcgaaaagcagccagtctgcacaaatccactctctattcttaaggttgtgatgaagcagtgcaagaacatgcaggagcgcatgctgtcccagctggctgctgctgagagcaggcaccgaaaggtgatcctagaccttgaggaagaaaggcagcggcatgcacaggatacggctgaaggagatgatgtcacctacatgctagagaaggaaagagagaggctgactcaacagttggaatttgaaaaatcccaagtgaaaaagtttgaaaaagaacagaagaagctctctagtcagctggaagaggagcgctcccgccacaagcagctctcatccatgctagtgcttgagtgcaagaaagccaccaacaaggcagccgaggaaggacagaaggcaggagagctgagcctgaaattggagaaggagaagagccgggtgagtaaactggaagaagagttggcagctgagagaaagagaggcttgcagactgaggcccaggtagagaagcagttatcagagtttgacatcgaaagggaacaactgagagcaaaactgaaccgagaagagaaccggaccaaaaccctgaaagaagaaatggaaagtttaaagaagatagtgaaggacctagaggcttcccaccagcacagtagccctaatgagcaattgaagaaaccagtaaccgtgtccaaaggcacagcaactgagcctctcatgctaatgtctgtgttttgccaaacagagagttttccagcagaaagaacccatgggagcaacatagccaagatgacaaacactgggctgcctggtcctgccactcctgcttactcatatgcaaaaaccaatggccattgtgacccagagatacaaactaccagggagctgactgcaggcaacaatgtagaaaaccaggtgcctccacgggaaaaatctgtggcattggcccaagagaaaccagtggagaatggtgggtgtcctgtggggattgagactccagtcccaatgcccagtcccctctcttccagtgggagctcactgtctcccagcagcactgcctcctcctctctaacatcctctccttgctcttcgccggtactcactaagcgtttattggggtcatcagctagcagccctggctaccagtcatcgtaccaagtagggatcaaccaacggttccatgcagctcgccacaaatttcagtcccaagcagatcaggaccaacaagccagtggcctacagagccctccatccagggatttatcccccaccctcatagacaactctgccgccaagcagctggcccgaaacacagtcactcaggtgctctccagattcactagccaacaagggccaatcaagccagtctctcccaacagctctccctttggcacagactatcgaaatctagccaacactgccaatccaagaggtgacacaagccattcacctactccagggaaagtgtccagtcccctgagccccctgtctccaggaatcaagtccccaaccatccccagagctgagagaggaaaccctccacccatcccacccaagaaacctggcctcaccccttctccatctgctaccactccattgaccaaaactcattcccaggcagcctctttgaccactgcagaagaccttgccagcagctgctcttccaatactgttgtagcaaatggtaaggatgttgagttacttttgcctaccagcagctagtccctaggagggagtctccacgtttgacattccatcagatttcgtccaaaagctcagtcagacttctgagtcagattatgttatttattttgatagtagctgaaaccatctgtataatacatttagtatatttcaccattttgtatttttttaagtagaaactgagtagtttggatttttatggctcacatctttttactgaagccagaaaggcacctcaaagatgtctcaagctcagcagtcaccgtcatgttgtgatgaagaaagcgaatcaccaggtggtgatttgctatctatttgagaactagaatcactcaacactcattttgaattatgcagaagtggttcatgcagatttttattccagatgaacatgttttaaaagtgcctgaaatatgactgccatatgaatgtgattctgcagcaaaaaacacaaaatagatcatttaattacagaaaatgagatcctctgtgaattctgaatgttaaaaaccaacactgcttttaatcctcttttaatgttttaatacaagctttgtgttctgaaacaaggctgcataagtagaatgggaatccttctaaaggtgggtgtgaactcaccacaagctgagctttatagagcccttgagaaaccctcctgagcactaagcagttggggtgctgattttcttgtacttttgaaaaattaagtcactcccagtttcctgcataagttcttgaacagaatgaaatcacatctccattcaaaaaatgtctcaagcatctactgttgtgtaaggaacttctgattctgattgctgttacttgaataggaaatggttactcattctgtataaaagttttgcaagagaatgaattttttattctgtaatcaaaaagcaataacttgaaattcactctgtaatattataggtcagtcagaattatacaagttttaccaaattgttacacttattctccaagctgccagaacctggtatctgtatctgtaaaaccaaattaacttttgcttaaatgggaagtatacatatatctgtatagatacattacccctttacatgtttaacatacacacacttaaacacataaatactagtgtgattatatctttggagtttgcaatatagcataaaggacaagtagaactgcacattaagattacctaccgaagcaactagatgtggctgggacacaatcaaaggaggaattttgtccacaggaaggtgaggaaattccaaatgaagcctagatcttcagtatcataaaaaggcagagctggccaggcacagtggctcatgcctgtaatcttatcactttgggaggctgagatgggaggatctcttgagaccaggtgttcaagaccagcctcatcaacatagtgagaccccatctctattaaaaaaataaataggcagagctaaactaaccccagtgtcacaaaactcaactggtcatataaatgagtgaaacaggcctctcacacaagcgatgtaaaacagctgggagcagtgggagctgtggcaaactaaagtgcccaagccgcatttaaaaagggcatctgttcagctccatctgcttgctgcggtgcaagaatgctaaaccaggattaccagttcttcacattttttgaaatccaaattttcatgagaaacattctcatttttaaatatcaagaagtgattttaaaatgtttaaatggtgctggttaaacaaacacgtctgcagctggatttagcttgcaagctgccaagttgcaacctctttcattctagaaacttctgtcattttcatcatagcaagtctatgcggacaaaagcctccaaactttccaactgtgtaggccagtacagctggcaaggttcatagaatataatggctatccccctctgccaaataagactatccacaacccagctcagacacagtggttatatgattttgtgtccatacaggagaggccttggtgtcttcacatacattctctgagccaacatctatccagcagccctgacctcctgctataatttaagtctatttccttttaatctaataagagttgatagtaaaaaggcaggtgatggaaatcagtgtataaatcacaatggagtatattggcaactccacagcttatagtttgataaaggcaaatacatgaaaaataaaaatgctactaatgccccaaggtgtctatcaaaatgatgtagggggtatcttaaactgtccaaggcaatcatgcattgaactttattcctatgcagagccaaaacgaatagtgttgataaaatagctaaactttctaaactggagaggaggctacagtgccagagagttattgtctcttttgctttaaatggtaatcttaaaagttgcattgtgctcttcctttgttttgggatagatatatatagagagagatactataaggaagtttatttcttaggaagtgcactgaataatgtatttcttttacagtgtaatatgggggtggggatatgcgaaagaaatgtgtatttttgctagttgcctaccttctgagataaataagcacaatcttgcaatggatccaataacccagttaggtattatagattagtatttaagtttgctgtagattgtgtgtgtgtgtgctaagtaaaagttccatgattcacaattttagtattaacccatgttgcaaaagctgttactggccaacagattgtaatgatgtgtaccatataacacaagcattaactaggcattaacgtttgtaaagccaaatataccatgcagaagtcttcatttttatagcagactgcattaaaacaagttaaatcttgctgtttggggggaaatagtcttgtttgtacaaagtgaaaaatggcacaatttgggcatattttgttgggaagagggggtggtgtagagggagcacttgactgtggctttgacaaaacaaatgaagtcaatgacccatccaggttagactccataaggaactaagacattgattttctttagagtcttagagctggaaaaagcctttacaataatccagtctgtgattttttaaaccttttggtggttctggacctttttgagaatcttagaaaagccatggagtttatccctagaaaaatgaatatgcctatatgcaaaatttgtttgatggcttcataggatccaaagaccctgaagccatccatggctcatgtatttctgcttaagaaagcataatcttgttctgctctctcattttacaaatgattaatgcatcccttttcaactactccagcgctgttgctgctgcaatgttagcaaatgcaagccagagagaagcacttgaaaatcctttgatgtctaaaaaatgttcaaatagtgtggatgtttacatatctgaagttttcagcatttaagcaaattaatgatcatttcaacaaatactagcatatccggtttcccttaatagcctgtcagcagtgctgccttgtcaatttgtgtgtgtgtgtgtgtatgtgtgtgtgtgtgtgaattcataaggagtgcttctgatgcttagtccttgaaatggaacttcaactgtctttcaaaacactggcttcaaaataggatgtgttttcctaatgaatcagaagtgggcaatgagcattgttccacaggaataatttttaatttaatttctataaaactagttgagaaatgagagcctgtccacccaccatttgtgtatcagtggccaattcattagtaaaaataaaggaggggaaaggaga

SEQ ID NO: 122976 - DNA, 1014 bp, Homo sapiens
  Payload ID: 4147
  Gene Symbol: CTTNBP2NL
  Gene Name: CTTNBP2 N-terminal like
  ENST ID: ENST00000441739
  CDS Start-End: 201-1014
ctctgacacccctcattcaaaggcacctcccaccccgcacctcagccttggcggagaggactcacagcattggacacatttccaccatgctaatggcattttaaatatatttggcaattttcccaattttttactgaagaaaactgtaagtttatacttgaggactgaagtgtgactctgccgattatcaggctttcaagatgaatctggaaaaactcagcaagcctgaactcctgacactatttagtattcttgaaggagagcttgaagcaagggaccttgttatagaagccttaaaggcccaacacagagatactttcattgaagaacgctatggaaaatataacatcagtgatcctttaatggctctacagagagattttgaaacactgaaggagaaaaatgatggcgaaaagcagccagtctgcacaaatccactctctattcttaaggttgtgatgaagcagtgcaagaacatgcaggagcgcatgctgtcccagctggctgctgctgagagcaggcaccgaaaggtgatcctagaccttgaggaagaaaggcagcggcatgcacaggatacggctgaaggagatgatgtcacctacatgctagagaaggaaagagagaggctgactcaacagttggaatttgaaaaatcccaagtgaaaaagtttgaaaaagaacagaagaagctctctagtcagctggaagaggagcgctcccgccacaagcagctctcatccatgctagtgcttgagtgcaagaaagccaccaacaaggcagccgaggaaggacagaaggcaggagagctgagcctgaaattggagaaggagaagagccgggtgagtaaactggaagaagagttggcagctgagagaaagagaggcttgcagactgaggcccaggtagagaagcagttatcagagtttgacatcgaaagggaacaactgagagcaaaactgaaccgagaagagaaccggaccaaaaccctgaaagaagaaatggaaagtttaaaga

SEQ ID NO: 122977 - DNA, 2685 bp, Homo sapiens
  Payload ID: 4148
  Gene Symbol: CLEC1A
  Gene Name: C-type lectin domain family 1, member A
  Uniprot ID: Q8NC01
  ENST ID: ENST00000315330
  CDS Start-End: 64-906
acagtagcccggcggcccagggcaatccgaccacatttcactctcaccgctgtaggaatccagatgcaggccaagtacagcagcacgagggacatgctggatgatgatggggacaccaccatgagcctgcattctcaaggctctgccacaactcggcatccagagccccggcgcacagagcacagggctccctcttcaacgtggcgaccagtggccctgaccctgctgactttgtgcttggtgctgctgatagggctggcagccctggggcttttgttttttcagtactaccagctctccaatactggtcaagacaccatttctcaaatggaagaaagattaggaaatacgtcccaagagttgcaatctcttcaagtccagaatataaagcttgcaggaagtctgcagcatgtggctgaaaaactctgtcgtgagctgtataacaaagctggagcacacaggtgcagcccttgtacagaacaatggaaatggcatggagacaattgctaccagttctataaagacagcaaaagttgggaggactgtaaatatttctgccttagtgaaaactctaccatgctgaagataaacaaacaagaagacctggaatttgccgcgtctcagagctactctgagtttttctactcttattggacagggcttttgcgccctgacagtggcaaggcctggctgtggatggatggaacccctttcacttctgaactgttccatattataatagatgtcaccagcccaagaagcagagactgtgtggccatccttaatgggatgatcttctcaaaggactgcaaagaattgaagcgttgtgtctgtgagagaagggcaggaatggtgaagccagagagcctccatgtcccccctgaaacattaggcgaaggtgactgattcgccctctgcaactacaaatagcagagtgagccaggcggtgccaaagcaagggctagttgagacattgggaaatggaacataatcaggaaagactatctctctgactagtacaaaatgggttctcgtgtttcctgttcaggatcaccagcatttctgagcttgggtttatgcacgtatttaacagtcacaagaagtcttatttacatgccaccaaccaacctcagaaacccataatgtcatctgccttcttggcttagagataacttttagctctctttcttctcaatgtctaatatcacctccctgttttcatgtcttccttacacttggtggaataagaaactttttgaagtagaggaaatacattgaggtaacatccttttctctgacagtcaagtagtccatcagaaattggcagtcacttcccagattgtaccagcaaatacacaaggaattctttttgtttgtttcagttcatactagtcccttcccaatccatcagtaaagaccccatctgccttgtccatgccgtttcccaacagggatgtcacttgatatgagaatctcaaatctcaatgccttataagcattccttcctgtgtccattaagactctgataattgtctcccctccataggaatttctcccaggaaagaaatatatccccatctccgtttcatatcagaactaccgtccccgatattcccttcagagagattaaagaccagaaaaaagtgagcctcttcatctgcacctgtaatagtttcagttcctattttcttccattgacccatatttatacctttcaggtactgaagatttaataataataaatgtaaatactgtgaagtgtgtgtgattttacaatggacttatggttggtgggaaaattcagcatggaaatgcttttcaaaatatgatagcggtcattattttgattgtgccttactgaaagtttttggggaatttacaagagtactgattacatgattatctggagaaaataagatgtctttgaaatacgtgttggcttcaagaaaacagttttaacgttttcctaaaatgaaatcttttgaggtgagcttatggcatcaacacatggttgatgaggaagctgagttgcattagtgcacatgatttccagtcaggtcatgggaaatgaacagagacagtgacatctttgtagctgctcctttgtgaggcacttctttcttgagacgactccatgcacaaatataacagggatcattgggaatgacaccatcacagccaccaagtttattggtttactgataaatcaattttgagggttttatgctagaaaagataacattataaatctttgtttttcaacagtggaaactgaggtgcttcagttttgtttttcataaacatctatctcatggtaaaatgacgtatagtagcaatcatatgatagaaagaacacattggtgctcattttcataaacttcattttgttagattgtcacttagcaaagactattgcggattcttccttgagaactttcctttcaattttctgttgatttccttaaaattttcttcagggtcgagcaagttctgttgatatattgtgtcatgcaaagaaaactgtatttgtggttagaaaatgaagattttagacctcttattctgatttacttattaggcaagtcactttacttcatgaaacctatttcactgcatatgaagtagaaataattataatttcctcataatgttactgttagctgaaataaagtaaatgtgaaatca

SEQ ID NO: 122978 - DNA, 562 bp, Homo sapiens
  Payload ID: 4148
  Gene Symbol: CLEC1A
  Gene Name: C-type lectin domain family 1, member A
  ENST ID: ENST00000414501
  CDS Start-End: 352-562
aaagcgccttgggctcggctgtgctccagctcgcgctgctgaggtctggcctccgccagctgacttcaactgcaactgcaactcctcctcctcagccgccgcctcagggaacccaccgacccacaaaccagctcccgcaggggcggtgccgctgcctccttttcgttttctgtttttgtttttgttgtgttttttgtttttgttttgttttgtttttggagatgggatctcgctctgttgtccaggctggagtgcagtgacacaatctcagctcactgctgcctccgcctcccaggttcaagcgattctcctgcctcagcctcctgagtagctgggattacaggaatccagatgcaggccaagtacagcagcacgagggacatgctggatgatgatggggacaccaccatgagcctgcattctcaaggctctgccacaactcggcatccagagccccggcgcacagagcacagggctccctcttcaacgtggcgaccagtggccctgaccctgctgactttgtgcttggtgctgctgatagggctggcagccctggggcttt

SEQ ID NO: 122979 - DNA, 1686 bp, Homo sapiens
  Payload ID: 4148
  Gene Symbol: CLEC1A
  Gene Name: C-type lectin domain family 1, member A
  ENST ID: ENST00000457018
  CDS Start-End: 93-836
ttttagtgccttgcttcctgaactagctcacagtagcccggcggcccagggcaatccgaccacatttcactctcaccgctgtaggaatccagatgcaggccaagtacagcagcacgagggacatgctggatgatgatggggacaccaccatgagcctgcattctcaaggctctgccacaactcggcatccagagccccggcgcacagtttttcagtactaccagctctccaatactggtcaagacaccatttctcaaatggaagaaagattaggaaatacgtcccaagagttgcaatctcttcaagtccagaatataaagcttgcaggaagtctgcagcatgtggctgaaaaactctgtcgtgagctgtataacaaagctggagcacacaggtgcagcccttgtacagaacaatggaaatggcatggagacaattgctaccagttctataaagacagcaaaagttgggaggactgtaaatatttctgccttagtgaaaactctaccatgctgaagataaacaaacaagaagacctggaatttgccgcgtctcagagctactctgagtttttctactcttattggacagggcttttgcgccctgacagtggcaaggcctggctgtggatggatggaacccctttcacttctgaactgttccatattataatagatgtcaccagcccaagaagcagagactgtgtggccatccttaatgggatgatcttctcaaaggactgcaaagaattgaagcgttgtgtctgtgagagaagggcaggaatggtgaagccagagagcctccatgtcccccctgaaacattaggcgaaggtgactgattcgccctctgcaactacaaatagcagagtgagccaggcggtgccaaagcaagggctagttgagacattgggaaatggaacataatcaggaaagactatctctctgactagtacaaaatgggttctcgtgtttcctgttcaggatcaccagcatttctgagcttgggtttatgcacgtatttaacagtcacaagaagtcttatttacatgccaccaaccaacctcagaaacccataatgtcatctgccttcttggcttagagataacttttagctctctttcttctcaatgtctaatatcacctccctgttttcatgtcttccttacacttggtggaataagaaactttttgaagtagaggaaatacattgaggtaacatccttttctctgacagtcaagtagtccatcagaaattggcagtcacttcccagattgtaccagcaaatacacaaggaattctttttgtttgtttcagttcatactagtcccttcccaatccatcagtaaagaccccatctgccttgtccatgccgtttcccaacagggatgtcacttgatatgagaatctcaaatctcaatgccttataagcattccttcctgtgtccattaagactctgataattgtctcccctccataggaatttctcccaggaaagaaatatatccccatctccgtttcatatcagaactaccgtccccgatattcccttcagagagattaaagaccagaaaaaagtgagcctcttcatctgcacctgtaatagtttcagttcctattttcttccattgacccatatttatacctttcaggtactgaagatttaataataataaatgtaaatactgtg

SEQ ID NO: 122980 - DNA, 1165 bp, Homo sapiens
  Payload ID: 4148
  Gene Symbol: CLEC1A
  Gene Name: C-type lectin domain family 1, member A
  ENST ID: ENST00000420265
  CDS Start-End: 29-595
tttcactctcaccgctgtaggaatccagatgcaggccaagtacagcagcacgagggacatgctggatgatgatggggacaccaccatgagcctgcattctcaaggctctgccacaactcggcatccagagccccggcgcacagcacacaggtgcagcccttgtacagaacaatggaaatggcatggagacaattgctaccagttctataaagacagcaaaagttgggaggactgtaaatatttctgccttagtgaaaactctaccatgctgaagataaacaaacaagaagacctggaatttgccgcgtctcagagctactctgagtttttctactcttattggacagggcttttgcgccctgacagtggcaaggcctggctgtggatggatggaacccctttcacttctgaactgttccatattataatagatgtcaccagcccaagaagcagagactgtgtggccatccttaatgggatgatcttctcaaaggactgcaaagaattgaagcgttgtgtctgtgagagaagggcaggaatggtgaagccagagagcctccatgtcccccctgaaacattaggcgaaggtgactgattcgccctctgcaactacaaatagcagagtgagccaggcggtgccaaagcaagggctagttgagacattgggaaatggaacataatcaggaaagactatctctctgactagtacaaaatgggttctcgtgtttcctgttcaggatcaccagcatttctgagcttgggtttatgcacgtatttaacagtcacaagaagtcttatttacatgccaccaaccaacctcagaaacccataatgtcatctgccttcttggcttagagataacttttagctctctttcttctcaatgtctaatatcacctccctgttttcatgtcttccttacacttggtggaataagaaactttttgaagtagaggaaatacattgaggtaacatccttttctctgacagtcaagtagtccatcagaaattggcagtcacttcccagattgtaccagcaaatacacaaggaattctttttgtttgtttcagttcatactagtcccttcccaatccatcagtaaagaccccatctgccttgtccatgccgtttcccaacagggatgtcacttgatatgagaatctc

SEQ ID NO: 122981 - DNA, 563 bp, Homo sapiens
  Payload ID: 4148
  Gene Symbol: CLEC1A
  Gene Name: C-type lectin domain family 1, member A
  ENST ID: ENST00000544104
  CDS Start-End: 107-307
acattaggaatgccttttagtgccttgcttcctgaactagctcacagtagcccggcggcccagggcaatccgaccacatttcactctcaccgctgtaggaatccagatgcaggccaagtacagcagcacgagggacatgctggatgatgatggggacaccaccatgagcctgcattctcaaggctctgccacaactcggcatccagagccccggcgcacaggctggagtagagtggcacgatcacgactcactgcagccttgacctccctggctcaagcaatcctcccacctcagccttctgagtagctgcgactacagagcacagggctccctcttcaacgtggcgaccagtggccctgaccctgctgactttgtgcttggtgctgctgatagggctggcagccctggggcttttgttttttcagtactaccagctctccaatactggtcaagacaccatttctcaaatggaagaaagattaggaaatacgtcccaagagttgcaatctcttcaagtccagaatataaagcttgcaggaagtctgcagcatgtggctgaaaa

SEQ ID NO: 122982 - DNA, 952 bp, Homo sapiens
  Payload ID: 4149
  Gene Symbol: CLEC1B
  Gene Name: C-type lectin domain family 1, member B
  Uniprot ID: Q9P126
  ENST ID: ENST00000298527
  CDS Start-End: 181-870
ctatgaagaagcttcctggaaaacaataagcaaaggaaaacaaatgtgtcccatctcacatggttctaccctactaaagacaggaagatcataaactgacagatactgaaattgtaaagttggaaactacattttgcaaagtcattgaactctgagctcagttgcagtactcgggaagccatgcaggatgaagatggatacatcaccttaaatattaaaactcggaaaccagctctcatctccgttggctctgcatcctcctcctggtggcgtgtgatggctttgattctgctgatcctgtgcgtggggatggttgtcgggctggtggctctggggatttggtctgtcatgcagcgcaattacctacaaggtgagaatgaaaatcgcacaggaactctgcaacaattagcaaagcgcttctgtcaatatgtggtaaaacaatcagaactaaagggcactttcaaaggtcataaatgcagcccctgtgacacaaactggagatattatggagatagctgctatgggttcttcaggcacaacttaacatgggaagagagtaagcagtactgcactgacatgaatgctactctcctgaagattgacaaccggaacattgtggagtacatcaaagccaggactcatttaattcgttgggtcggattatctcgccagaagtcgaatgaggtctggaagtgggaggatggctcggttatctcagaaaatatgtttgagtttttggaagatggaaaaggaaatatgaattgtgcttattttcataatgggaaaatgcaccctaccttctgtgagaacaaacattatttaatgtgtgagaggaaggctggcatgaccaaggtggaccaactaccttaatgcaaagaggtggacaggataacacagataagggctttattgtacaataaaagatatgtatgaatgcatcagtagctgaaaa

SEQ ID NO: 122983 - DNA, 869 bp, Homo sapiens
  Payload ID: 4149
  Gene Symbol: CLEC1B
  Gene Name: C-type lectin domain family 1, member B
  Uniprot ID: Q9P126
  ENST ID: ENST00000348658
  CDS Start-End: 201-791
gtccatgtatctctgagcagctatgaagaagcttcctggaaaacaataagcaaaggaaaacaaatgtgtcccatctcacatggttctaccctactaaagacaggaagatcataaactgacagatactgaaattgtaaagttggaaactacattttgcaaagtcattgaactctgagctcagttgcagtactcgggaagccatgcaggatgaagatggatacatcaccttaaatattaaaactcggaaaccagctctcatctccgctgtcatgcagcgcaattacctacaaggtgagaatgaaaatcgcacaggaactctgcaacaattagcaaagcgcttctgtcaatatgtggtaaaacaatcagaactaaagggcactttcaaaggtcataaatgcagcccctgtgacacaaactggagatattatggagatagctgctatgggttcttcaggcacaacttaacatgggaagagagtaagcagtactgcactgacatgaatgctactctcctgaagattgacaaccggaacattgtggagtacatcaaagccaggactcatttaattcgttgggtcggattatctcgccagaagtcgaatgaggtctggaagtgggaggatggctcggttatctcagaaaatatgtttgagtttttggaagatggaaaaggaaatatgaattgtgcttattttcataatgggaaaatgcaccctaccttctgtgagaacaaacattatttaatgtgtgagaggaaggctggcatgaccaaggtggaccaactaccttaatgcaaagaggtggacaggataacacagataagggctttattgtacaataaaagatatgtatgaatgcatcagtagctg

SEQ ID NO: 122984 - DNA, 783 bp, Homo sapiens
  Payload ID: 4149
  Gene Symbol: CLEC1B
  Gene Name: C-type lectin domain family 1, member B
  ENST ID: ENST00000398937
  CDS Start-End: 1-291
ttcaaaggtcataaatgcagcccctgtgacacaaactggagatattatggagatagctgctatgggttcttcaggcacaacttaacatgggaagagagtaagcagtactgcactgacatgaatgctactctcctgaagattgacaaccggaacattgtggagtacatcaaagccaggactcatttaattcgttgggtcggattatctcgccagaagtcgaatgaggtctggaagtgggaggatggctcggttatctcagaaaatatgaaaacccaaatcatgatattttgaagatcagagatgtggctctccgtcattttggcatcccactgggccgggatctgtatttcactgagaatgctctgctgcacaaactatacaagcccccttccctctaggcccagctactgtcacagaagaggagggggcagaagattgtaagggctggttttaaagaaaaaaattaggtcaaggtcaaacctccaaatcaaggaggggttacaaaaatgcctaaacagctggtaaaacaagtttagttgctttctaaacgattatgtgtcacttttgcatctaccccaaccatgaaaatttatttgcttattatagaattacaggaaaatatttactaacaggataaaaaataccttgtaacaaagcctcttgggtataatactcccagttatgagttatggagataaacatatctatctatatattttttttcagaacaatgcttatgtttgcatagctaattgctgtatgtctttaacaaaagccaagctt

SEQ ID NO: 122985 - DNA, 3054 bp, Homo sapiens
  Payload ID: 4149
  Gene Symbol: CLEC1B
  Gene Name: C-type lectin domain family 1, member B
  Uniprot ID: Q9P126
  ENST ID: ENST00000428126
  CDS Start-End: 271-861
gagatggttcaactctcttacttggttatttccatctcggttattccttgctccagcagaatcctgaaatgtccatgtatctctgagcagctatgaagaagcttcctggaaaacaataagcaaaggaaaacaaatgtgtcccatctcacatggttctaccctactaaagacaggaagatcataaactgacagatactgaaattgtaaagttggaaactacattttgcaaagtcattgaactctgagctcagttgcagtactcgggaagccatgcaggatgaagatggatacatcaccttaaatattaaaactcggaaaccagctctcatctccgctgtcatgcagcgcaattacctacaaggtgagaatgaaaatcgcacaggaactctgcaacaattagcaaagcgcttctgtcaatatgtggtaaaacaatcagaactaaagggcactttcaaaggtcataaatgcagcccctgtgacacaaactggagatattatggagatagctgctatgggttcttcaggcacaacttaacatgggaagagagtaagcagtactgcactgacatgaatgctactctcctgaagattgacaaccggaacattgtggagtacatcaaagccaggactcatttaattcgttgggtcggattatctcgccagaagtcgaatgaggtctggaagtgggaggatggctcggttatctcagaaaatatgtttgagtttttggaagatggaaaaggaaatatgaattgtgcttattttcataatgggaaaatgcaccctaccttctgtgagaacaaacattatttaatgtgtgagaggaaggctggcatgaccaaggtggaccaactaccttaatgcaaagaggtggacaggataacacagataagggctttattgtacaataaaagatatgtatgaatgcatcagtagctgaaaattgcttatttctccctttcttctcactggagttatttttaatattatctttcctatcagaattacctagtcccttctttgaatatacagaagccatcacgtgagtttatcatttgcttcccaattgttctattttcctttaattttctttcttcttgtccttcatttctaattacctgaacatggtatgatttactgcatcttcagatatacacatataacatcaaaatcaggccaatataggttagggcttaattaatataagttgtgcaaaatatctatgtttgaaatctgtccaaaatatctaagtttgaaaggcggtgtaagatagtaaaaagaatattaaacttagaatcagcaaaataatttagatgtcaattaactaaattacaatcatgaacaagtttcataacctctttaacttcccttttctcatatttaaaataggaataataacaaccatcttttatatctcacagttctacaacctaaaatagaactttagagtgttaactgtaccagaaactccatgaaagcgaacactatgacttccccattcactattctcttaccagcaccaacccgaaaccctggctcacaaaacagagagatatttgtttctctttgtataagatagttcatgagaaaaatagctcaatcattaaaacattacgcaaatagaattactattccaagtctacctctggttagattcaacagtagtaattttctgcgctagagaaggaaaagaaagtttgcaagaaaactcactgggtttgtaaaatgaataaatgcttcttaagtttcagaggctactagacagaaggacaagtaaaaatgctttaattagtattttcctaacagttctgtgctttatttttgctgagtaactcaggaagtatttacagaatatgtggaaaggcacccttttacaggataataggaaaaaattgcatttctttcccacagcttcccttttttaactagtggctaccatttacgaacatgattctcaaacatctcaacggaggttttggttaaaacatagagaaaccaaataggaaactcaaatgctgatgttactcagtgggaagactgaggagacacagagacctgggtttttaccagcatcacgacacaattctcatacaagtagtctttaatacagttagagaaatatcactactttagaacttactctctatctggctttggataagtaatgttctcaccttgaaatgggtttaatattattaccttgctcataagttaattgtgaagctcatttaatatgattatataaagtatcgatcagaataccaagtatgtaatacatactcaataaatatgtgttactcttaaagctttgtgcgctaacactgaaagacacttgaatctttatcttttttctagcctatcaataattaagcagatttggagggcttaggaaaaataatagaaatacctcaaattttacttgttacttcaaatgtctggagatcttggatttgggtgatggtatcagtatgttttttattttgaattgtctatttagagaaactaaataggaaccaataattcagaaaactgtacaaaattagcaactcaactttgtttcatctccctaaaatggaaaaacatatgtgtatacatccctatagcacacataaacttagaagaataatatcttagtgcatggcaacaatacaattaaaaatgtaggccaatcactgtgattctttttctggtattcatatctaaagtatcttatacataaaatcaaaatagcacaaacgttagtagcacagatcagaccacctcatttcaaatactaaatcttctacatgtcatctaagtgaactccagcaaaatttgacttctgtcttcttcaatttaaaactaacttacaggcatgcctcggaaatattgtgggttcagttccagaccaccacaataaagcaattattgcaataaagtgagtcacattaattatttgctttcccaattcgtgtaaaagttatgtttgagctacaacgtcttctattaagtatacaacagcattatgtctggaaaatgtacatagttttattaaaaatagtttattgctaaaaa

SEQ ID NO: 122986 - DNA, 1797 bp, Homo sapiens
  Payload ID: 4150
  Gene Symbol: CLEC10A
  Gene Name: C-type lectin domain family 10, member A
  Uniprot ID: Q8IUN9
  ENST ID: ENST00000254868
  CDS Start-End: 330-1280
aaacccaactctccccacccacacatggtctctgtgtgttctaatccctgttcattctcatttactgtctaaagttgaggagatgggatgtcccagatgatagggctcctgggatttcagacccaagaccagcaggactccagtcacctctaccccagctctccaggacacagcgctcccaactctgagtgacgtcccacctctggtccttgcagcacaaccaacgtgggaatcacaccctccagacctcccacagctccaccccagactgggcgccggccctgcctccatttcagctgtgacaacctcagagccgtgttggcccaagcatgacaaggacgtatgaaaacttccagtacttggagaataaggtgaaagtccaggggtttaaaaatgggccacttcctctccagtccctcctgcagcgtctctgctctgggccctgccatctcctgctgtccctgggcctcggcctcctgctgctggtcatcatctgtgtggttggattccaaaattccaaatttcagagggacctggtgaccctgagaacagattttagcaacttcacctcaaacactgtggcggagatccaggcactgacttcccagggcagcagcttggaagaaacgatagcatctctgaaagctgaggtggagggtttcaagcaggaacggcaggcaggggtatctgagctccaggaacacactacgcagaaggcacacctaggccactgtccccactgcccatctgtgtgtgtcccagttcattctgaaatgctcctgcgagtccagcagctggtgcaagacctgaagaaactgacctgccaggtggctactctcaacaacaatgcctccactgaagggacctgctgccctgtcaactgggtggagcaccaagacagctgctactggttctctcactctgggatgtcctgggccgaggctgagaagtactgccagctgaagaacgcccacctggtggtcatcaactccagggaggagcagaattttgtccagaaatatctaggctccgcatacacctggatgggcctcagtgaccctgaaggagcctggaagtgggtggatggaacagactatgcgaccggcttccagaactggaagccaggccagccagacgactggcaggggcacgggctgggtggaggcgaggactgtgctcacttccatccagacggcaggtggaatgacgacgtctgccagaggccctaccactgggtctgcgaggctggcctgggtcagaccagccaggagagtcactgagctgcctttggtgggaccacccggccacagaaatggcggtgggaggaggactcttctcacgacctcctcgcaagaccgctctgggagagaaataagcactgggagattggaagcactgctaacattttgaatttttttctctttaattttaaaaagatggtatagtgttcttaagcttttattttttttccaacttttgaaagtcaacttcatgaaggtataatttttacataataaaaatgcactcatttaaagagtagagatgactttgacaaatatgcatgcctaggtgactaccactccgatcgcaatagataacattgccatcgcccccaccagtcccctcatgcctctgggcagtccaaccacttccctgtttccaggccagtgatctacttctttttcactatttattggccttgcctcttctagagcttctagaacttcatataagtgaaatcatacactctcgtgtatatacttcatataagtgaatatatactctcgtgagaactta

SEQ ID NO: 122987 - DNA, 1646 bp, Homo sapiens
  Payload ID: 4150
  Gene Symbol: CLEC10A
  Gene Name: C-type lectin domain family 10, member A
  ENST ID: ENST00000416562
  CDS Start-End: 289-1158
taatccctgttcattctcatttactgtctaaagttgaggagatgggatgtcccagatgatagggctcctgggatttcagacccaagaccagcaggactccagtcacctctaccccagctctccaggacacagcgctcccaactctgagtgacgtcccacctctggtccttgcagcacaaccaacgtgggaatcacaccctccagacctcccacagctccaccccagactgggcgccggccctgcctccatttcagctgtgacaacctcagagccgtgttggcccaagcatgacaaggacgtatgaaaacttccagtacttggagaataaggtgaaagtccaggggtttaaaaatgggccacttcctctccagtccctcctgcagcgtctctgctctgggccctgccatctcctgctgtccctgggcctcggcctcctgctgctggtcatcatctgtgtggttggattccaaaattccaaatttcagagggacctggtgaccctgagaacagattttagcaacttcacctcaaacactgtggcggagatccaggcactgacttcccagggcagcagcttggaagaaacgatagcatctctgaaagctgaggtggagggtttcaagcaggaacggcaggcagttcattctgaaatgctcctgcgagtccagcagctggtgcaagacctgaagaaactgacctgccaggtggctactctcaacaacaatgcctccactgaagggacctgctgccctgtcaactgggtggagcaccaagacagctgctactggttctctcactctgggatgtcctgggccgaggctgagaagtactgccagctgaagaacgcccacctggtggtcatcaactccagggaggagcagaattttgtccagaaatatctaggctccgcatacacctggatgggcctcagtgaccctgaaggagcctggaagtgggtggatggaacagactatgcgaccggcttccagaactggaagccaggccagccagacgactggcaggggcacgggctgggtggaggcgaggactgtgctcacttccatccagacggcaggtggaatgacgacgtctgccagaggccctaccactgggtctgcgaggctggcctgggtcagaccagccaggagagtcactgagctgcctttggtgggaccacccggccacagaaatggcggtgggaggaggactcttctcacgacctcctcgcaagaccgctctgggagagaaataagcactgggagattggaagcactgctaacattttgaatttttttctctttaattttaaaaagatggtatagtgttcttaagcttttattttttttccaacttttgaaagtcaacttcatgaaggtataatttttacataataaaaatgcactcatttaaagagtagagatgactttgacaaatatgcatgcctaggtgactaccactccgatcgcaatagataacattgccatcgcccccaccagtcccctcatgcctctgggcagtccaaccacttccctgtttccaggccagtgatctacttctttttcactatttattggccttgcctcttctagagcttctagaacttcatataagtgaaatcatacactctcgtgtatatacttcatat

SEQ ID NO: 122988 - DNA, 1800 bp, Homo sapiens
  Payload ID: 4150
  Gene Symbol: CLEC10A
  Gene Name: C-type lectin domain family 10, member A
  Uniprot ID: Q8IUN9
  ENST ID: ENST00000576617
  CDS Start-End: 271-1041
atttactgtctaaagttgaggagatgggatgtcccagatgatagggctcctgggatttcagacccaagaccagcaggactccagtcacctctaccccagctctccaggacacagcgctcccaactctgagtgacgtcccacctctggtccttgcagcacaaccaacgtgggaatcacaccctccagacctcccacagctccaccccagactgggcgccggccctgcctccatttcagctgtgacaacctcagagccgtgttggcccaagcatgacaaggacgtatgaaaacttccagtacttggagaataaggtgaaagtccaggggtttaaaaatgggccacttcctctccagtccctcctgcagcgtctctgctctgggccctgccatctcctgctgtccctgggcctcggcctcctgctgctggtcatcatctgtgtggttggattccaaaattccaaatttcagagggacctggtgaccctgagaacagattttagcaacttcacctcaaacactgtggcggagatccaggcactgacttcccagggcagcagcttggaagaaacgatagcatctctgaaagctgaggtggagggtttcaagcaggaacggcaggcagttcattctgaaatgctcctgcgagtccagcagctggtgcaagacctgaagaaactgacctgccaggtggctactctcaacaacaatgcctccactgaagggacctgctgccctgtcaactgggtggagcaccaagacagctgctactggttctctcactctgggatgtcctgggccgaggctgagaagtactgccagctgaagaacgcccacctggtggtcatcaactccagggaggagcaggtgagggcttctggtactcagttcctaagacatgtcccatttagggaaatggttcttaagcttggccgcacattggaatcatctgggagcttccagaatgactgtcatctgtgccacaccctcagagatttaataggcctgagcatccagagaaacatctccaaactcctcagttgatttaacgaagagctaaagttgagaatcactagtttaaggagttggctgggatgggaagaagtcaccactgcccttctgtcaccgcagaattttgtccagaaatatctaggctccgcatacacctggatgggcctcagtgaccctgaaggagcctggaagtgggtggatggaacagactatgcgaccggcttccagtgagtgcaccctggctttctgtgccaatgtcctccgtcagcgtttcccccagggatctgactggcagcctctcctcccctgaactgaattctactccatctacccttcctagcttgctgttgtcttttcctctcaggaactggaagccaggccagccagacgactggcaggggcacgggctgggtggaggcgaggactgtgctcacttccatccagacggcaggtggaatgacgacgtctgccagaggccctaccactgggtctgcgaggctggcctgggtcagaccagccaggagagtcactgagctgcctttggtgggaccacccggccacagaaatggcggtgggaggaggactcttctcacgacctcctcgcaagaccgctctgggagagaaataagcactgggagattggaagcactgctaacattttgaatttttttctctttaattttaaaaagatggtatagtgttcttaagcttttattttttttccaacttttgaaagtcaacttcatgaaggtataatttttacataataaaaatgcactcatttaaagagta

SEQ ID NO: 122989 - DNA, 1442 bp, Homo sapiens
  Payload ID: 4150
  Gene Symbol: CLEC10A
  Gene Name: C-type lectin domain family 10, member A
  Uniprot ID: Q8IUN9
  ENST ID: ENST00000571664
  CDS Start-End: 306-1184
atggtctctgtgtgttctaatccctgttcattctcatttactgtctaaagttgaggagatgggatgtcccagatgatagggctcctgggatttcagacccaagaccagcaggactccagtcacctctaccccagctctccaggacacagcgctcccaactctgagtgacgtcccacctctggtccttgcagcacaaccaacgtgggaatcacaccctccagacctcccacagctccaccccagactgggcgccggccctgcctccatttcagctgtgacaacctcagagccgtgttggcccaagcatgacaaggacgtatgaaaacttccagtacttggagaataaggtgaaagtccaggggtttaaaaatgggccacttcctctccagtccctcctgcagcgtctctgctctgggccctgccatctcctgctgtccctgggcctcggcctcctgctgctggtcatcatctgtgtggttggattccaaaattccaaatttcagagggacctggtgaccctgagaacagattttagcaacttcacctcaaacactgtggcggagatccaggcactgacttcccagggcagcagcttggaagaaacgatagcatctctgaaagctgaggtggagggtttcaagcaggaacggcaggcagttcattctgaaatgctcctgcgagtccagcagctggtgcaagacctgaagaaactgacctgccaggtggctactctcaacaacaatggtgaggaagcctccactgaagggacctgctgccctgtcaactgggtggagcaccaagacagctgctactggttctctcactctgggatgtcctgggccgaggctgagaagtactgccagctgaagaacgcccacctggtggtcatcaactccagggaggagcagaattttgtccagaaatatctaggctccgcatacacctggatgggcctcagtgaccctgaaggagcctggaagtgggtggatggaacagactatgcgaccggcttccagaactggaagccaggccagccagacgactggcaggggcacgggctgggtggaggcgaggactgtgctcacttccatccagacggcaggtggaatgacgacgtctgccagaggccctaccactgggtctgcgaggctggcctgggtcagaccagccaggagagtcactgagctgcctttggtgggaccacccggccacagaaatggcggtgggaggaggactcttctcacgacctcctcgcaagaccgctctgggagagaaataagcactgggagattggaagcactgctaacattttgaatttttttctctttaattttaaaaagatggtatagtgttcttaagcttttattttttttccaacttttgaaagtcaacttcatgaaggtataatttttacataataaaaatgcactcatttaaagagt

SEQ ID NO: 122990 - DNA, 742 bp, Homo sapiens
  Payload ID: 4150
  Gene Symbol: CLEC10A
  Gene Name: C-type lectin domain family 10, member A
  ENST ID: ENST00000576549
  CDS Start-End: 1-410
gcagcagcttggaagaaacgatagcatctctgaaagctgaggtggagggtttcaagcaggaacggcaggcagttcattctgaaatgctcctgcgagtccagcagctggtgcaagacctgaagaaactgacctgccaggtggctactctcaacaacaatgcctccactgaagggacctgctgccctgtcaactgggtggagcaccaagacagctgctactggttctctcactctgggatgtcctgggccgaggctgagaagtactgccagctgaagaacgcccacctggtggtcatcaactccagggaggagcaggaactggaagccaggccagccagacgactggcaggggcacgggctgggtggaggcgaggactgtgctcacttccatccagacggcaggtggaatgacgacgtctgccagaggccctaccactgggtctgcgaggctggcctgggtcagaccagccaggagagtcactgagctgcctttggtgggaccacccggccacagaaatggcggtgggaggaggactcttctcacgacctcctcgcaagaccgctctgggagagaaataagcactgggagattggaagcactgctaacattttgaatttttttctctttaattttaaaaagatggtatagtgttcttaagcttttattttttttccaacttttgaaagtcaacttcatgaaggtataatttttacataataaaaatgcactcatttaaagagta

SEQ ID NO: 122991 - DNA, 1419 bp, Homo sapiens
  Payload ID: 4151
  Gene Symbol: CLEC11A
  Gene Name: C-type lectin domain family 11, member A
  Uniprot ID: Q9Y240
  ENST ID: ENST00000250340
  CDS Start-End: 198-1169
cacacagagaagcagaggagaccaacggaccggacagagacgaggagaggaacaggaagagagaagctgggagaatcgggaacctgggggctagtgacctgcacacagggcaggggcactcggcagttcccagaggccacccctcccaccccagacatccagacatctggaactttgggtgccaagagtccagcttaatgcaggcagcctggcttttgggggctttggtggtcccccagctcttgggctttggccatggggctcggggagcagagagggagtgggagggaggctggggaggtgcccaggaggaggagcgggagagggaggccctgatgctgaagcatctgcaggaagccctaggactgcctgctgggaggggggatgagaatcctgccggaactgttgagggaaaagaggactgggagatggaggaggaccagggggaggaagaggaggaggaagcaacgccaaccccatcctccggccccagcccctctcccacccctgaggacatcgtcacttacatcctgggccgcctggccggcctggacgcaggcctgcaccagctgcacgtccgtctgcacgcgttggacacccgcgtggtcgagctgacccaggggctgcggcagctgcggaacgcggcaggcgacacccgcgatgccgtgcaagccctgcaggaggcgcagggtcgcgccgagcgcgagcacggccgcttggagggctgcctgaaggggctgcgcctgggccacaagtgcttcctgctctcgcgcgacttcgaagctcaggcggcggcgcaggcgcggtgcacggcgcggggcgggagcctggcgcagccggcagaccgccagcagatggaggcgctcactcggtacctgcgcgcggcgctcgctccctacaactggcccgtgtggctgggcgtgcacgatcggcgcgccgagggcctctacctcttcgaaaacggccagcgcgtgtccttcttcgcctggcatcgctcaccccgccccgagctcggcgcccagcccagcgcctcgccgcatccgctcagcccggaccagcccaacggtggcacgctcgagaactgcgtggcgcaggcctctgacgacggctcctggtgggaccacgactgccagcggcgtctctactacgtctgcgagttccccttctagcggggccggtaccccgcctccctgcccatcccaccacccggcctttccctgcgccgtgcccaccctcctccggaatctcccttcccttcctggccacgaatggcagcgtcctccccgacccccagtctgggcgcttctgggagggctcttgcggtgccggcactcctccttgttagtgtctttccttgaaggggcgggcaccaggctaggtccggtgccaataaatccttgtggaatctgacttgagggg

SEQ ID NO: 122992 - DNA, 1026 bp, Homo sapiens
  Payload ID: 4151
  Gene Symbol: CLEC11A
  Gene Name: C-type lectin domain family 11, member A
  ENST ID: ENST00000599973
  CDS Start-End: 4-957
ttaatgcaggcagcctggcttttgggggctttggtggtcccccagctcttgggctttggccatggggctcggggagcagagagggagtgggagggaggctggggaggtgcccaggaggaggagcgggagagggaggccctgatgctgaagcatctgcaggaagccctaggactgcctgctgggaggggggatgagaatcctgccggaactgttgagggaaaagaggactgggagatggaggaggaccagggggaggaagaggaggaggaagcaacgccaaccccatcctccggccccagcccctctcccacccctgaggacatcgtcacttacatcctgggccgcctggccggcctggacgcaggcctgcaccagctgcacgtccgtctgcacgcgttggacacccgcgtggtcgagctgacccaggggctgcggcagctgcggaacgcggcaggcgacacccgcgatgccgtgcaagccctgcaggaggcgcagggtcgcgccgagcgcgagcacggccgcttggaggactctgaatgcatgaccccgcctccttctctacccggccccgcccacaggctgcctgaaggggctgcgcctgggccacaagtgcttcctgctctcgcgcgacttcgaagctcaggcggcggcgcaggcgcggtgcacggcgcggggcgggagcctggcgcagccggcagaccgccagcagatggaggcgctcactcggtacctgcgcgcggcgctcgctccctacaactggcccgtgtggctgggcgtgcacgatcggcgcgccgagggcctctacctcttcgaaaacggccagcgcgtgtccttcttcgcctggcatcgctcaccccgccccgagctcggcgcccagcccagcgcctcgccgcatccgctcagcccggaccagcccaacggtggcacgctcgagaactgcgtggcgcaggcctctgacgacggctcctggtgggaccacgactgccagcggcgtctctactacgtctgcgagttccccttctagcg

SEQ ID NO: 122993 - DNA, 1128 bp, Homo sapiens
  Payload ID: 4151
  Gene Symbol: CLEC11A
  Gene Name: C-type lectin domain family 11, member A
  ENST ID: ENST00000617718
  CDS Start-End: 140-877
gagagaagctgggagaatcgggaacctgggggctagtgacctgcacacagggcaggggcactcggcagttcccagaggccacccctcccaccccagacatccagacatctggaactttgggtgccaagagtccagcttaatgcaggcagcctggcttttgggggctttggtggtcccccagctcttgggctttggccatggggctcggggagcagagagggagtgggagggaggctggggaggtgcccaggaggaggagcgggagagggaggccctgatgctgaagcatctgcaggaagccctaggactgcctgctgggaggggggatgagaatcctgccggaactgttgagggaaaagaggactgggagatggaggaggaccagggggaggaagaggaggaggaagcaacgccaaccccatcctccggccccagcccctctcccacccctgaggacatcgtcacttacatcctgggccgcctggccggcctggacgcaggcctgcaccagctgcacgtccgtctgcacgcgttggacacccgcgtggtcgagctgacccaggggctgcggcagctgcggaacgcggcaggcgacacccgcgatgccgtgcaagccctgcaggaggcgcagggtcgcgccgagcgcgagcacggccgcttggagggctgcctgaaggggctgcgcctgggccacaagtgcttcctgctctcgcgcgacttcgaagcccagcccagcgcctcgccgcatccgctcagcccggaccagcccaacggtggcacgctcgagaactgcgtggcgcaggcctctgacgacggctcctggtgggaccacgactgccagcggcgtctctactacgtctgcgagttccccttctagcggggccggtaccccgcctccctgcccatcccaccacccggcctttccctgcgccgtgcccaccctcctccggaatctcccttcccttcctggccacgaatggcagcgtcctccccgacccccagtctgggcgcttctgggagggctcttgcggtgccggcactcctccttgttagtgtctttccttgaaggggcgggcaccaggctaggtccggtgccaataaatccttgtggaatctgacttgaggggc

SEQ ID NO: 122994 - DNA, 1549 bp, Homo sapiens
  Payload ID: 4152
  Gene Symbol: CLEC12A
  Gene Name: C-type lectin domain family 12, member A
  Uniprot ID: Q5QGZ9
  ENST ID: ENST00000304361
  CDS Start-End: 183-980
tttgcagacatatgggtgattggtacagtaggtttataaacagaagtttaaacttgtaagcttaagcttccgtttataaacagaagtttaaaattataggtcctgtttaacattcagctctgttaactcactcatctttttgtgtttttacactttgtcaagatttctttacatattcatcaatgtctgaagaagttacttatgcagatcttcaattccagaactccagtgagatggaaaaaatcccagaaattggcaaatttggggaaaaagcacctccagctccctctcatgtatggcgtccagcagccttgtttctgactcttctgtgccttctgttgctcattggattgggagtcttggcaagcatgtttcacgtaactttgaagatagaaatgaaaaaaatgaacaaactacaaaacatcagtgaagagctccagagaaatatttctctacaactgatgagtaacatgaatatctccaacaagatcaggaacctctccaccacactgcaaacaatagccaccaaattatgtcgtgagctatatagcaaagaacaagagcacaaatgtaagccttgtccaaggagatggatttggcataaggacagctgttatttcctaagtgatgatgtccaaacatggcaggagagtaaaatggcctgtgctgctcagaatgccagcctgttgaagataaacaacaaaaatgcattggaatttataaaatcccagagtagatcatatgactattggctgggattatctcctgaagaagattccactcgtggtatgagagtggataatataatcaactcctctgcctgggttataagaaacgcacctgacttaaataacatgtattgtggatatataaatagactatatgttcaatattatcactgcacttataaaaaaagaatgatatgtgagaagatggccaatccagtgcagcttggttctacatattttagggaggcatgaggcatcaatcaaatacatttaaggagtgtagggggtgggggttctaggctataggtaaatttaaatattttctggttgacaattagttgagtttgtctgaagacctgggattttatcatgcagatgaaacatccaggtagcaagcttcagagagaatagactgtgaatgttaatgccagagaggtataatgaagcatgtcccacctcccactttccatcatggcctgaaccctggaggaagaggaagtccattcagatagttgtggggggccttcgaattttcattttcatttacgttcttccccttctggccaagatttgccagaggcaacatcaaaaaccagcaaattttaattttgtcccacagcgttgctagggtggcatggctccccatctcgggtccatcctatacttccatgggactccctatggctgaaggccttatgagtcaaaggacttatagccaattgattgttctaggccaggtaagaatggatatggacatgcatttattacctcttaaaattattattttaagtaaaagccaataaacaaaaacgaaaaggcaa

SEQ ID NO: 122995 - DNA, 699 bp, Homo sapiens
  Payload ID: 4152
  Gene Symbol: CLEC12A
  Gene Name: C-type lectin domain family 12, member A
  Uniprot ID: Q5QGZ9
  ENST ID: ENST00000350667
  CDS Start-End: 1-699
atgtctgaagaagttacttatgcagatcttcaattccagaactccagtgagatggaaaaaatcccagaaattggcaaatttggggaaaaagttcacgtaactttgaagatagaaatgaaaaaaatgaacaaactacaaaacatcagtgaagagctccagagaaatatttctctacaactgatgagtaacatgaatatctccaacaagatcaggaacctctccaccacactgcaaacaatagccaccaaattatgtcgtgagctatatagcaaagaacaagagcacaaatgtaagccttgtccaaggagatggatttggcataaggacagctgttatttcctaagtgatgatgtccaaacatggcaggagagtaaaatggcctgtgctgctcagaatgccagcctgttgaagataaacaacaaaaatgcattggaatttataaaatcccagagtagatcatatgactattggctgggattatctcctgaagaagattccactcgtggtatgagagtggataatataatcaactcctctgcctgggttataagaaacgcacctgacttaaataacatgtattgtggatatataaatagactatatgttcaatattatcactgcacttataaaaaaagaatgatatgtgagaagatggccaatccagtgcagcttggttctacatattttagggaggcatga

SEQ ID NO: 122996 - DNA, 1428 bp, Homo sapiens
  Payload ID: 4152
  Gene Symbol: CLEC12A
  Gene Name: C-type lectin domain family 12, member A
  Uniprot ID: Q5QGZ9
  ENST ID: ENST00000355690
  CDS Start-End: 32-859
ggaagaacagcctttcaaatttgacttctgcatgtggatagatttctttacatattcatcaatgtctgaagaagttacttatgcagatcttcaattccagaactccagtgagatggaaaaaatcccagaaattggcaaatttggggaaaaagcacctccagctccctctcatgtatggcgtccagcagccttgtttctgactcttctgtgccttctgttgctcattggattgggagtcttggcaagcatgtttcacgtaactttgaagatagaaatgaaaaaaatgaacaaactacaaaacatcagtgaagagctccagagaaatatttctctacaactgatgagtaacatgaatatctccaacaagatcaggaacctctccaccacactgcaaacaatagccaccaaattatgtcgtgagctatatagcaaagaacaagagcacaaatgtaagccttgtccaaggagatggatttggcataaggacagctgttatttcctaagtgatgatgtccaaacatggcaggagagtaaaatggcctgtgctgctcagaatgccagcctgttgaagataaacaacaaaaatgcattggaatttataaaatcccagagtagatcatatgactattggctgggattatctcctgaagaagattccactcgtggtatgagagtggataatataatcaactcctctgcctgggttataagaaacgcacctgacttaaataacatgtattgtggatatataaatagactatatgttcaatattatcactgcacttataaaaaaagaatgatatgtgagaagatggccaatccagtgcagcttggttctacatattttagggaggcatgaggcatcaatcaaatacatttaaggagtgtagggggtgggggttctaggctataggtaaatttaaatattttctggttgacaattagttgagtttgtctgaagacctgggattttatcatgcagatgaaacatccaggtagcaagcttcagagagaatagactgtgaatgttaatgccagagaggtataatgaagcatgtcccacctcccactttccatcatggcctgaaccctggaggaagaggaagtccattcagatagttgtggggggccttcgaattttcattttcatttacgttcttccccttctggccaagatttgccagaggcaacatcaaaaaccagcaaattttaattttgtcccacagcgttgctagggtggcatggctccccatctcgggtccatcctatacttccatgggactccctatggctgaaggccttatgagtcaaaggacttatagccaattgattgttctaggccaggtaagaatggatatggacatgcatttattacctcttaaaattattattttaagtaaaagccaataaacaaaaacgaaaaggcaa

SEQ ID NO: 122997 - DNA, 570 bp, Homo sapiens
  Payload ID: 4152
  Gene Symbol: CLEC12A
  Gene Name: C-type lectin domain family 12, member A
  ENST ID: ENST00000396507
  CDS Start-End: 76-570
tttgcagacatatgggtgattggtacagtaggtttataaacagaagtttaaacttatttctttacatattcatcaatgtctgaagaagttacttatgcagatcttcaattccagaactccagtgagatggaaaaaatcccagaaattggcaaatttggggaaaaagcacctccagctccctctcatgtatggcgtccagcagccttgtttctgactcttctgtgccttctgttgctcattggattgggagtcttggcaagcatgtttcacgtaactttgaagatagaaatgaaaaaaatgaacaaactacaaaacatcagtgaagagctccagagaaatatttctctacaactgatgagtaacatgaatatctccaacaagatcaggaacctctccaccacactgcaaacaatagccaccaaattatgtcgtgagctatatagcaaagaacaagagcacaaatgtaagccttgtccaaggagatggatttggcataaggacagctgttatttcctaagtgatgatgtccaaacatggcaggagagtaaaatggcctgtgctgctcagaat

SEQ ID NO: 122998 - DNA, 1515 bp, Homo sapiens
  Payload ID: 4152
  Gene Symbol: CLEC12A
  Gene Name: C-type lectin domain family 12, member A
  Uniprot ID: Q5QGZ9
  ENST ID: ENST00000434319
  CDS Start-End: 163-804
tggtacagtaggtttataaacagaagtttaaacttgtaagcttaagcttccgtttataaacagaagtttaaaattataggtcctgtttaacattcagctctgttaactcactcatctttttgtgtttttacactttgtcaagatttctttacatattcatcaatgtctgaagaagttacttatgcagatcttcaattccagaactccagtgagatggaaaaaatcccagaaattggcaaatttggggaaaaagcacctccagctccctctcatgtatggcgtccagcagccttgtttctgactcttctgtgccttctgttgctcattggattgggagtcttggcaagcatgtttcacgtaactttgaagatagaaatgaaaaaaatgaacaaactacaaaacatcagtgaagagctccagagaaatatttctctacaactgatgagtaacatgaatatctccaacaagatcaggaacctctccaccacactgcaaacaatagccaccaaattatgtcgtgagctatatagcaaagaacaagagcacaaatgtaagccttgtccaaggagatggatttggcataaggacagctgttatttcctaagtgatgatgtccaaacatggcaggagagtaaaatggcctgtgctgctcagaatgccagcctgttgaagataaacaacaaaaatgcattggaatttataaaatcccagagtagatcatatgactattggctgggattatctcctgaagaagattccactcgtggtatgagagtggataatataatcaactcctctgcctgaaaatatcaaacgaagaaagaaaccagagtctcaacctgctggacactattggaagtccatcatttaacacgtttttagtatatacttttagcaggagacagctctgagtcaactgtgttgaggtgccaccacagcgagtttaggcactcagatccctgcatactcatcacattgggccataatggcaaatagaattttttgttttgttttgtttgtttgctttttctttcacatagaaatagtaagtgtaggagtgtgggtcagaaagaaaaggtggccctacctctgatggttggcaatgataggatacaatgggagataagctatctacaaatggagtggagaaggatatatatttcaaaggcctaatttgtagtgaaagactagagacaaaggtaatgtgtgtgtcaggagagagtacagatggaatcttgttttgcaaacgtagaatatgtatgtgtttgtaattattgcaaatggaatggtaatctataatggaatggaaaacattgtagatattttcagttatcaaaaagaaaactgaaaaagtatataataattgtatgtatgatatatatatgtgtgtgtgtgtgtatatatatcttcactttataactctgtgttgttttggggtttgtttctgaaagggggttgtaataaatgacatctgtactatgtcaccacaaataaatctcattcttaaacatttaa

SEQ ID NO: 122999 - DNA, 1097 bp, Homo sapiens
  Payload ID: 4153
  Gene Symbol: CLEC12B
  Gene Name: C-type lectin domain family 12, member B
  Uniprot ID: Q2HXU8
  ENST ID: ENST00000338896
  CDS Start-End: 129-959
agtagagtgtgtctgggtcagctgagtgactacatcaaagctcccagccttgaaaaacacatgctgttcccaggcctcaagatattgaaacattaattagataatttaaagtagcgttttcttctacaatgtctgaagaagtgacctacgcgacactcacatttcaggattctgctggagcaaggaataaccgagatggaaataacctaagaaaaagagggcatccagctccatctcccatttggcgtcatgctgctctgggtctggtaactctttgcctgatgttgctgattgggctggtgacattggggatgatgtttttgcagatatctaatgacattaactcagattcagagaaattgagtcaacttcagaaaaccatccaacagcagcaggataacttatcccagcaactgggcaactccaacaacttgtccatggaggaggaatttctcaagtcacagatctccagtgtactgaagaggcaggaacaaatggccatcaaactgtgccaagagctaatcattcatacttcagaccacagatgtaatccatgtcctaagatgtggcaatggtaccaaaatagttgctactattttacaacaaatgaggagaaaacctgggctaacagtagaaaggactgcatagacaagaactccaccctagtgaagatagacagtttggaagaaaaggattttcttatgtcacagccattactcatgttttcgttcttttggctgggattatcatgggactcctctggcagaagttggttctgggaagatggctctgttccctctccatccttatttagtactaaagaacttgaccagatcaatggatccaaaggatgtgcttattttcaaaaaggaaatatttatatttctcgctgtagtgctgaaattttttggatttgcgagaagacagctgccccagtgaagactgaggatttggattagtatgcttcttccaaattctccaagaagtaagagacttgtgagtaagctcatatgaggaaagaggaaactacggtaccagagccaaaccagcttttaaaatgactgtgtatttacattatcagacaaatgaacttgttt

SEQ ID NO: 123000 - DNA, 3029 bp, Homo sapiens
  Payload ID: 4153
  Gene Symbol: CLEC12B
  Gene Name: C-type lectin domain family 12, member B
  Uniprot ID: Q2HXU8
  ENST ID: ENST00000396502
  CDS Start-End: 129-827
agtagagtgtgtctgggtcagctgagtgactacatcaaagctcccagccttgaaaaacacatgctgttcccaggcctcaagatattgaaacattaattagataatttaaagtagcgttttcttctacaatgtctgaagaagtgacctacgcgacactcacatttcaggattctgctggagcaaggaataaccgagatggaaataacctaagaaaaagagggcatccagctccatctcccatttggcgtcatgctgctctgggtctggtaactctttgcctgatgttgctgattgggctggtgacattggggatgatgtttttgcagatatctaatgacattaactcagattcagagaaattgagtcaacttcagaaaaccatccaacagcagcaggataacttatcccagcaactgggcaactccaacaacttgtccatggaggaggaatttctcaagtcacagatctccagtgtactgaagaggcaggaacaaatggccatcaaactgtgccaagagctaatcattcatacttcagaccacagatgtaatccatgtcctaagatgtggcaatggtaccaaaatagttgctactattttacaacaaatgaggagaaaacctgggctaacagtagaaaggactgcatagacaagaactccaccctagtgaagatagacagtttggaagaaaaggattttcttatgtcacagccattactcatgttttcgttcttttggctgggattatcatgggactcctctggcagaagttggttctgggaagatggctctgttccctctccatccttgtacgtctctaactattgagggtaaacacaagctttccatggaatcctgggaaaattaataatgattgtgagaattataaatacagacataaaaagaggagtacaacatactgagaaaagagctccagtaacaaatattgaaaggaggtatagttcatttcatctctgtgacaaatttatagcaaggcactgaattttatcttttggtagaaatgtgtttatttaacacacacacacacctaatactacattcaaagtattttataaatactaacccttgaagaaagcagttatattcccattttataggtagaaatattataatagagagattaagtaacttgcctgaggtcactcagctcataaattgcactttagggattgtgcactcagtcactcagctattctgactctccagcacctacaatccaaaagggtgctgctggtcataagaacacatatcaacacatttatttatactaaataactgtcaaccattttctaacaaaaagtaagactgaattgactgattagttcaacaattagtgtcatgttgaggacttgccaattacaatatacggcaagtgtcttttatgaattaaaatgaactaaaccttccacttcagggtttggatgaaactatttaaaggacaaatagaatatataacacttggaaaatttcaatttttttaactatttaaagttatgaaaaaatagacgtcaacaaaaatgtgtaaggggatattaggtttgctaaattctttcacagactataaaacaaaaaattttgaggaacacctctcatcataactacatttaaatgaaacaactgtattaatattttaaatataatagtatttttctattagataaaatttaagatctttggcatcttaatggatttttaaactttttattgatacataagagatgtatatgttttggggtatatgtgataatttgatacattcagatagtgtgtaaagatcaaataagtggaattgggatatcgatcactttaaatatttatcttttctttatgctaggagcattcaaattattattttctcattattgtgaaatgtacagtagattattgttaattgtattcaccctaataatctatgaaacactaggtcttacttcttctatctaacagaatatttgtattcataatggctttttatctaccttcctcccccaacaaatcattatccacccccctccctcctgtttcactctttaaagcatgttgtcaacgttttcttaaactgaataataatcactcatcttctgtcaaagatgccatgcttcagctgtgactcagcagttccttaaatcacaaacaatggtaggtctattattttctccctggatacactttatcttcatccatttcccaatgttttgtcatggctatttctactcaaacactaatcccccattctctaatcaccattattaatcatatcaagtcaattagtttggtttcacactaataataatgacaaaaagcacatgcagagtaatacacaaacaaaaaaagtgacagttacttttttgtgacaagagcaatattgggtatgaactgattaatattaatctgaggtgttgctactagactgagggtttccaggagtagtactatgacatcatgtaaacacattcagttttcatgttggaatctaagatgtgtcccttctcccaaagggattttaatcattcttggcctctctactcactcttaatcaaagtgtggaggaggtggcccccacagcagggtttggaacctacagaccctggcccctgagacatgcagctgtcagacaagccagcatgtcaaacacaggttagagagactgagcttccagattgcatagccatttccttgactactgagtaaaggccaaggctaagatttagtaagcctagccctgaagcaagcaaagaatatggcagtgtaatgcaggtcatttagaaaaaaacaatgttgggcacaaagaaaatttagatctgacaagtataattttctaaagacattatttcaggattaacatcaatttcttagcagaggaaatgaatactattgtcagaaccatatctatatagtcaatcatttcctcttttaacgtctgtcttgttctctttttacccaccacatatgtataactatgtgaaaaattatatttgtgcataataaaatgtgataactttttacaac

SEQ ID NO: 123001 - DNA, 1193 bp, Homo sapiens
  Payload ID: 4153
  Gene Symbol: CLEC12B
  Gene Name: C-type lectin domain family 12, member B
  Uniprot ID: Q2HXU8
  ENST ID: ENST00000544853
  CDS Start-End: 134-832
ggggcagtagagtgtgtctgggtcagctgagtgactacatcaaagctcccagccttgaaaaacacatgctgttcccaggcctcaagatattgaaacattaattagataatttaaagtagcgttttcttctacaatgtctgaagaagtgacctacgcgacactcacatttcaggattctgctggagcaaggaataaccgagatggaaataacctaagaaaaagagggcatccagctccatctcccatttggcgtcatgctgctctgggtctggtaactctttgcctgatgttgctgattgggctggtgacattggggatgatgtttttgcagatatctaatgacattaactcagattcagagaaattgagtcaacttcagaaaaccatccaacagcagcaggataacttatcccagcaactgggcaactccaacaacttgtccatggaggaggaatttctcaagtcacagatctccagtgtactgaagaggcaggaacaaatggccatcaaactgtgccaagagctaatcattcatacttcagaccacagatgtaatccatgtcctaagatgtggcaatggtaccaaaatagttgctactattttacaacaaatgaggagaaaacctgggctaacagtagaaaggactgcatagacaagaactccaccctagtgaagatagacagtttggaagaaaaggattttcttatgtcacagccattactcatgttttcgttcttttggctgggattatcatgggactcctctggcagaagttggttctgggaagatggctctgttccctctccatccttgtacgtctctaactattgagggtaaacacaagctttccatggaatcctgggaaaattaataatgattgtgagaattataaatacagacataaaaagaggagtacaacatactgagaaaagagctccagtaacaaatattgaaaggagatttagtactaaagaacttgaccagatcaatggatccaaaggatgtgcttattttcaaaaaggaaatatttatatttctcgctgtagtgctgaaattttttggatttgcgagaagacagctgccccagtgaagactgaggatttggattagtatgcttcttccaaattctccaagaagtaagagacttgtgagtaagctcatatgaggaaagaggaaactacggtaccagagc

SEQ ID NO: 123002 - DNA, 2898 bp, Homo sapiens
  Payload ID: 4153
  Gene Symbol: CLEC12B
  Gene Name: C-type lectin domain family 12, member B
  ENST ID: ENST00000539155
  CDS Start-End: 2-199
aatgtctgaagaagtgacctacgcgacactcacatttcaggattctgctggagcaaggaataaccgagatggaaataacctaagaaaaagagggcatccagctccatctcccatttggcgtcatgctgctctgggtctggtaactctttgcctgatgttgctgattgggctggtgacattggggatgatgtatatctaatgacattaactcagattcagagaaattgagtcaacttcagaaaaccatccaacagcagcaggataacttatcccagcaactgggcaactccaacaacttgtccatggaggaggaatttctcaagtcacagatctccagtgtactgaagaggcaggaacaaatggccatcaaactgtgccaagagctaatcattcatacttcagaccacagatgtaatccatgtcctaagatgtggcaatggtaccaaaatagttgctactattttacaacaaatgaggagaaaacctgggctaacagtagaaaggactgcatagacaagaactccaccctagtgaagatagacagtttggaagaaaaggattttcttatgtcacagccattactcatgttttcgttcttttggctgggattatcatgggactcctctggcagaagttggttctgggaagatggctctgttccctctccatccttgtacgtctctaactattgagggtaaacacaagctttccatggaatcctgggaaaattaataatgattgtgagaattataaatacagacataaaaagaggagtacaacatactgagaaaagagctccagtaacaaatattgaaaggaggtatagttcatttcatctctgtgacaaatttatagcaaggcactgaattttatcttttggtagaaatgtgtttatttaacacacacacacacctaatactacattcaaagtattttataaatactaacccttgaagaaagcagttatattcccattttataggtagaaatattataatagagagattaagtaacttgcctgaggtcactcagctcataaattgcactttagggattgtgcactcagtcactcagctattctgactctccagcacctacaatccaaaagggtgctgctggtcataagaacacatatcaacacatttatttatactaaataactgtcaaccattttctaacaaaaagtaagactgaattgactgattagttcaacaattagtgtcatgttgaggacttgccaattacaatatacggcaagtgtcttttatgaattaaaatgaactaaaccttccacttcagggtttggatgaaactatttaaaggacaaatagaatatataacacttggaaaatttcaatttttttaactatttaaagttatgaaaaaatagacgtcaacaaaaatgtgtaaggggatattaggtttgctaaattctttcacagactataaaacaaaaaattttgaggaacacctctcatcataactacatttaaatgaaacaactgtattaatattttaaatataatagtatttttctattagataaaatttaagatctttggcatcttaatggatttttaaactttttattgatacataagagatgtatatgttttggggtatatgtgataatttgatacattcagatagtgtgtaaagatcaaataagtggaattgggatatcgatcactttaaatatttatcttttctttatgctaggagcattcaaattattattttctcattattgtgaaatgtacagtagattattgttaattgtattcaccctaataatctatgaaacactaggtcttacttcttctatctaacagaatatttgtattcataatggctttttatctaccttcctcccccaacaaatcattatccacccccctccctcctgtttcactctttaaagcatgttgtcaacgttttcttaaactgaataataatcactcatcttctgtcaaagatgccatgcttcagctgtgactcagcagttccttaaatcacaaacaatggtaggtctattattttctccctggatacactttatcttcatccatttcccaatgttttgtcatggctatttctactcaaacactaatcccccattctctaatcaccattattaatcatatcaagtcaattagtttggtttcacactaataataatgacaaaaagcacatgcagagtaatacacaaacaaaaaaagtgacagttacttttttgtgacaagagcaatattgggtatgaactgattaatattaatctgaggtgttgctactagactgagggtttccaggagtagtactatgacatcatgtaaacacattcagttttcatgttggaatctaagatgtgtcccttctcccaaagggattttaatcattcttggcctctctactcactcttaatcaaagtgtggaggaggtggcccccacagcagggtttggaacctacagaccctggcccctgagacatgcagctgtcagacaagccagcatgtcaaacacaggttagagagactgagcttccagattgcatagccatttccttgactactgagtaaaggccaaggctaagatttagtaagcctagccctgaagcaagcaaagaatatggcagtgtaatgcaggtcatttagaaaaaaacaatgttgggcacaaagaaaatttagatctgacaagtataattttctaaagacattatttcaggattaacatcaatttcttagcagaggaaatgaatactattgtcagaaccatatctatatagtcaatcatttcctcttttaacgtctgtcttgttctctttttacccaccacatatgtataactatgtgaaaaattatatttgtgcataataaaatgtgataactttttacaacagaa

SEQ ID NO: 123003 - DNA, 2267 bp, Homo sapiens
  Payload ID: 4154
  Gene Symbol: CLEC14A
  Gene Name: C-type lectin domain family 14, member A
  Uniprot ID: Q86T13
  ENST ID: ENST00000342213
  CDS Start-End: 348-1820
ctcctcttgctctaagcagggtgtttgaccttctagtcgactgcgtcccctgtacccggcgccagctgtgttcctgaccccagaataactcagggctgcaccgggcctggcagcgctccgcacacatttcctgtcgcggcctaagggaaactgttggccgctgggcccgcggggggattcttggcagttggggggtccgtcgggagcgagggcggaggggaagggagggggaaccgggttggggaagccagctgtagagggcggtgaccgcgctccagacacagctctgcgtcctcgagcgggacagatccaagttgggagcagctctgcgtgcggggcctcagagaatgaggccggcgttcgccctgtgcctcctctggcaggcgctctggcccgggccgggcggcggcgaacaccccactgccgaccgtgctggctgctcggcctcgggggcctgctacagcctgcaccacgctaccatgaagcggcaggcggccgaggaggcctgcatcctgcgaggtggggcgctcagcaccgtgcgtgcgggcgccgagctgcgcgctgtgctcgcgctcctgcgggcaggcccagggcccggagggggctccaaagacctgctgttctgggtcgcactggagcgcaggcgttcccactgcaccctggagaacgagcctttgcggggtttctcctggctgtcctccgaccccggcggtctcgaaagcgacacgctgcagtgggtggaggagccccaacgctcctgcaccgcgcggagatgcgcggtactccaggccaccggtggggtcgagcccgcaggctggaaggagatgcgatgccacctgcgcgccaacggctacctgtgcaagtaccagtttgaggtcttgtgtcctgcgccgcgccccggggccgcctctaacttgagctatcgcgcgcccttccagctgcacagcgccgctctggacttcagtccacctgggaccgaggtgagtgcgctctgccggggacagctcccgatctcagttacttgcatcgcggacgaaatcggcgctcgctgggacaaactctcgggcgatgtgttgtgtccctgccccgggaggtacctccgtgctggcaaatgcgcagagctccctaactgcctagacgacttgggaggctttgcctgcgaatgtgctacgggcttcgagctggggaaggacggccgctcttgtgtgaccagtggggaaggacagccgacccttggggggaccggggtgcccaccaggcgcccgccggccactgcaaccagccccgtgccgcagagaacatggccaatcagggtcgacgagaagctgggagagacaccacttgtccctgaacaagacaattcagtaacatctattcctgagattcctcgatggggatcacagagcacgatgtctacccttcaaatgtcccttcaagccgagtcaaaggccactatcaccccatcagggagcgtgatttccaagtttaattctacgacttcctctgccactcctcaggctttcgactcctcctctgccgtggtcttcatatttgtgagcacagcagtagtagtgttggtgatcttgaccatgacagtactggggcttgtcaagctctgctttcacgaaagcccctcttcccagccaaggaaggagtctatgggcccgccgggcctggagagtgatcctgagcccgctgctttgggctccagttctgcacattgcacaaacaatggggtgaaagtcggggactgtgatctgcgggacagagcagagggtgccttgctggcggagtcccctcttggctctagtgatgcatagggaaacaggggacatgggcactcctgtgaacagtttttcacttttgatgaaacggggaaccaagaggaacttacttgtgtaactgacaatttctgcagaaatcccccttcctctaaattccctttactccactgaggagctaaatcagaactgcacactccttccctgatgatagaggaagtggaagtgcctttaggatggtgatactgggggaccgggtagtgctggggagagatattttcttatgtttattcggagaatttggagaagtgattgaacttttcaagacattggaaacaaatagaacacaatataatttacattaaaaaataatttctaccaaaatggaaaggaaatgttctatgttgttcaggctaggagtatattggttcgaaatcccagggaaaaaaataaaaataaaaaattaaaggattgttgataacccag

SEQ ID NO: 123004 - DNA, 4351 bp, Homo sapiens
  Payload ID: 4155
  Gene Symbol: CLEC16A
  Gene Name: C-type lectin domain family 16, member A
  ENST ID: ENST00000261657
  CDS Start-End: 1-457
caaaggccgcatccaggcaaggcgcatgaagatgcagagaatagctgccctcctggacctcccaatccagcccaccactgaagtcctggggtttggactcggctcctccacctccactcagcacctgcctttccgcttctacgaccaggggcgccggggcagcagcgaccccacagtgcagcgctccgtgtttgcatcggtggacaaggtgccaggcttcgccgtggcccagtgcataaaccagcacagctccccgtccctgtcctcacagtcgccaccctccgccagcgggagccccagcggcagcgggagcaccagccactgcgactctggaggcaccagctcgtcctccaccccctccacagcccagagtccagcagtcaggagtggcaggaaaggacgccgacgagtgttcagcctgtcggaggccgacagtcatggcggccactgggtttagtgctccgaacggcagctgccacggcacctcacgcacagtcaattcagatgcccccatgagtccagaactgcctaagcctcaccttcctgaccagttggtaatcgtcaacgaaacggaagcagactctaagcccagcaagaacgtggccaggagcgcagccgtggagacagccagcctgtcccccagcctcgtccctgcccggcagcccaccatttccctgctctgcgaggacacggctgacacgctgagcgtcgaatcgctgacccttgtccccccagttgacccccacagcctccgcagcctcaccggcatgcccccgctgtccacgccggctgccgcctgcacagagcccgtgggcgaagaggctgcatgtgctgagcctgtgggcaccgctgaggactgagtcagtgccggggcctccctttgtgtgtgtggccccgctggtagggaccccagtgccgctgactggcaagacacactgggagcacccaccattctgtgcggcccccagcagccatctcaaccacctatccctgcgctcccttgaatgggaagaagccccacgttgtccttgaattcctttttcactttgcatctcttcacgtgcaggctgggaccagcggagacaccgcggcgaatgcagatgactgcaccggccactcagggagctgcctgggctccgtgtctctgagccccgggtggcaggacccaccggcacctctttcttcctctgtcatatggctcctctgtcaccagccccagtgtgcacagaagaattggaccaggtcactgtacgtagaaatttgtagaaaagcagacttagataaacatctcctttggatatttatttccgcttttggcagcaggtgaacatttatttttaaaacttctatttaaaagaagtccaaaaacatcaacactaaggtttgatgtcatgtgaaaagtgtaataataacagttaagatttcatgatcattttcactggacctttcctgatattttgtttcagagttcttagtgtggctttttccatttatttaagtgattctttgttactcactaactctgcaagcctgtggaataatgaagtaccttcctggaaagtttggattattttttaaacaaaaacaagggagatacatgtattctcaggtacacacagagctgagagggctgaatggttttctgctatagcagccgagaggcctcccatcatggaaagatttctccaggaaaaggaggaatgtagccagctccccactcaggacgcttcctcatttctcttcaccaaaaccaaacagagacagcttccagcaccttcttcagtgttaccatctctaagaaggaaccagttgggaccgtgaagactcccgaccctgtggccatgatggaaatcaaaggaagacaccctctacgtcacctgccctcgactgtgtgtgcccacatgtgccgagagatggcccagagccagttcccctccagctgcaagggcatggtgtccccagagctctgagtctgtcactctccctctgctactgctgctgatctgaatatggaaaccccatggttcccttccccattcggactgggtgtgtacaagcaaggacccagatgcatcagacacagcccccaagatgttcctttctactcggccagctcgggagccagacacagcactcacagcccaggccgtgatccaccctccccaagtccaccagggccagcggcccctcacctctctggtcactggtgagaccttccacaactttcctccagacctgccagcagatgtgcccaccaggggcattaggtatccgccggagcctggccatagggtagtctcgggagccgcgctgagatcttttgccacctgcattttagaagaacatggtctctgtctcctcggcccagccagctgtcccggcaaggcctgccgagggcagttttcaacctcatgaaggaaacacagtcctgccaaggagggggagtggcgcccatggggacaggcctcagtccttagaagccctctgggtagctgtgcccacccagccttcatggctgcaggtacaaggacctttgcttccatagagaaaacgcacagctcagaaagggggccacatgggcagaaacccaaaggaaggacaaaccacgaccaccgtggccatctgcagaatccctggaagagaaggaaggcagggtggagcggggggaagaccatcatggagagaaggaccacagcatcaggagacgggacacgccacacccagcaggcagcctgtgtgttgcttaattttttaagagcaagaggggtagagaggatcaagctggccctggctggagatggctagcccctgagacatgcacttctggttttgaaatgactctgtctgtggggcagcagaaactagagaaggcaagtggctgccccaccccaaggcgtgaccaggaggaacagcctgcagctcactccatgccacacgggtgggccaccagcctgctgtcagaagtctctgggctccaactggtcttgtaaccactgagcactgaaggagagaggtcttggtcagggctggacagcatgcccgggaggaccagcagaggattaaaggtgactgggaggaccagcggaggataaaagacactgctcagggcagggcttctaccctgcatccctggccaagaaaagggcagtccccatgtgggcttgcagggtcactctcaggggcctctttcagctggggctggcaacttgcgtctgggggacacctccaggtgtgtggggtgaggatttcctataaccagggctcccagaagctttgcttatgtaaggaggtctgggagccagcccattggaggccaccagccattttggcttcaaaggaccccacctcacccaggtctcagcggcagtgggcacagctatgtcttcaggagctcccgtcaaacctcatagctggggcgctcccagacaggccagtccagacaggacacgctgggcccctggcatccagaggaagagccaggagtgtgggaaggcccacagtgggggctgtggcttctgacactcaggtcatagcctcagaggtctgaggtcagcccccacagacccatccggcccgccccccaagtccctgcagagagcacttagagttatggcccaggccctggtccacccttcccctgtgcacctccggctgggtttgccaagtcagggagcagggctggccgcaggaactcccaaaccttggctttgaatattgttgtggaggtgtgctcgtccctttctggacgtgcaaggtacctgtcccagcaggtcagatggggccagctgaggcgctcccccaggcaggaagggccagccttcaccatcgcgtgggattgggaggaggggcctccgtgagcagcccctcctctgccgctgtcccagcccagtccctctcccggagccttggcagcctcccacaacccagacacttgcgttcacaagcaacctaaggggcaggtgaagaagcgcagccctgccagacgcgctagattcctctaaggtctctgagatgcaccgttttttaaaaaggcgtggggtgaactgattttgatcttcttgtctagatgcaataaataaatctgaagcatttaatgtagtcatcttgacattgggcctacactgtacgagttccttatgtttccttgagctaaaaatatgtaaataatttttgtcccagtgagaaccgagggttagaaaacctcgatgcctctgagcctcgggaccgctctagggaagtacctgctttcgccagcatgactcatgcttcgtgggtactgaacacgagggtggaaatgaaaactggaacttccttgtaaatttaaacttggcaataaaagagaaaaaaagtt

SEQ ID NO: 123005 - DNA, 3365 bp, Homo sapiens
  Payload ID: 4155
  Gene Symbol: CLEC16A
  Gene Name: C-type lectin domain family 16, member A
  Uniprot ID: Q2KHT3
  ENST ID: ENST00000409552
  CDS Start-End: 138-2858
cggggaggaaggcggctcgcggttcctccaccgcctccgccgccgcatcctccgcttgtgctaccgccgcgggcgctgggccgctctgctggtccggcatgagaccgtgagacgagagacgggtcggggccgccgacatgtttggccgctcgcggagctgggtgggcgggggccatggcaagacttcccgcaacatccactccttggaccacctcaagtatctgtaccacgttttgaccaaaaacaccacagtcacagaacagaaccggaacctgctagtggagaccatccgttccatcactgagatcctgatctggggagatcaaaatgacagctctgtatttgacttcttcctggagaagaatatgtttgttttcttcttgaacatcttgcggcaaaagtcgggccgttacgtgtgcgttcagctgctgcagaccttgaacatcctctttgagaacatcagtcacgagacctcactttattatttgctctcaaataactacgtaaattctatcatcgttcataaatttgacttttctgatgaggagattatggcctattatatatcgttcctgaaaacactttcgttaaaactcaacaaccacactgtccatttcttttataatgagcacaccaatgactttgccctgtacacagaagccatcaagtttttcaaccaccctgaaagcatggttagaattgctgtaagaaccataactttgaatgtctataaagtggataaccaggccatgctgcactacatccgagataaaactgctgttccttacttctccaatttggtctggttcattgggagccatgtgatcgaactcgatgactgcgtgcagactgatgaggagcatcggaatcggggtaaactgagtgatctggtggcagagcacctagaccacctgcactatctcaatgacatcctgatcatcaactgtgagttcctcaacgatgtgctcactgaccacctgctcaacaggctcttcctgcccctctacgtgtactcactggagaaccaggacaagggaggagaacggccgaaaattagcctgccggtgtctctttatcttctgtcacaggtcttcttaattatacatcatgcaccgctggtgaactcgttagctgaagtcattctgaatggtgatctgtctgagatgtacgctaagactgaacaggatattcagagaagttctgccaagcccagcattcggtgcttcattaaacccaccgagacactcgagcggtcccttgagatgaacaagcacaagggcaagaggcgggtgcaaaagagacccaactacaaaaacgttggggaagaagaagatgaggagaaagggcccaccgaggatgcccaagaagacgccgagaaggctaaagagatcgagatggtgatcatggagcgtagcaagctctcagagctggccgccagcacctccgtgcaggagcagaacaccacggacgaggagaaaagcgccgccgccacctgctctgagagcacgcaatggagcagacccttcctggatatggtgtaccacgcgctggacagcccggatgatgattaccatgccctgttcgtgctctgcctcctctatgccatgtctcataataaaggcatggatcctgaaaaattagagcgaatccagctccccgtgccaaatgcggccgagaagaccacctacaaccacccgctagctgaaagactcatcaggatcatgaacaacgctgcccagccagatgggaagatccggctggcgacgctggagctgagctgcctgcttctgaagcagcaagtcctgatgagtgctggctgcatcatgaaggacgtgcacctggcctgcctggagggtgcgagagaagaaagtgttcaccttgtacgacatttttataagggagaagacatttttttggacatgtttgaagatgagtataggagcatgacaatgaagcccatgaacgtggaatatctcatgatggacgcctccatcctgctgcccccaacaggcacgccactgacgggcattgacttcgtgaagcggctgccgtgtggcgatgtggagaagacccggcgggccatccgggtgttcttcatgctgcgttccctgtcactgcaattgcgaggggagcctgagacacagttgccgctgactcgggaggaggacctgatcaagactgatgatgtcctggatctgaataacagcgacttgattgcatgtacagtgatcaccaaggatggcggcatggtccagcgattcctggctgtggatatttaccagatgagtttggtggagcctgatgtgtccaggcttggctggggagtggtcaagtttgcaggcctattgcaggacatgcaggtgactggcgtggaggacgacagccgtgccctgaacatcaccatccacaagcctgcgtccagcccccattccaagcccttccccatcctccaggccaccttcatcttctcagaccacatccgctgcatcatcgccaagcagcgcctggccaaaggccgcatccaggcaaggcgcatgaagatgcagagaatagctgccctcctggacctcccaatccagcccaccactgaagtcctggggtttggactcggctcctccacctccactcagcacctgcctttccgcttctacgaccaggggcgccggggcagcagcgaccccacagtgcagcgctccgtgtttgcatcggtggacaaggtgccaggtgagccagccccccgccctgcgccacagctcgttcatcatggtgggcgttcaaggtctttctctctgtggagcctgtgtgagctgcccttcctctctcagaagccccgtcggctggcagcaccagcttcttagaatttgtcaaagcacagcgcaagattaaacacagcccccaaaataaattttggctttccctttagtgtttggtttggttttccagagatttgttgggtatgtggaagaacttctcagaattgactaagaattttcttggaaatttcttggaaacatttaaatgattagtgctgaagttgtgggagagtaatttccttctccatgtaagatgactagaaagagagagtgtgtttggttccggttacaaccccctgaagaagtgagacttcaaaagaaggccgtgctgcccacaggtcagctgtccactccttccatatgagggcgtctcctcccacttttgccacagctcatctctaaccctgctcctccgctcctcccaaaacagaaacttgaatggaaagtccattgctgatttgtcagagtggaaaggaccacttctccagaagaccgagttctccccttcctgttctgacatgtctgctttaagtaaatccgtatgcaccccga

SEQ ID NO: 123006 - DNA, 6891 bp, Homo sapiens
  Payload ID: 4155
  Gene Symbol: CLEC16A
  Gene Name: C-type lectin domain family 16, member A
  Uniprot ID: Q2KHT3
  ENST ID: ENST00000409790
  CDS Start-End: 231-3392
aactgcatttcccagcgccccacgcggcggcggccgtaaagcgcggcggtcgaacggccggttccggctgaatgtcagtgctgggctgtgggccggggaggaaggcggctcgcggttcctccaccgcctccgccgccgcatcctccgcttgtgctaccgccgcgggcgctgggccgctctgctggtccggcatgagaccgtgagacgagagacgggtcggggccgccgacatgtttggccgctcgcggagctgggtgggcgggggccatggcaagacttcccgcaacatccactccttggaccacctcaagtatctgtaccacgttttgaccaaaaacaccacagtcacagaacagaaccggaacctgctagtggagaccatccgttccatcactgagatcctgatctggggagatcaaaatgacagctctgtatttgacttcttcctggagaagaatatgtttgttttcttcttgaacatcttgcggcaaaagtcgggccgttacgtgtgcgttcagctgctgcagaccttgaacatcctctttgagaacatcagtcacgagacctcactttattatttgctctcaaataactacgtaaattctatcatcgttcataaatttgacttttctgatgaggagattatggcctattatatatcgttcctgaaaacactttcgttaaaactcaacaaccacactgtccatttcttttataatgagcacaccaatgactttgccctgtacacagaagccatcaagtttttcaaccaccctgaaagcatggttagaattgctgtaagaaccataactttgaatgtctataaagtgtcattggataaccaggccatgctgcactacatccgagataaaactgctgttccttacttctccaatttggtctggttcattgggagccatgtgatcgaactcgatgactgcgtgcagactgatgaggagcatcggaatcggggtaaactgagtgatctggtggcagagcacctagaccacctgcactatctcaatgacatcctgatcatcaactgtgagttcctcaacgatgtgctcactgaccacctgctcaacaggctcttcctgcccctctacgtgtactcactggagaaccaggacaagggaggagaacggccgaaaattagcctgccggtgtctctttatcttctgtcacaggtcttcttaattatacatcatgcaccgctggtgaactcgttagctgaagtcattctgaatggtgatctgtctgagatgtacgctaagactgaacaggatattcagagaagttctgccaagcccagcattcggtgcttcattaaacccaccgagacactcgagcggtcccttgagatgaacaagcacaagggcaagaggcgggtgcaaaagagacccaactacaaaaacgttggggaagaagaagatgaggagaaagggcccaccgaggatgcccaagaagacgccgagaaggctaaaggtacagagggtggttcaaaaggcatcaagacgagtggggagagtgaagagatcgagatggtgatcatggagcgtagcaagctctcagagctggccgccagcacctccgtgcaggagcagaacaccacggacgaggagaaaagcgccgccgccacctgctctgagagcacgcaatggagcagacccttcctggatatggtgtaccacgcgctggacagcccggatgatgattaccatgccctgttcgtgctctgcctcctctatgccatgtctcataataaaggcatggatcctgaaaaattagagcgaatccagctccccgtgccaaatgcggccgagaagaccacctacaaccacccgctagctgaaagactcatcaggatcatgaacaacgctgcccagccagatgggaagatccggctggcgacgctggagctgagctgcctgcttctgaagcagcaagtcctgatgagtgctggctgcatcatgaaggacgtgcacctggcctgcctggagggtgcgagagaagaaagtgttcaccttgtacgacatttttataagggagaagacatttttttggacatgtttgaagatgagtataggagcatgacaatgaagcccatgaacgtggaatatctcatgatggacgcctccatcctgctgcccccaacaggcacgccactgacgggcattgacttcgtgaagcggctgccgtgtggcgatgtggagaagacccggcgggccatccgggtgttcttcatgctgcgttccctgtcactgcaattgcgaggggagcctgagacacagttgccgctgactcgggaggaggacctgatcaagactgatgatgtcctggatctgaataacagcgacttgattgcatgtacagtgatcaccaaggatggcggcatggtccagcgattcctggctgtggatatttaccagatgagtttggtggagcctgatgtgtccaggcttggctggggagtggtcaagtttgcaggcctattgcaggacatgcaggtgactggcgtggaggacgacagccgtgccctgaacatcaccatccacaagcctgcgtccagcccccattccaagcccttccccatcctccaggccaccttcatcttctcagaccacatccgctgcatcatcgccaagcagcgcctggccaaaggccgcatccaggcaaggcgcatgaagatgcagagaatagctgccctcctggacctcccaatccagcccaccactgaagtcctggggtttggactcggctcctccacctccactcagcacctgcctttccgcttctacgaccaggggcgccggggcagcagcgaccccacagtgcagcgctccgtgtttgcatcggtggacaaggtgccaggcttcgccgtggcccagtgcataaaccagcacagctccccgtccctgtcctcacagtcgccaccctccgccagcgggagccccagcggcagcgggagcaccagccactgcgactctggaggcaccagctcgtcctccaccccctccacagcccagagtccagcagatgcccccatgagtccagaactgcctaagcctcaccttcctgaccagttggtaatcgtcaacgaaacggaagcagactctaagcccagcaagaacgtggccaggagcgcagccgtggagacagccagcctgtcccccagcctcgtccctgcccggcagcccaccatttccctgctctgcgaggacacggctgacacgctgagcgtcgaatcgctgacccttgtccccccagttgacccccacagcctccgcagcctcaccggcatgcccccgctgtccacgccggctgccgcctgcacagagcccgtgggcgaagaggctgcatgtgctgagcctgtgggcaccgctgaggactgagtcagtgccggggcctccctttgtgtgtgtggccccgctggtagggaccccagtgccgctgactggcaagacacactgggagcacccaccattctgtgcggcccccagcagccatctcaaccacctatccctgcgctcccttgaatgggaagaagccccacgttgtccttgaattcctttttcactttgcatctcttcacgtgcaggctgggaccagcggagacaccgcggcgaatgcagatgactgcaccggccactcagggagctgcctgggctccgtgtctctgagccccgggtggcaggacccaccggcacctctttcttcctctgtcatatggctcctctgtcaccagccccagtgtgcacagaagaattggaccaggtcactgtacgtagaaatttgtagaaaagcagacttagataaacatctcctttggatatttatttccgcttttggcagcaggtgaacatttatttttaaaacttctatttaaaagaagtccaaaaacatcaacactaaggtttgatgtcatgtgaaaagtgtaataataacagttaagatttcatgatcattttcactggacctttcctgatattttgtttcagagttcttagtgtggctttttccatttatttaagtgattctttgttactcactaactctgcaagcctgtggaataatgaagtaccttcctggaaagtttggattattttttaaacaaaaacaagggagatacatgtattctcaggtacacacagagctgagagggctgaatggttttctgctatagcagccgagaggcctcccatcatggaaagatttctccaggaaaaggaggaatgtagccagctccccactcaggacgcttcctcatttctcttcaccaaaaccaaacagagacagcttccagcaccttcttcagtgttaccatctctaagaaggaaccagttgggaccgtgaagactcccgaccctgtggccatgatggaaatcaaaggaagacaccctctacgtcacctgccctcgactgtgtgtgcccacatgtgccgagagatggcccagagccagttcccctccagctgcaagggcatggtgtccccagagctctgagtctgtcactctccctctgctactgctgctgatctgaatatggaaaccccatggttcccttccccattcggactgggtgtgtacaagcaaggacccagatgcatcagacacagcccccaagatgttcctttctactcggccagctcgggagccagacacagcactcacagcccaggccgtgatccaccctccccaagtccaccagggccagcggcccctcacctctctggtcactggtgagaccttccacaactttcctccagacctgccagcagatgtgcccaccaggggcattaggtatccgccggagcctggccatagggtagtctcgggagccgcgctgagatcttttgccacctgcattttagaagaacatggtctctgtctcctcggcccagccagctgtcccggcaaggcctgccgagggcagttttcaacctcatgaaggaaacacagtcctgccaaggagggggagtggcgcccatggggacaggcctcagtccttagaagccctctgggtagctgtgcccacccagccttcatggctgcaggtacaaggacctttgcttccatagagaaaacgcacagctcagaaagggggccacatgggcagaaacccaaaggaaggacaaaccacgaccaccgtggccatctgcagaatccctggaagagaaggaaggcagggtggagcggggggaagaccatcatggagagaaggaccacagcatcaggagacgggacacgccacacccagcaggcagcctgtgtgttgcttaattttttaagagcaagaggggtagagaggatcaagctggccctggctggagatggctagcccctgagacatgcacttctggttttgaaatgactctgtctgtggggcagcagaaactagagaaggcaagtggctgccccaccccaaggcgtgaccaggaggaacagcctgcagctcactccatgccacacgggtgggccaccagcctgctgtcagaagtctctgggctccaactggtcttgtaaccactgagcactgaaggagagaggtcttggtcagggctggacagcatgcccgggaggaccagcagaggattaaaggtgactgggaggaccagcggaggataaaagacactgctcagggcagggcttctaccctgcatccctggccaagaaaagggcagtccccatgtgggcttgcagggtcactctcaggggcctctttcagctggggctggcaacttgcgtctgggggacacctccaggtgtgtggggtgaggatttcctataaccagggctcccagaagctttgcttatgtaaggaggtctgggagccagcccattggaggccaccagccattttggcttcaaaggaccccacctcacccaggtctcagcggcagtgggcacagctatgtcttcaggagctcccgtcaaacctcatagctggggcgctcccagacaggccagtccagacaggacacgctgggcccctggcatccagaggaagagccaggagtgtgggaaggcccacagtgggggctgtggcttctgacactcaggtcatagcctcagaggtctgaggtcagcccccacagacccatccggcccgccccccaagtccctgcagagagcacttagagttatggcccaggccctggtccacccttcccctgtgcacctccggctgggtttgccaagtcagggagcagggctggccgcaggaactcccaaaccttggctttgaatattgttgtggaggtgtgctcgtccctttctggacgtgcaaggtacctgtcccagcaggtcagatggggccagctgaggcgctcccccaggcaggaagggccagccttcaccatcgcgtgggattgggaggaggggcctccgtgagcagcccctcctctgccgctgtcccagcccagtccctctcccggagccttggcagcctcccacaacccagacacttgcgttcacaagcaacctaaggggcaggtgaagaagcgcagccctgccagacgcgctagattcctctaaggtctctgagatgcaccgttttttaaaaaggcgtggggtgaactgattttgatcttcttgtctagatgcaataaataaatctgaagcatttaatgtagtcatcttgacattgggcctacactgtacgagttccttatgtttccttgagctaaaaatatgtaaataatttttgtcccagtgagaaccgagggttagaaaacctcgatgcctctgagcctcgggaccgctctagggaagtacctgctttcgccagcatgactcatgcttcgtgggtactgaacacgagggtggaaatgaaaactggaacttccttgtaaatttaaacttggcaataaaagagaaaaaaagttaccaagaa

SEQ ID NO: 123007 - DNA, 521 bp, Homo sapiens
  Payload ID: 4155
  Gene Symbol: CLEC16A
  Gene Name: C-type lectin domain family 16, member A
  ENST ID: ENST00000428742
  CDS Start-End: 1-386
acatgcaggtgactggcgtggaggacgacagccgtgccctgaacatcaccatccacaagcctgcgtccagcccccattccaagcccttccccatcctccaggccaccttcatcttctcagaccacatccgctgcatcatcgccaagcagcgcctggccaaaggccgcatccaggcaaggcgcatgaagatgcagagaatagctgccctcctggacctcccaatccagcccaccactgaagtcctggggtttggactcggctcctccacctccactcagcacctgcctttccgcttctacgaccaggggcgccggggcagcagcgaccccacagtgcagcgctccgtgtttgcatcggtggacaaggtgccaggttttcaaggatagtgtttaaaatctgagaggatttatccatggataaagagctataggctaaaagactctgcaagttcccagctatttttgtatgttggacatgttatccgttgaaaagcaatcagaaataaaaagtatttaagcgtt

SEQ ID NO: 123008 - DNA, 486 bp, Homo sapiens
  Payload ID: 4155
  Gene Symbol: CLEC16A
  Gene Name: C-type lectin domain family 16, member A
  ENST ID: ENST00000436973
  CDS Start-End: 1-357
ctggccaaaggccgcatccaggcaaggcgcatgaagatgcagagaatagctgccctcctggacctcccaatccagcccaccactgaagtcctggggtttggactcggctcctccacctccactcagcacctgcctttccgcttctacgaccaggggcgccggggcagcagcgaccccacagtgcagcgctccgtgtttgcatcggtggacaaggtgccagccctgctgactgccgcagtagagaggcagcccagatggccgctcccaagcttgctagtgccttggctgacagactgttgtggaggtctttgcttgctaatttacagacggttttcaaggatagtgtttaaaatctgagaggatttatccatggataaagagctataggctaaaagactctgcaagttcccagctatttttgtatgttggacatgttatccgttgaaaagcaatcagaaataaaaagtatttaagcgttgtgaggtg

SEQ ID NO: 123009 - DNA, 1247 bp, Homo sapiens
  Payload ID: 4156
  Gene Symbol: CLEC17A
  Gene Name: C-type lectin domain family 17, member A
  Uniprot ID: Q6ZS10
  ENST ID: ENST00000339847
  CDS Start-End: 39-836
agccctggctgccacttgtcaggttccctgtgctagacatgcataatctgtattccatcactgggtacccggacccaccagggaccatggaggaggaggaggaggatgatgactatgagaactcaacacctccctacaaggaccttcctcccaagccagggaccatggaggaggaggaggaggatgatgactatgagaactcaacacctccctacaaggaccttcctcccaagccagggaccatggaggaggaggaggaggatgatgactatgagaactcaacacctccctacaaggaccttcctcccaagccaggttcaagtgctccaccaagacctccaagggcagcaaaggaaacagagaaacccccacttccttgcaagccccggaacatgacaggcctggacctcgccgctgtcacctgtccacctcctcaactggctgtgaatcttgagccttctccattgcagccatccctggccgcaactccagtcccctggctcaatcagaggtctggaggtcctggctgctgccagaagaggtggatggtgtacctgtgtctgctggtggtgacttccctgttcctgggctgccttggtctcactgtgaccctgattaagtaccaggagttgatggaagaactgagaatgttaagctttcagcagatgacgtggcgaacaaatatgactggcatggcagggctagctggcctgaagcatgacattgcccgtgtaagagctgacaccaaccagtccctggtggaactttggggcttattagaattttgtggccaaggcccatggctctccacgggtgtactggctggggctgaatgacagggcccaggaaggggactggaggtggctggatgggtctcctgtgacattaagcttctgggagccagaggaacccaataacatccacgatgaggactgtgctaccatgaacaaaggtggcacctggaatgatctctcttgctacaaaactacgtattggatttgtgagcggaaatgttcctgttgaagcccagggccgaggctgggggtccatatctgagtgtctctttgagatgagaatctcctgccctttcgtggacggccttgcctcttcgtgagtggacacacagatgtgcctcaaacaggattggcaccctggatgcagcaagttcccaggggtgcaagtcaggctgtttctagagtgaggacttgggcttgccctagtagatggtgagctgggaggatgctcag

SEQ ID NO: 123010 - DNA, 1399 bp, Homo sapiens
  Payload ID: 4156
  Gene Symbol: CLEC17A
  Gene Name: C-type lectin domain family 17, member A
  Uniprot ID: Q6ZS10
  ENST ID: ENST00000417570
  CDS Start-End: 39-1175
agccctggctgccacttgtcaggttccctgtgctagacatgcataatctgtattccatcactgggtacccggacccaccagggaccatggaggaggaggaggaggatgatgactatgagaactcaacacctccctacaaggaccttcctcccaagccagggaccatggaggaggaggaggaggatgatgactatgagaactcaacacctccctacaaggaccttcctcccaagccagggaccatggaggaggaggaggaggatgatgactatgagaactcaacacctccctacaaggaccttcctcccaagccaggttcaagtgctccaccaagacctccaagggcagcaaaggaaacagagaaacccccacttccttgcaagccccggaacatgacaggcctggacctcgccgctgtcacctgtccacctcctcaactggctgtgaatcttgagccttctccattgcagccatccctggccgcaactccagtcccctggctcaatcagaggtctggaggtcctggctgctgccagaagaggtggatggtgtacctgtgtctgctggtggtgacttccctgttcctgggctgccttggtctcactgtgaccctgattaagtaccaggagttgatggaagaactgagaatgttaagctttcagcagatgacgtggcgaacaaatatgactggcatggcagggctagctggcctgaagcatgacattgcccgtgtaagagctgacaccaaccagtccctggtggaactttggggcttattagactgccgccgaattacctgtcctgaaggctggctgccctttgagggcaagtgttactacttctccccaagcaccaagtcatgggatgaggcccggatgttctgccaggagaattactctcacttggtcatcatcaatagctttgctgagcacaattttgtggccaaggcccatggctctccacgggtgtactggctggggctgaatgacagggcccaggaaggggactggaggtggctggatgggtctcctgtgacattaagcttctgggagccagaggaacccaataacatccacgatgaggactgtgctaccatgaacaaaggtggcacctggaatgatctctcttgctacaaaactacgtattggatttgtgagcggaaatgttcctgttgaagcccagggccgaggctgggggtccatatctgagtgtctctttgagatgagaatctcctgccctttcgtggacggccttgcctcttcgtgagtggacacacagatgtgcctcaaacaggattggcaccctggatgcagcaagttcccaggggtgcaagtcaggctgtttctagagtgaggacttgggcttgccctagtagatggtgagctgggaggatgctcag

SEQ ID NO: 123011 - DNA, 1462 bp, Homo sapiens
  Payload ID: 4156
  Gene Symbol: CLEC17A
  Gene Name: C-type lectin domain family 17, member A
  ENST ID: ENST00000551730
  CDS Start-End: 39-722
agccctggctgccacttgtcaggttccctgtgctagacatgcataatctgtattccatcactgggtacccggacccaccagggaccatggaggaggaggaggaggatgatgactatgagaactcaacacctccctacaaggaccttcctcccaagccagggaccatggaggaggaggaggaggatgatgactatgagaactcaacacctccctacaaggaccttcctcccaagccagggaccatggaggaggaggaggaggatgatgactatgagaactcaacacctccctacaaggaccttcctcccaagccaggttcaagtgctccaccaagacctccaagggcagcaaaggaaacagagaaacccccacttccttgcaagccccggaacatgacaggcctggacctcgccgctgtcacctgtccacctcctcaactggctgtgaatcttgagccttctccattgcagccatccctggccgcaactccagtcccctggctcaatcagaggtctggaggtcctggctgctgccagaagaggtggatggtgtacctgtgtctgctggtggtgacttccctgttcctgggctgccttggtctcactgtgaccctgattaagtaccaggagttgatggaagaactgagaatgttaagctttcagcagatgacgtggcgaacaaatatccgtggtggatgggtaggatgggttctcagtctgtagccctcaagcccatcccttctgacagtgactggcatggcagggctagctggcctgaagcatgacattgcccgtgtaagagctgacaccaaccagtccctggtggaactttggggcttattagactgccgccgaattacctgtcctgaaggctggctgccctttgagggcaagtgttactacttctccccaagcaccaagtcatgggatgaggcccggatgttctgccaggagaattactctcacttggtcatcatcaatagctttgctgagcacaattttgtggccaaggcccatggctctccacgggtgtactggctggggctgaatgacagggcccaggaaggggactggaggtggctggatgggtctcctgtgacattaagcttctgggagccagaggaacccaataacatccacgatgaggactgtgctaccatgaacaaaggtggcacctggaatgatctctcttgctacaaaactacgtattggatttgtgagcggaaatgttcctgttgaagcccagggccgaggctgggggtccatatctgagtgtctctttgagatgagaatctcctgccctttcgtggacggccttgcctcttcgtgagtggacacacagatgtgcctcaaacaggattggcaccctggatgcagcaagttcccaggggtgcaagtcaggctgtttctagagtgaggacttgggcttgccctagtagatggtgagctgggaggatgctcag

SEQ ID NO: 123012 - DNA, 2065 bp, Homo sapiens
  Payload ID: 4156
  Gene Symbol: CLEC17A
  Gene Name: C-type lectin domain family 17, member A
  Uniprot ID: Q6ZS10
  ENST ID: ENST00000547437
  CDS Start-End: 78-998
agacgcctgagtcggagagacagggggcagaggttgccaagccctggctgccacttgtcaggttccctgtgctagacatgcataatctgtattccatcactgggtacccggacccaccagggaccatggaggaggaggaggaggatgatgactatgagaactcaacacctccctacaaggaccttcctcccaagccagggaccatggaggaggaggaggaggatgatgactatgagaactcaacacctccctacaaggaccttcctcccaagccagggaccatggaggaggaggaggaggatgatgactatgagaactcaacacctccctacaaggaccttcctcccaagccaggttcaagtgctccaccaagacctccaagggcagcaaaggaaacagagaaacccccacttccttgcaagccccggaacatgacaggcctggacctcgccgctgtcacctgtccacctcctcaactggctgtgaatcttgagccttctccattgcagccatccctggccgcaactccagtcccctggctcaatcagaggtctggaggtcctggctgctgccagaagaggtggatggtgtacctgtgtctgctggtggtgacttccctgttcctgggctgccttggtctcactgtgaccctgattaagtaccaggagttgatggaagaactgagaatgttaagctttcagcagatgacgtggcgaacaaatatgactggcatggcagggctagctggcctgaagcatgacattgcccgtgtaagagctgacaccaaccagtccctggtggaactttggggcttattagactgccgccgaattacctgtcctgaaggctggctgccctttgagggcaagtgttactacttctccccaagcaccaagtcatgggatgaggcccggatgttctgccaggagaattactctcacttggtcatcatcaatagctttgctgagcaccttctgggagccagaggaacccaataacatccacgatgaggactgtgctaccatgaacaaaggtggcacctggaatgatctctcttgctacaaaactacgtattggatttgtgagcggaaatgttcctgttgaagcccagggccgaggctgggggtccatatctgagtgtctctttgagatgagaatctcctgccctttcgtggacggccttgcctcttcgtgagtggacacacagatgtgcctcaaacaggattggcaccctggatgcagcaagttcccaggggtgcaagtcaggctgtttctagagtgaggacttgggcttgccctagtagatggtgagctgggaggatgctcagagcttggtggtgggaggtctcccacttctggggttgaaaggatcttcactaagttcctgatcatgactcttgggaagtgatactagccctgaggaccctggggctggtgttgaacctgggatgaaatatcctggcgcctgtgaaccacaaagagctgggactgggctccttttcctgcagcctcaaacttctgggctcaggtgatcctcccatctcagcctcctgagtagctgggactacacatgcgcaccaccatgcctggccaattttttgtagcatttaaagagagggagtctcactatgttgcccaggccagtctcaaactccttgcctcaatggatcctcctacttgggcttcccaaattgtgaggattacaggtgtgagccactgtgcctggctcaaaattattattattatttttatagagatgaggtctcactctgttgccgaggctggtctcaaactcctggggtcaagcaatccttccgtgatggcctcccaaagtgctgggattacaggcatgtgtcaccgtacctggccgatatttttatttttatttttactttccccatcttttccttttttttttttttccaaacaaaagctttgaaagtggtgacagaaaaatttccctttgagctagacctctagatctgcctcgcacagaaatacattaagtgggctggtctcatgtagtccccacatcattgcaaattacaaacctaaaaatacagaa

SEQ ID NO: 123013 - DNA, 2155 bp, Homo sapiens
  Payload ID: 4157
  Gene Symbol: CLEC18A
  Gene Name: C-type lectin domain family 18, member A
  Uniprot ID: A5D8T8
  ENST ID: ENST00000288040
  CDS Start-End: 188-1528
ctcttttcatgccagcgccaacaggaggctgtctggacacactgattactcactcaccagcctccctcttttgtccaccagcccagcctgactcctggagattgtgaatagctccatccagcctgagaaacaagccgggtggctgagccaggctgtgcacggagcgcctgacgggcccaacagacccatgctgcatccagagacctcccctggccgggggcatctcctggctgtgctcctggccctccttggcaccgcctgggcagaggtgtggccaccccagctgcaggagcaggctccgatggccggagccctgaacaggaaggagagtttcttgctcctctccctgcacaaccgcctgcgcagctgggtccagccccctgcggctgacatgcggaggctggactggagtgacagcctggcccagctggctcaagccagggcagccctctgtggaaccccaaccccgagcctggcgtccggcctgtggcgcaccctgcaagtgggctggaacatgcagctgctacccgcgggcttggtgtcctttgtcgaagtggtcagcctatggtttgcagaggggcagcggtacagccacgcggcaggagagtgtgctcgcaacgccacctgcacccactacacgcagctcgtgtgggccacctcaagccagctgggctgtgggcggcacctgtgctctgcaggccaggcagcgatagaagcctttgtctgtgcctactcccccagaggcaactgggaggtcaacgggaagacaatcgtcccctataagaagggtgcctggtgttcgctctgcacagccagtgtctcaggctgcttcaaagcctgggaccatgcaggggggctctgtgaggtccccaggaatccttgtcgcatgagctgccagaaccatggacgtctcaacatcagcacctgccactgccactgtccccctggctacacgggcagatactgccaagtgaggtgcagcctgcagtgtgtgcacggccggttccgggaggaggagtgctcgtgcgtctgtgacatcggctacgggggagcccagtgtgccaccaaggtgcattttcccttccacacctgtgacctgaggatcgacggagactgcttcatggtgtcttcagaggcagacacctattacagagccaggatgaaatgtcagaggaaaggcggggtgctggcccagatcaagagccagaaagtgcaggacatcctcgccttctatctgggccgcctggagaccaccaacgaggtgattgacagtgacttcgagaccaggaacttctggatcgggctcacctacaagaccgccaaggactccttccgctgggccacaggggagcaccaggccttcaccagttttgcctttgggcagcctgacaaccacgggtttggcaactgcgtggagctgcaggcttcagctgccttcaactggaacgaccagcgctgcaaaacccgaaaccgttacatctgccagtttgcccaggagcacatctcccggtggggcccagggtcctgaggcctgaccacatggctccctcgcctgccctgggagcaccggctctgcttacctgtctgcccacctgtctggaacaagggccaggttaagatcacatgcctcatgtccaaagaggtctcagaccttgcacaatgccagaagttgggcagagagaggcagggaggccagtgagggccagggagtgagtgttagaagaagctggggcccttcgcctgcttttgattgggaagatgggcttcaattagatggcgaaggagaggacaccgccagtggtccaaaaaggctgctctcttccacctggcccagaccctgtggggcagcggagcttccctgtggcatgaaccccacagggtattaaattatgaatcagctgaacctgtgcatgctcatttcaaagggaaattcagatgatccaggatgaccctggagagaccagagggggcctgaggcttcactgcagcggcctccacccacctattccctttcctggtcaccttcatggtccaggacactctctggaagttctgggtctccccaagaagaggaagaccagactctgcctcagtgaggagctgttctcatggctggggcccaggcaggcagggtattaatagaagttgctctgaa

SEQ ID NO: 123014 - DNA, 1955 bp, Homo sapiens
  Payload ID: 4157
  Gene Symbol: CLEC18A
  Gene Name: C-type lectin domain family 18, member A
  Uniprot ID: A5D8T8
  ENST ID: ENST00000393701
  CDS Start-End: 240-1580
cgaggtcctcctcccagggcccggggctggggagcggaagccatcagtgggctcggaggacactgtcccagccaggacacggccatcggtcactaatctgcagcactggaatgtccgcgggccaatcagcgggcccagcctgactcctggagattgtgaatagctccatccagcctgagaaacaagccgggtggctgagccaggctgtgcacggagcgcctgacgggcccaacagacccatgctgcatccagagacctcccctggccgggggcatctcctggctgtgctcctggccctccttggcaccgcctgggcagaggtgtggccaccccagctgcaggagcaggctccgatggccggagccctgaacaggaaggagagtttcttgctcctctccctgcacaaccgcctgcgcagctgggtccagccccctgcggctgacatgcggaggctggactggagtgacagcctggcccagctggctcaagccagggcagccctctgtggaaccccaaccccgagcctggcgtccggcctgtggcgcaccctgcaagtgggctggaacatgcagctgctacccgcgggcttggtgtcctttgtcgaagtggtcagcctatggtttgcagaggggcagcggtacagccacgcggcaggagagtgtgctcgcaacgccacctgcacccactacacgcagctcgtgtgggccacctcaagccagctgggctgtgggcggcacctgtgctctgcaggccaggcagcgatagaagcctttgtctgtgcctactcccccagaggcaactgggaggtcaacgggaagacaatcgtcccctataagaagggtgcctggtgttcgctctgcacagccagtgtctcaggctgcttcaaagcctgggaccatgcaggggggctctgtgaggtccccaggaatccttgtcgcatgagctgccagaaccatggacgtctcaacatcagcacctgccactgccactgtccccctggctacacgggcagatactgccaagtgaggtgcagcctgcagtgtgtgcacggccggttccgggaggaggagtgctcgtgcgtctgtgacatcggctacgggggagcccagtgtgccaccaaggtgcattttcccttccacacctgtgacctgaggatcgacggagactgcttcatggtgtcttcagaggcagacacctattacagagccaggatgaaatgtcagaggaaaggcggggtgctggcccagatcaagagccagaaagtgcaggacatcctcgccttctatctgggccgcctggagaccaccaacgaggtgattgacagtgacttcgagaccaggaacttctggatcgggctcacctacaagaccgccaaggactccttccgctgggccacaggggagcaccaggccttcaccagttttgcctttgggcagcctgacaaccacgggtttggcaactgcgtggagctgcaggcttcagctgccttcaactggaacgaccagcgctgcaaaacccgaaaccgttacatctgccagtttgcccaggagcacatctcccggtggggcccagggtcctgaggcctgaccacatggctccctcgcctgccctgggagcaccggctctgcttacctgtctgcccacctgtctggaacaagggccaggttaagatcacatgcctcatgtccaaagaggtctcagaccttgcacaatgccagaagttgggcagagagaggcagggaggccagtgagggccagggagtgagtgttagaagaagctggggcccttcgcctgcttttgattgggaagatgggcttcaattagatggcgaaggagaggacaccgccagtggtccaaaaaggctgctctcttccacctggcccagaccctgtggggcagcggagcttccctgtggcatgaaccccacagggtattaaattatgaatcagctgaa

SEQ ID NO: 123015 - DNA, 1875 bp, Homo sapiens
  Payload ID: 4157
  Gene Symbol: CLEC18A
  Gene Name: C-type lectin domain family 18, member A
  ENST ID: ENST00000449317
  CDS Start-End: 135-1502
tcaccagcctccctcttttgtccaccagcccagcctgactcctggagattgtgaatagctccatccagcctgagaaacaagccgggtggctgagccaggctgtgcacggagcgcctgacgggcccaacagacccatgctgcatccagagacctcccctggccgggggcatctcctggctgtgctcctggccctccttggcaccgcctgggcagaggtgtggccaccccagctgcaggagcaggctccgatggccggagccctgaacaggaaggagagtttcttgctcctctccctgcacaaccgcctgcgcagctgggtccagccccctgcggctgacatgcggaggctggactggagtgacagcctggcccagctggctcaagccagggcagccctctgtggaaccccaaccccgagcctggcgtccggcctgtggcgcaccctgcaagtgggctggaacatgcagctgctacccgcgggcttggtgtcctttgtcgaagtggtcagcctatggtttgcagaggggcagcggtacagccacgcggcaggagagtgtgctcgcaacgccacctgcacccactacacgcagctcgtgtgggccacctcaagccagctgggctgtgggcggcacctgtgctctgcaggccaggcagcgatagaagcctttgtctgtgcctactcccccagaggcaactgggaggtcaacgggaagacaatcgtcccctataagaagggtgcctggtgttcgctctgcacagccagtgtctcaggctgcttcaaagcctgggaccatgcaggggggctctgtgaggtccccaggaatccttgtcgcatgagctgccagaaccatggacgtctcaacatcagcacctgccactgccactgtccccctggctacacgggcagatactgccaagtgaggtgcagcctgcagtgtgtgcacggccggttccgggaggaggagtgctcgtgcgtctgtgacatcggctacgggggagcccagtgtgccaccaaggtgcattttcccttccacacctgtgacctgaggatcgacggagactgcttcatggtgtcttcagaggcagacacctattacagagccaggatgaaatgtcagaggaaaggcggggtgctggcccagatcaagagccagaaagtgcaggacatcctcgccttctatctgggccgcctggagaccaccaacgaggtgattgacagtgacttcgagaccaggaacttctggatcgggctcacctacaagaccgccaaggactccttccgctgggccacaggggagcaccaggccttcaccagttttgcctttgggcagcctgacaaccacgggctggtgtggctgagtgctgccatggggtttggcaactgcgtggagctgcaggcttcagctgccttcaactggaacgaccagcgctgcaaaacccgaaaccgttacatctgccagtttgcccaggagcacatctcccggtggggcccagggtcctgaggcctgaccacatggctccctcgcctgccctgggagcaccggctctgcttacctgtctgcccacctgtctggaacaagggccaggttaagatcacatgcctcatgtccaaagaggtctcagaccttgcacaatgccagaagttgggcagagagaggcagggaggccagtgagggccagggagtgagtgttagaagaagctggggcccttcgcctgcttttgattgggaagatgggcttcaattagatggcgaaggagaggacaccgccagtggtccaaaaaggctgctctcttccacctggcccagaccctgtggggcagcggagcttccctgtggcatgaaccccacagggtattaaattatgaatcagctg

SEQ ID NO: 123016 - DNA, 1934 bp, Homo sapiens
  Payload ID: 4157
  Gene Symbol: CLEC18A
  Gene Name: C-type lectin domain family 18, member A
  Uniprot ID: A5D8T8
  ENST ID: ENST00000568461
  CDS Start-End: 219-1559
cggccatcggtcactaatctgcagcactggaatgtccgcgggccaatcagcggggtctctgggggctccccaagggtgctaataatcccacaatgattagcaggggccgcggcccagcctgactcctggagattgtgaatagctccatccagcctgagaaacaagccgggtggctgagccaggctgtgcacggagcgcctgacgggcccaacagacccatgctgcatccagagacctcccctggccgggggcatctcctggctgtgctcctggccctccttggcaccgcctgggcagaggtgtggccaccccagctgcaggagcaggctccgatggccggagccctgaacaggaaggagagtttcttgctcctctccctgcacaaccgcctgcgcagctgggtccagccccctgcggctgacatgcggaggctggactggagtgacagcctggcccagctggctcaagccagggcagccctctgtggaaccccaaccccgagcctggcgtccggcctgtggcgcaccctgcaagtgggctggaacatgcagctgctacccgcgggcttggtgtcctttgtcgaagtggtcagcctatggtttgcagaggggcagcggtacagccacgcggcaggagagtgtgctcgcaacgccacctgcacccactacacgcagctcgtgtgggccacctcaagccagctgggctgtgggcggcacctgtgctctgcaggccaggcagcgatagaagcctttgtctgtgcctactcccccagaggcaactgggaggtcaacgggaagacaatcgtcccctataagaagggtgcctggtgttcgctctgcacagccagtgtctcaggctgcttcaaagcctgggaccatgcaggggggctctgtgaggtccccaggaatccttgtcgcatgagctgccagaaccatggacgtctcaacatcagcacctgccactgccactgtccccctggctacacgggcagatactgccaagtgaggtgcagcctgcagtgtgtgcacggccggttccgggaggaggagtgctcgtgcgtctgtgacatcggctacgggggagcccagtgtgccaccaaggtgcattttcccttccacacctgtgacctgaggatcgacggagactgcttcatggtgtcttcagaggcagacacctattacagagccaggatgaaatgtcagaggaaaggcggggtgctggcccagatcaagagccagaaagtgcaggacatcctcgccttctatctgggccgcctggagaccaccaacgaggtgattgacagtgacttcgagaccaggaacttctggatcgggctcacctacaagaccgccaaggactccttccgctgggccacaggggagcaccaggccttcaccagttttgcctttgggcagcctgacaaccacgggtttggcaactgcgtggagctgcaggcttcagctgccttcaactggaacgaccagcgctgcaaaacccgaaaccgttacatctgccagtttgcccaggagcacatctcccggtggggcccagggtcctgaggcctgaccacatggctccctcgcctgccctgggagcaccggctctgcttacctgtctgcccacctgtctggaacaagggccaggttaagatcacatgcctcatgtccaaagaggtctcagaccttgcacaatgccagaagttgggcagagagaggcagggaggccagtgagggccagggagtgagtgttagaagaagctggggcccttcgcctgcttttgattgggaagatgggcttcaattagatggcgaaggagaggacaccgccagtggtccaaaaaggctgctctcttccacctggcccagaccctgtggggcagcggagcttccctgtggcatgaaccccacagggtattaaattatgaatcagctgaa

SEQ ID NO: 123017 - DNA, 574 bp, Homo sapiens
  Payload ID: 4157
  Gene Symbol: CLEC18A
  Gene Name: C-type lectin domain family 18, member A
  ENST ID: ENST00000561889
  CDS Start-End: 375-574
aaatccgtggcccggaggagccccagacaggggcctgcgggagccagggctggcccctacacccagcccgcaccgctgttccctcccgccaccccaaccccagcactcagcccacgcctgctgtacctggtctctctctcagcctcgctccattgctatgccccacgtcccctgcacccaccacactcctctcccatcttgttttccaagggcagggacacatgcttattctgccgtgtgttgggttcaggtccccccatcctcgggctgcctgaccttctctccccaccccagccctgaacaggaaggagagtttcttgctcctctccctgcacaaccgcctgcgcagctgggtccagccccctgcggctgacatgcggaggctgctcgtgtgggccacctcaagccagctgggctgtgggcggcacctgtgctctgcaggccaggcagcgatagaagcctttgtctgtgcctactcccccagaggcaactgggaggtcaacgggaagacaatcgtcccctataagaagggtgcctggtgttcgctctgcacagccagtgtctcaggctgctt

SEQ ID NO: 123018 - DNA, 2282 bp, Homo sapiens
  Payload ID: 4157
  Gene Symbol: CLEC18A
  Gene Name: C-type lectin domain family 18, member A
  ENST ID: ENST00000617654
  CDS Start-End: 219-1118
cggccatcggtcactaatctgcagcactggaatgtccgcgggccaatcagcggggtctctgggggctccccaagggtgctaataatcccacaatgattagcaggggccgcggcccagcctgactcctggagattgtgaatagctccatccagcctgagaaacaagccgggtggctgagccaggctgtgcacggagcgcctgacgggcccaacagacccatgctgcatccagagacctcccctggccgggggcatctcctggctgtgctcctggccctccttggcaccgcctgggcagaggtgtggccaccccagctgcaggagcaggctccgatggccggagccctgaacaggaaggagagtttcttgctcctctccctgcacaaccgcctgcgcagctgggtccagccccctgcggctgacatgcggaggctggactggagtgacagcctggcccagctggctcaaggcagccctctgtggaaccccaaccccgagcctggcgtccggcctgtggcgcaccctgcaagtgggctggaacatgcagctgctccgcgggcttggtgtcctttgtcgaagtggagcctatggtttgcagaggggcagcggtacagccacgcggcaggagagtgtgctcgcaacgccacctgcacccactacacgcagctcgtgtgggccacctcaagccagctgggctgtgggcggcacctgtgctctgcaggccaggcagcgatagaagcctttgtctgtgcctactcccccagaggcaactgggaggtcaacgggaagacaatcgtcccctataagaagggtgcctggtgttcgctctgcacagccagtgtctcaggctgcttcaaagcctgggaccatgcaggggggctctgtgaggtccccaggaatccttgtcgcatgagctgccagaaccatggacgtctcaacatcagcacctgccactgccactgtccccctggctacacgggcagatactgccaagtgaggtgcagcctgcagtgtgtgcacggccggttccgggaggaggagtgctcgtgcgtctgtgacatcggctacgagcccagtgtgccaccaaggtgcattttcccttccacacctgtgacctgaggatcgacggagactgcttcatggtgtcttcagaggcagacacctattacagagccaggatgaaatgtcagaggaaaggcggggtgctggcccagatcaagagccagaaagtgcaggacatcctcgccttctatctgggccgcctggagaccaccaacgaggtgattgacagtgacttcgagaccaggaacttctggatcgggctcacctacaagaccgccaaggactccttccgctgggccacaggggagcaccaggccttcaccagttttgcctttgggcagcctgacaaccacgggtttggcaactgcgtggagctgcaggcttcagctgccttcaactggaacgaccagcgctgcaaaacccgaaaccgttacatctgccagtttgcccaggagcacatctcccggtggggcccagggtcctgaggcctgaccacatggctccctcgcctgccctgggagcaccggctctgcttacctgtctgcccacctgtctggaacaagggccaggttaagatcacatgcctcatgtccaaagaggtctcagaccttgcacaatgccagaagttgggcagagagaggcagggaggccagtgagggccagggagtgagtgttagaagaagctggggcccttcgcctgcttttgattgggaagatgggcttcaattagatggcgaaggagaggacaccgccagtggtccaaaaaggctgctctcttccacctggcccagaccctgtggggcagcggagcttccctgtggcatgaaccccacagggtattaaattatgaatcagctgaacctgtgcatgctcatttcaaagggaaattcagatgatccaggatgaccctggagagaccagagggggcctgaggcttcactgcagcggcctccacccacctattccctttcctggtcaccttcatggtccaggacactctctggaagttctgggtctccccaagaagaggaagaccagactctgcctcagtgaggagctgttctcatggctggggcccaggcaggcagggtattaatagaagttgctctgaatgtctgggagacgacgcgtgtgtgttgcccccaccggcggagtgtcatcgcaccagggccaatggtagtcagagcctgtgcagtcccgctccctcacccagctcctcag

SEQ ID NO: 123019 - DNA, 2294 bp, Homo sapiens
  Payload ID: 4157
  Gene Symbol: CLEC18A
  Gene Name: C-type lectin domain family 18, member A
  ENST ID: ENST00000620064
  CDS Start-End: 219-1130
cggccatcggtcactaatctgcagcactggaatgtccgcgggccaatcagcggggtctctgggggctccccaagggtgctaataatcccacaatgattagcaggggccgcggcccagcctgactcctggagattgtgaatagctccatccagcctgagaaacaagccgggtggctgagccaggctgtgcacggagcgcctgacgggcccaacagacccatgctgcatccagagacctcccctggccgggggcatctcctggctgtgctcctggccctccttggcaccgcctgggcagaggtgtggccaccccagctgcaggagcaggctccgatggccggagccctgaacaggaaggagagtttcttgctcctctccctgcacaaccgcctgcgcagctgggtccagccccctgcggctgacatgcggaggctggactggagtgacagcctggcccagctggctcaagccagggcagccctctgtggaaccccaaccccgagcctggcgtccggcctgtggcgcaccctgcaagtgggctggaacatgcagctgctacccgcgggcttggtgtcctttgtcgaagtggtcagcctatggtttgcagaggggcagcggtacagccacgcggcaggagagtgtgctcgcaacgccacctgcacccactacacgcagctcgtgtgggccacctcaagccagctgggctgtgggcggcacctgtgctctgcaggccaggcagcgatagaagcctttgtctgtgcctactcccccagaggcaactgggaggtcaacgggaagacaatcgtcccctataagaagggtgcctggtgttcgctctgcacagccagtgtctcaggctgcttcaaagcctgggaccatgcaggggggctctgtgaggtccccaggaatccttgtcgcatgagctgccagaaccatggacgtctcaacatcagcacctgccactgccactgtccccctggctacacgggcagatactgccaagtgaggtgcagcctgcagtgtgtgcacggccggttccgggaggaggagtgctcgtgcgtctgtgacatcggctacggggagcccagtgtgccaccaaggtgcattttcccttccacacctgtgacctgaggatcgacggagactgcttcatggtgtcttcagaggcagacacctattacagagccaggatgaaatgtcagaggaaaggcggggtgctggcccagatcaagagccagaaagtgcaggacatcctcgccttctatctgggccgcctggagaccaccaacgaggtgattgacagtgacttcgagaccaggaacttctggatcgggctcacctacaagaccgccaaggactccttccgctgggccacaggggagcaccaggccttcaccagttttgcctttgggcagcctgacaaccacgggtttggcaactgcgtggagctgcaggcttcagctgccttcaactggaacgaccagcgctgcaaaacccgaaaccgttacatctgccagtttgcccaggagcacatctcccggtggggcccagggtcctgaggcctgaccacatggctccctcgcctgccctgggagcaccggctctgcttacctgtctgcccacctgtctggaacaagggccaggttaagatcacatgcctcatgtccaaagaggtctcagaccttgcacaatgccagaagttgggcagagagaggcagggaggccagtgagggccagggagtgagtgttagaagaagctggggcccttcgcctgcttttgattgggaagatgggcttcaattagatggcgaaggagaggacaccgccagtggtccaaaaaggctgctctcttccacctggcccagaccctgtggggcagcggagcttccctgtggcatgaaccccacagggtattaaattatgaatcagctgaacctgtgcatgctcatttcaaagggaaattcagatgatccaggatgaccctggagagaccagagggggcctgaggcttcactgcagcggcctccacccacctattccctttcctggtcaccttcatggtccaggacactctctggaagttctgggtctccccaagaagaggaagaccagactctgcctcagtgaggagctgttctcatggctggggcccaggcaggcagggtattaatagaagttgctctgaatgtctgggagacgacgcgtgtgtgttgcccccaccggcggagtgtcatcgcaccagggccaatggtagtcagagcctgtgcagtcccgctccctcacccagctcctcag

SEQ ID NO: 123020 - DNA, 2215 bp, Homo sapiens
  Payload ID: 4157
  Gene Symbol: CLEC18A
  Gene Name: C-type lectin domain family 18, member A
  Uniprot ID: A5D8T8
  ENST ID: ENST00000615430
  CDS Start-End: 139-1479
gactttcctaaggcacccttttcctcgtgcagcccagcctgactcctggagattgtgaatagctccatccagcctgagaaacaagccgggtggctgagccaggctgtgcacggagcgcctgacgggcccaacagacccatgctgcatccagagacctcccctggccgggggcatctcctggctgtgctcctggccctccttggcaccgcctgggcagaggtgtggccaccccagctgcaggagcaggctccgatggccggagccctgaacaggaaggagagtttcttgctcctctccctgcacaaccgcctgcgcagctgggtccagccccctgcggctgacatgcggaggctggactggagtgacagcctggcccagctggctcaagccagggcagccctctgtggaaccccaaccccgagcctggcgtccggcctgtggcgcaccctgcaagtgggctggaacatgcagctgctacccgcgggcttggtgtcctttgtcgaagtggtcagcctatggtttgcagaggggcagcggtacagccacgcggcaggagagtgtgctcgcaacgccacctgcacccactacacgcagctcgtgtgggccacctcaagccagctgggctgtgggcggcacctgtgctctgcaggccaggcagcgatagaagcctttgtctgtgcctactcccccagaggcaactgggaggtcaacgggaagacaatcgtcccctataagaagggtgcctggtgttcgctctgcacagccagtgtctcaggctgcttcaaagcctgggaccatgcaggggggctctgtgaggtccccaggaatccttgtcgcatgagctgccagaaccatggacgtctcaacatcagcacctgccactgccactgtccccctggctacacgggcagatactgccaagtgaggtgcagcctgcagtgtgtgcacggccggttccgggaggaggagtgctcgtgcgtctgtgacatcggctacgggggagcccagtgtgccaccaaggtgcattttcccttccacacctgtgacctgaggatcgacggagactgcttcatggtgtcttcagaggcagacacctattacagagccaggatgaaatgtcagaggaaaggcggggtgctggcccagatcaagagccagaaagtgcaggacatcctcgccttctatctgggccgcctggagaccaccaacgaggtgattgacagtgacttcgagaccaggaacttctggatcgggctcacctacaagaccgccaaggactccttccgctgggccacaggggagcaccaggccttcaccagttttgcctttgggcagcctgacaaccacgggtttggcaactgcgtggagctgcaggcttcagctgccttcaactggaacgaccagcgctgcaaaacccgaaaccgttacatctgccagtttgcccaggagcacatctcccggtggggcccagggtcctgaggcctgaccacatggctccctcgcctgccctgggagcaccggctctgcttacctgtctgcccacctgtctggaacaagggccaggttaagatcacatgcctcatgtccaaagaggtctcagaccttgcacaatgccagaagttgggcagagagaggcagggaggccagtgagggccagggagtgagtgttagaagaagctggggcccttcgcctgcttttgattgggaagatgggcttcaattagatggcgaaggagaggacaccgccagtggtccaaaaaggctgctctcttccacctggcccagaccctgtggggcagcggagcttccctgtggcatgaaccccacagggtattaaattatgaatcagctgaacctgtgcatgctcatttcaaagggaaattcagatgatccaggatgaccctggagagaccagagggggcctgaggcttcactgcagcggcctccacccacctattccctttcctggtcaccttcatggtccaggacactctctggaagttctgggtctccccaagaagaggaagaccagactctgcctcagtgaggagctgttctcatggctggggcccaggcaggcagggtattaatagaagttgctctgaatgtctgggagacgacgcgtgtgtgttgcccccaccggcggagtgtcatcgcaccagggccaatggtagtcagagcctgtgcagtcccgctccctcacccagctcctcag

SEQ ID NO: 123021 - DNA, 1865 bp, Homo sapiens
  Payload ID: 4158
  Gene Symbol: CLEC18B
  Gene Name: C-type lectin domain family 18, member B
  Uniprot ID: Q6UXF7
  ENST ID: ENST00000339953
  CDS Start-End: 123-1490
ctcttttgtccaccagcccagcctgactcctggagattgtgaatagctccatccagcctgagaaacaagccgggtggctgagccaggctgtgcacggagcgcctgacgggcccaacagacccatgctgcatccagagacctcccctggccgggggcatctcctggctgtgctcctggccctccttggcaccacctgggcagaggtgtggccaccccagctgcaggagcaggctccgatggccggagccctgaacaggaaggagagtttcttgctcctctccctgcacaaccgcctgcgcagctgggtccagccccctgcggctgacatgcggaggctggactggagtgacagcctggcccaactggctcaagccagggcagccctctgtggaatcccaaccccgagcctggcgtccggcctgtggcgcaccctgcaagtgggctggaacatgcagctgctgcccgcgggcttggcgtcctttgttgaagtggtcagcctgtggtttgcagaggggcagcggtacagccacgcggcaggagagtgtgctcgcaacgccacctgcacccactacacgcagctcgtgtgggccacctcaagccagctgggctgtgggcggcacctgtgctctgcaggccagacagcgatagaagcctttgtctgtgcctactcccccggaggcaactgggaggtcaacgggaagacaatcatcccctataagaagggtgcctggtgttcgctctgcacagccagtgtctcaggctgcttcaaagcctgggaccatgcaggggggctctgtgaggtccccaggaatccttgtcgcatgagctgccagaaccatggacgtctcaacatcagcacctgccactgccactgtccccctggctacacgggcagatactgccaagtgaggtgcagcctgcagtgtgtgcacggccggttccgggaggaggagtgctcgtgcgtctgtgacatcggctacgggggagcccagtgtgccaccaaggtgcattttcccttccacacctgtgacctgaggatcgacggagactgcttcatggtgtcttcagaggcagacacctattacagagccaggatgaaatgtcagaggaaaggcggggtgctggcccagatcaagagccagaaagtgcaggacatcctcgccttctatctgggccgcctggagaccaccaacgaggtgattgacagtgacttcgagaccaggaacttctggatcgggctcacctacaagaccgccaaggactccttccgctgggccacaggggagcaccaggccttcaccagttttgcctttgggcagcctgacaaccacgggctggtgtggctgagtgctgccatggggtttggcaactgcgtggagctgcaggcttcagctgccttcaactggaacgaccagcgctgcaaaacccgaaaccgttacatctgccagtttgcccaggagcacatctcccggtggggcccagggtcctgaggcctgaccacatggctccctcgcctgccctgggagcaccggctctgcttacctgtctgcccacctgtctggaacaagggccaggttaagaccacatgcctcatgtccaaagaggtctcagaccttgcacaatgccagaagttgggcagagagaggcagggaggccagtgagggccagggagtgagtgttagaagaagctggggcccttcgcctgcttttgattgggaagatgggcttcaattagatggcgaaggagaggacaccgccagtggtccaaaaaggctgctctcttccacctggcccagaccctgtggggcagcggagcttccctgtggcatgaaccccacggggtattaaattatgaatcagctgaa

SEQ ID NO: 123022 - DNA, 1847 bp, Homo sapiens
  Payload ID: 4158
  Gene Symbol: CLEC18B
  Gene Name: C-type lectin domain family 18, member B
  ENST ID: ENST00000620745
  CDS Start-End: 135-1046
tcaccagcccccctcttttgtccaccagcccagcctgactcctggagattgtgaatagctccatccagcctgagaaacaagccgggtggctgagccaggctgtgcacggagcgcctgacgggcccaacagacccatgctgcatccagagacctcccctggccgggggcatctcctggctgtgctcctggccctccttggcaccacctgggcagaggtgtggccaccccagctgcaggagcaggctccgatggccggagccctgaacaggaaggagagtttcttgctcctctccctgcacaaccgcctgcgcagctgggtccagccccctgcggctgacatgcggaggctggactggagtgacagcctggcccaactggctcaagccagggcagccctctgtggaatcccaaccccgagcctggcgtccggcctgtggcgcaccctgcaagtgggctggaacatgcagctgctgcccgcgggcttggcgtcctttgttgaagtggtcagcctgtggtttgcagaggggcagcggtacagccacgcggcaggagagtgtgctcgcaacgccacctgcacccactacacgcagctcgtgtgggccacctcaagccagctgggctgtgggcggcacctgtgctctgcaggccagacagcgatagaagcctttgtctgtgcctactcccccagaggcaactgggaggtcaacgggaagacaatcatcccctataagaagggtgcctggtgttcgctctgcacagccagtgtctcaggctgcttcaaagcctgggaccatgcaggggggctctgtgaggtccccaggaatccttgtcgcatgagctgccagaaccatggacgtctcaacatcagcacctgccactgccactgtccccctggctacacgggcagatactgccaagtgaggtgcagcctgcagtgtgtgcacggccggttccgggaggaggagtgctcgtgcgtctgtgacatcggctacggggagcccagtgtgccaccaaggtgcattttcccttccacacctgtgacctgaggatcgacggagactgcttcatggtgtcttcagaggcagacacctattacagagccaggatgaaatgtcagaggaaaggcggggtgctggcccagatcaagagccagaaagtgcaggacatcctcgccttctatctgggccgcctggagaccaccaacgaggtgattgacagtgacttcgagaccaggaacttctggatcgggctcacctacaagaccgccaaggactccttccgctgggccacaggggagcaccaggccttcaccagttttgcctttgggcagcctgacaaccacgggtttggcaactgcgtggagctgcaggcttcagctgccttcaactggaacgaccagcgctgcaaaacccgaaaccgttacatctgccagtttgcccaggagcacatctcccggtggggcccagggtcctgaggcctgaccacatggctccctcgcctgccctgggagcaccggctctgcttacctgtctgcccacctgtctggaacaagggccaggttaagaccacatgcctcatgtccaaagaggtctcagaccttgcacaatgccagaagttgggcagagagaggcagggaggccagtgagggccagggagtgagtgttagaagaagctggggcccttcgcctgcttttgattgggaagatgggcttcaattagatggcgaaggagaggacaccgccagtggtccaaaaaggctgctctcttccacctggcccagaccctgtggggcagcggagcttccctgtggcatgaaccccacggggtattaaattatgaatcagctg

SEQ ID NO: 123023 - DNA, 2321 bp, Homo sapiens
  Payload ID: 4158
  Gene Symbol: CLEC18B
  Gene Name: C-type lectin domain family 18, member B
  ENST ID: ENST00000617101
  CDS Start-End: 245-1585
atagccgaggtcctcctcccagggcccggggctggggagcggaagccatcagtgggctcggaggacactgtcccagccaggacacggccatcggtcactaatctgcagcaccggaatgtccccaggccaatcagcgggcccagcctgactcctggagattgtgaatagctccatccagcctgagaaacaagccgggtggctgagccaggctgtgcacggagcgcctgacgggcccaacagacccatgctgcatccagagacctcccctggccgggggcatctcctggctgtgctcctggccctccttggcaccacctgggcagaggtgtggccaccccagctgcaggagcaggctccgatggccggagccctgaacaggaaggagagtttcttgctcctctccctgcacaaccgcctgcgcagctgggtccagccccctgcggctgacatgcggaggctggactggagtgacagcctggcccaactggctcaagccagggcagccctctgtggaatcccaaccccgagcctggcgtccggcctgtggcgcaccctgcaagtgggctggaacatgcagctgctgcccgcgggcttggcgtcctttgttgaagtggtcagcctgtggtttgcagaggggcagcggtacagccacgcggcaggagagtgtgctcgcaacgccacctgcacccactacacgcagctcgtgtgggccacctcaagccagctgggctgtgggcggcacctgtgctctgcaggccagacagcgatagaagcctttgtctgtgcctactcccccagaggcaactgggaggtcaacgggaagacaatcatcccctataagaagggtgcctggtgttcgctctgcacagccagtgtctcaggctgcttcaaagcctgggaccatgcaggggggctctgtgaggtccccaggaatccttgtcgcatgagctgccagaaccatggacgtctcaacatcagcacctgccactgccactgtccccctggctacacgggcagatactgccaagtgaggtgcagcctgcagtgtgtgcacggccggttccgggaggaggagtgctcgtgcgtctgtgacatcggctacgggggagcccagtgtgccaccaaggtgcattttcccttccacacctgtgacctgaggatcgacggagactgcttcatggtgtcttcagaggcagacacctattacagagccaggatgaaatgtcagaggaaaggcggggtgctggcccagatcaagagccagaaagtgcaggacatcctcgccttctatctgggccgcctggagaccaccaacgaggtgattgacagtgacttcgagaccaggaacttctggatcgggctcacctacaagaccgccaaggactccttccgctgggccacaggggagcaccaggccttcaccagttttgcctttgggcagcctgacaaccacgggtttggcaactgcgtggagctgcaggcttcagctgccttcaactggaacgaccagcgctgcaaaacccgaaaccgttacatctgccagtttgcccaggagcacatctcccggtggggcccagggtcctgaggcctgaccacatggctccctcgcctgccctgggagcaccggctctgcttacctgtctgcccacctgtctggaacaagggccaggttaagaccacatgcctcatgtccaaagaggtctcagaccttgcacaatgccagaagttgggcagagagaggcagggaggccagtgagggccagggagtgagtgttagaagaagctggggcccttcgcctgcttttgattgggaagatgggcttcaattagatggcgaaggagaggacaccgccagtggtccaaaaaggctgctctcttccacctggcccagaccctgtggggcagcggagcttccctgtggcatgaaccccacggggtattaaattatgaatcagctgaacctgtgcatgctcatttcaaagggaaattcagatgatccaggatgaccctggagagaccagagggggcctgaggcttcactgcagcggcctccacccacctattccctttcctggtcaccttcatggtccaggacactctctggaagttctgggtctccccaagaagaggaagaccagactctgcctcagtgaggggcagttctcatggctggggcccaggcaggcagggtattaatagaagttgctctgaatgtctgggagacgacgcgtgtgtgttgcccccaccggcggagtgtcatcgcaccagggccaatggtagtcagagcctgtgcagtcccgctccctcacccagctcctcag

SEQ ID NO: 123024 - DNA, 2215 bp, Homo sapiens
  Payload ID: 4158
  Gene Symbol: CLEC18B
  Gene Name: C-type lectin domain family 18, member B
  ENST ID: ENST00000619275
  CDS Start-End: 139-1479
gactttcctaaggcacccttttcctcgtgcagcccagcctgactcctggagattgtgaatagctccatccagcctgagaaacaagccgggtggctgagccaggctgtgcacggagcgcctgacgggcccaacagacccatgctgcatccagagacctcccctggccgggggcatctcctggctgtgctcctggccctccttggcaccacctgggcagaggtgtggccaccccagctgcaggagcaggctccgatggccggagccctgaacaggaaggagagtttcttgctcctctccctgcacaaccgcctgcgcagctgggtccagccccctgcggctgacatgcggaggctggactggagtgacagcctggcccaactggctcaagccagggcagccctctgtggaatcccaaccccgagcctggcgtccggcctgtggcgcaccctgcaagtgggctggaacatgcagctgctgcccgcgggcttggcgtcctttgttgaagtggtcagcctgtggtttgcagaggggcagcggtacagccacgcggcaggagagtgtgctcgcaacgccacctgcacccactacacgcagctcgtgtgggccacctcaagccagctgggctgtgggcggcacctgtgctctgcaggccagacagcgatagaagcctttgtctgtgcctactcccccagaggcaactgggaggtcaacgggaagacaatcatcccctataagaagggtgcctggtgttcgctctgcacagccagtgtctcaggctgcttcaaagcctgggaccatgcaggggggctctgtgaggtccccaggaatccttgtcgcatgagctgccagaaccatggacgtctcaacatcagcacctgccactgccactgtccccctggctacacgggcagatactgccaagtgaggtgcagcctgcagtgtgtgcacggccggttccgggaggaggagtgctcgtgcgtctgtgacatcggctacgggggagcccagtgtgccaccaaggtgcattttcccttccacacctgtgacctgaggatcgacggagactgcttcatggtgtcttcagaggcagacacctattacagagccaggatgaaatgtcagaggaaaggcggggtgctggcccagatcaagagccagaaagtgcaggacatcctcgccttctatctgggccgcctggagaccaccaacgaggtgattgacagtgacttcgagaccaggaacttctggatcgggctcacctacaagaccgccaaggactccttccgctgggccacaggggagcaccaggccttcaccagttttgcctttgggcagcctgacaaccacgggtttggcaactgcgtggagctgcaggcttcagctgccttcaactggaacgaccagcgctgcaaaacccgaaaccgttacatctgccagtttgcccaggagcacatctcccggtggggcccagggtcctgaggcctgaccacatggctccctcgcctgccctgggagcaccggctctgcttacctgtctgcccacctgtctggaacaagggccaggttaagaccacatgcctcatgtccaaagaggtctcagaccttgcacaatgccagaagttgggcagagagaggcagggaggccagtgagggccagggagtgagtgttagaagaagctggggcccttcgcctgcttttgattgggaagatgggcttcaattagatggcgaaggagaggacaccgccagtggtccaaaaaggctgctctcttccacctggcccagaccctgtggggcagcggagcttccctgtggcatgaaccccacggggtattaaattatgaatcagctgaacctgtgcatgctcatttcaaagggaaattcagatgatccaggatgaccctggagagaccagagggggcctgaggcttcactgcagcggcctccacccacctattccctttcctggtcaccttcatggtccaggacactctctggaagttctgggtctccccaagaagaggaagaccagactctgcctcagtgaggggcagttctcatggctggggcccaggcaggcagggtattaatagaagttgctctgaatgtctgggagacgacgcgtgtgtgttgcccccaccggcggagtgtcatcgcaccagggccaatggtagtcagagcctgtgcagtcccgctccctcacccagctcctcag

SEQ ID NO: 123025 - DNA, 1934 bp, Homo sapiens
  Payload ID: 4159
  Gene Symbol: CLEC18C
  Gene Name: C-type lectin domain family 18, member C
  Uniprot ID: Q8NCF0
  ENST ID: ENST00000314151
  CDS Start-End: 219-1559
cggccatcggtcactaatctgcagcactggaatgtccgcaggccaatcagcggggtctctgggggctccccaagggtgctaataatcccacaatgattagcaggggccgcggcccagcctgactcctggagattgtgaatagctccatccagcctgagaaacaagccgggtggctgagccaggctgtgcacggagtgcctgacgggcccaacagacccatgctgcatccagagacctcccctggccgggggcatctcctggctgtgctcctggccctccttggcaccgcctgggcagaggtgtggccaccccagctgcaggagcaggctccgatggccggagccctgaacaggaaggagagtttcttgctcctctccctgcacaaccgcctgcgcagctgggtccagccccctgcggctgacatgcggaggctggactggagtgacagcctggcccaactggctcaagccagggcagccctctgtggaatcccaaccccgagcctggcgtccggcctgtggcgcaccctgcaagtgggctggaacatgcagctgctgcccgcgggcttggcgtcctttgttgaagtggtcagcctatggtttgcagaggggcagcggtacagccacgcggcaggagagtgtgctcgcaacgccacctgcacccactacacgcagctcgtgtgggccacctcaagccagctgggctgtgggcggcacctgtgctctgcaggccaggcagcgatagaagcctttgtctgtgcctactcccccagaggcaactgggaggtcaacgggaagacaatcgtcccctataagaagggtgcctggtgttcgctctgcacagccagtgtctcaggctgcttcaaagcctgggaccatgcaggggggctctgtgaggtccccaggaatccttgtcgcatgagctgccagaaccatggacgtctcaacatcagcacctgccactgccactgtccccctggctacacgggcagatactgccaagtgaggtgcagcctgcagtgtgtgcacggccggttccgggaggaggagtgctcgtgcgtctgtgacatcggctacgggggagcccagtgtgccaccaaggtgcattttcccttccacacctgtgacctgaggatcgacggagactgcttcatggtgtcttcagaggcagacacctattacagagccaggatgaaatgtcagaggaaaggcggggtgctggcccagatcaagagccagaaagtgcaggacatcctcgccttctatctgggccgcctggagaccaccaacgaggtgattgacagtgacttcgagaccaggaacttctggatcgggctcacctacaagaccgccaaggactccttccgctgggccacaggggagcaccaggccttcaccagttttgcctttgggcagcctgacaaccacgggtttggcaactgcgtggagctgcaggcttcagctgccttcaactggaacaaccagcgctgcaaaacccgaaaccgttacatctgccagtttgcccaggagcacatctcccggtggggcccagggtcctgaggcctgaccacatggctccctcgcctgccctgggagcaccggctctgcttacctgtccgcccacctgtctggaacaagggccaggttaagaccacatgcctcatgtccaaagaggtctcagaccttgcacaatgccagaagttgggcagagagaggcagggaggccagtgagggccagggagtgagtgttagaagaagctggggcccttcgcctgcttttgattgggaagatgggcttcaattagatggcaaaggagaggacaccgccagtggtccaaaaaggctgctctcttccacctggcccagaccctgtggggcagcggagcttccctgtggcatgaaccccacagggtattaaattatgaatcagctgaa

SEQ ID NO: 123026 - DNA, 1865 bp, Homo sapiens
  Payload ID: 4159
  Gene Symbol: CLEC18C
  Gene Name: C-type lectin domain family 18, member C
  ENST ID: ENST00000536907
  CDS Start-End: 123-1490
ctcttttgtccaccagcccagcctgactcctggagattgtgaatagctccatccagcctgagaaacaagccgggtggctgagccaggctgtgcacggagtgcctgacgggcccaacagacccatgctgcatccagagacctcccctggccgggggcatctcctggctgtgctcctggccctccttggcaccgcctgggcagaggtgtggccaccccagctgcaggagcaggctccgatggccggagccctgaacaggaaggagagtttcttgctcctctccctgcacaaccgcctgcgcagctgggtccagccccctgcggctgacatgcggaggctggactggagtgacagcctggcccaactggctcaagccagggcagccctctgtggaatcccaaccccgagcctggcgtccggcctgtggcgcaccctgcaagtgggctggaacatgcagctgctgcccgcgggcttggcgtcctttgttgaagtggtcagcctatggtttgcagaggggcagcggtacagccacgcggcaggagagtgtgctcgcaacgccacctgcacccactacacgcagctcgtgtgggccacctcaagccagctgggctgtgggcggcacctgtgctctgcaggccaggcagcgatagaagcctttgtctgtgcctactcccccagaggcaactgggaggtcaacgggaagacaatcgtcccctataagaagggtgcctggtgttcgctctgcacagccagtgtctcaggctgcttcaaagcctgggaccatgcaggggggctctgtgaggtccccaggaatccttgtcgcatgagctgccagaaccatggacgtctcaacatcagcacctgccactgccactgtccccctggctacacgggcagatactgccaagtgaggtgcagcctgcagtgtgtgcacggccggttccgggaggaggagtgctcgtgcgtctgtgacatcggctacgggggagcccagtgtgccaccaaggtgcattttcccttccacacctgtgacctgaggatcgacggagactgcttcatggtgtcttcagaggcagacacctattacagagccaggatgaaatgtcagaggaaaggcggggtgctggcccagatcaagagccagaaagtgcaggacatcctcgccttctatctgggccgcctggagaccaccaacgaggtgattgacagtgacttcgagaccaggaacttctggatcgggctcacctacaagaccgccaaggactccttccgctgggccacaggggagcaccaggccttcaccagttttgcctttgggcagcctgacaaccacgggctggtgtggctgagtgctgccatggggtttggcaactgcgtggagctgcaggcttcagctgccttcaactggaacaaccagcgctgcaaaacccgaaaccgttacatctgccagtttgcccaggagcacatctcccggtggggcccagggtcctgaggcctgaccacatggctccctcgcctgccctgggagcaccggctctgcttacctgtccgcccacctgtctggaacaagggccaggttaagaccacatgcctcatgtccaaagaggtctcagaccttgcacaatgccagaagttgggcagagagaggcagggaggccagtgagggccagggagtgagtgttagaagaagctggggcccttcgcctgcttttgattgggaagatgggcttcaattagatggcaaaggagaggacaccgccagtggtccaaaaaggctgctctcttccacctggcccagaccctgtggggcagcggagcttccctgtggcatgaaccccacagggtattaaattatgaatcagctgaa

SEQ ID NO: 123027 - DNA, 1955 bp, Homo sapiens
  Payload ID: 4159
  Gene Symbol: CLEC18C
  Gene Name: C-type lectin domain family 18, member C
  Uniprot ID: Q8NCF0
  ENST ID: ENST00000541793
  CDS Start-End: 240-1580
cgaggtcctcctcccagggcccggggctggggagcggaagccatcagtgggctcggaggacactgtcccagccaggacacggccatcggtcactaatctgcagcactggaatgtccgcaggccaatcagcgggcccagcctgactcctggagattgtgaatagctccatccagcctgagaaacaagccgggtggctgagccaggctgtgcacggagtgcctgacgggcccaacagacccatgctgcatccagagacctcccctggccgggggcatctcctggctgtgctcctggccctccttggcaccgcctgggcagaggtgtggccaccccagctgcaggagcaggctccgatggccggagccctgaacaggaaggagagtttcttgctcctctccctgcacaaccgcctgcgcagctgggtccagccccctgcggctgacatgcggaggctggactggagtgacagcctggcccaactggctcaagccagggcagccctctgtggaatcccaaccccgagcctggcgtccggcctgtggcgcaccctgcaagtgggctggaacatgcagctgctgcccgcgggcttggcgtcctttgttgaagtggtcagcctatggtttgcagaggggcagcggtacagccacgcggcaggagagtgtgctcgcaacgccacctgcacccactacacgcagctcgtgtgggccacctcaagccagctgggctgtgggcggcacctgtgctctgcaggccaggcagcgatagaagcctttgtctgtgcctactcccccagaggcaactgggaggtcaacgggaagacaatcgtcccctataagaagggtgcctggtgttcgctctgcacagccagtgtctcaggctgcttcaaagcctgggaccatgcaggggggctctgtgaggtccccaggaatccttgtcgcatgagctgccagaaccatggacgtctcaacatcagcacctgccactgccactgtccccctggctacacgggcagatactgccaagtgaggtgcagcctgcagtgtgtgcacggccggttccgggaggaggagtgctcgtgcgtctgtgacatcggctacgggggagcccagtgtgccaccaaggtgcattttcccttccacacctgtgacctgaggatcgacggagactgcttcatggtgtcttcagaggcagacacctattacagagccaggatgaaatgtcagaggaaaggcggggtgctggcccagatcaagagccagaaagtgcaggacatcctcgccttctatctgggccgcctggagaccaccaacgaggtgattgacagtgacttcgagaccaggaacttctggatcgggctcacctacaagaccgccaaggactccttccgctgggccacaggggagcaccaggccttcaccagttttgcctttgggcagcctgacaaccacgggtttggcaactgcgtggagctgcaggcttcagctgccttcaactggaacaaccagcgctgcaaaacccgaaaccgttacatctgccagtttgcccaggagcacatctcccggtggggcccagggtcctgaggcctgaccacatggctccctcgcctgccctgggagcaccggctctgcttacctgtccgcccacctgtctggaacaagggccaggttaagaccacatgcctcatgtccaaagaggtctcagaccttgcacaatgccagaagttgggcagagagaggcagggaggccagtgagggccagggagtgagtgttagaagaagctggggcccttcgcctgcttttgattgggaagatgggcttcaattagatggcaaaggagaggacaccgccagtggtccaaaaaggctgctctcttccacctggcccagaccctgtggggcagcggagcttccctgtggcatgaaccccacagggtattaaattatgaatcagctgaa

SEQ ID NO: 123028 - DNA, 1970 bp, Homo sapiens
  Payload ID: 4159
  Gene Symbol: CLEC18C
  Gene Name: C-type lectin domain family 18, member C
  Uniprot ID: Q8NCF0
  ENST ID: ENST00000569347
  CDS Start-End: 255-1595
tctgcctgctgtcgggggcgggctggccaggccgaggccggagcaggcaggcatcccccggagttgtctcttttcatgccagcgccaacaggaggctgtctggacacactgattactcactcaccagcctccctcttttgtccaccagcccagcctgactcctggagattgtgaatagctccatccagcctgagaaacaagccgggtggctgagccaggctgtgcacggagtgcctgacgggcccaacagacccatgctgcatccagagacctcccctggccgggggcatctcctggctgtgctcctggccctccttggcaccgcctgggcagaggtgtggccaccccagctgcaggagcaggctccgatggccggagccctgaacaggaaggagagtttcttgctcctctccctgcacaaccgcctgcgcagctgggtccagccccctgcggctgacatgcggaggctggactggagtgacagcctggcccaactggctcaagccagggcagccctctgtggaatcccaaccccgagcctggcgtccggcctgtggcgcaccctgcaagtgggctggaacatgcagctgctgcccgcgggcttggcgtcctttgttgaagtggtcagcctatggtttgcagaggggcagcggtacagccacgcggcaggagagtgtgctcgcaacgccacctgcacccactacacgcagctcgtgtgggccacctcaagccagctgggctgtgggcggcacctgtgctctgcaggccaggcagcgatagaagcctttgtctgtgcctactcccccagaggcaactgggaggtcaacgggaagacaatcgtcccctataagaagggtgcctggtgttcgctctgcacagccagtgtctcaggctgcttcaaagcctgggaccatgcaggggggctctgtgaggtccccaggaatccttgtcgcatgagctgccagaaccatggacgtctcaacatcagcacctgccactgccactgtccccctggctacacgggcagatactgccaagtgaggtgcagcctgcagtgtgtgcacggccggttccgggaggaggagtgctcgtgcgtctgtgacatcggctacgggggagcccagtgtgccaccaaggtgcattttcccttccacacctgtgacctgaggatcgacggagactgcttcatggtgtcttcagaggcagacacctattacagagccaggatgaaatgtcagaggaaaggcggggtgctggcccagatcaagagccagaaagtgcaggacatcctcgccttctatctgggccgcctggagaccaccaacgaggtgattgacagtgacttcgagaccaggaacttctggatcgggctcacctacaagaccgccaaggactccttccgctgggccacaggggagcaccaggccttcaccagttttgcctttgggcagcctgacaaccacgggtttggcaactgcgtggagctgcaggcttcagctgccttcaactggaacaaccagcgctgcaaaacccgaaaccgttacatctgccagtttgcccaggagcacatctcccggtggggcccagggtcctgaggcctgaccacatggctccctcgcctgccctgggagcaccggctctgcttacctgtccgcccacctgtctggaacaagggccaggttaagaccacatgcctcatgtccaaagaggtctcagaccttgcacaatgccagaagttgggcagagagaggcagggaggccagtgagggccagggagtgagtgttagaagaagctggggcccttcgcctgcttttgattgggaagatgggcttcaattagatggcaaaggagaggacaccgccagtggtccaaaaaggctgctctcttccacctggcccagaccctgtggggcagcggagcttccctgtggcatgaaccccacagggtattaaattatgaatcagctgaa

SEQ ID NO: 123029 - DNA, 836 bp, Homo sapiens
  Payload ID: 4159
  Gene Symbol: CLEC18C
  Gene Name: C-type lectin domain family 18, member C
  ENST ID: ENST00000562923
  CDS Start-End: 434-836
attttctgagaaacttggcccatggtgcagatctgctccagctcactctggtgggatcacgccagccacggccgggccacggcacatcatggcaacgtgctgcccacctgctacgccacctgtttttctagaggcggacgtgatcccagcaggactggagtcagcccagggcatcacgtgctctggtccccgcctgctttgactcctcctgcctcactccccccctggcctgtagtcacgttggtgagggtggtgggcaccggggctgggcccagcccccgaccctgcccagacagactttcctaaggcacccttttcctcgtgcagcccagcctgactcctggagattgtgaatagctccatccagcctgagaaacaagccgggtggctgagccaggctgtgcacggagtgcctgacgggcccaacagacccatgctgcatccagagacctcccctggccgggggcatctcctggctgtgctcctggccctccttggcaccgcctgggcagaggtgtggccaccccagctgcaggagcaggctccgatggccggagccctgaacaggaaggagagtttcttgctcctctccctgcacaaccgcctgcgcagctgggtccagccccctgcggctgacatgcggaggctgctcgtgtgggccacctcaagccagctgggctgtgggcggcacctgtgctctgcaggccaggcagcgatagaagcctttgtctgtgcctactcccccagaggcaactgggaggtcaacgggaagacaatcgtcccctataagaagggtgcctggtgttcgctctgcacagccagtgtctcaggctgct

SEQ ID NO: 123030 - DNA, 518 bp, Homo sapiens
  Payload ID: 4159
  Gene Symbol: CLEC18C
  Gene Name: C-type lectin domain family 18, member C
  ENST ID: ENST00000565806
  CDS Start-End: 161-518
cagcactggaatgtccgcaggccaatcagcggggtctctgggggctccccaaggcccagcctgactcctggagattgtgaatagctccatccagcctgagaaacaagccgggtggctgagccaggctgtgcacggagtgcctgacgggcccaacagacccatgctgcatccagagacctcccctggccgggggcatctcctggctgtgctcctggccctccttggcaccgcctgggcagaggtgtggccaccccagctgcaggagcaggctccgatggccggagccctgaacaggaaggagagtttcttgctcctctccctgcacaaccgcctgcgcagctgggtccagccccctgcggctgacatgcggaggctggactggagtgacagcctggcccaactggctcaagccagggcagccctctgtggaatcccaaccccgagcctggcgtccggcctgtggcgcaccctgcaagtgggctggaacatgcagctgctgcccgcgggcttggcgtcct

SEQ ID NO: 123031 - DNA, 2215 bp, Homo sapiens
  Payload ID: 4159
  Gene Symbol: CLEC18C
  Gene Name: C-type lectin domain family 18, member C
  Uniprot ID: Q8NCF0
  ENST ID: ENST00000618957
  CDS Start-End: 139-1479
gactttcctaaggcacccttttcctcgtgcagcccagcctgactcctggagattgtgaatagctccatccagcctgagaaacaagccgggtggctgagccaggctgtgcacggagtgcctgacgggcccaacagacccatgctgcatccagagacctcccctggccgggggcatctcctggctgtgctcctggccctccttggcaccgcctgggcagaggtgtggccaccccagctgcaggagcaggctccgatggccggagccctgaacaggaaggagagtttcttgctcctctccctgcacaaccgcctgcgcagctgggtccagccccctgcggctgacatgcggaggctggactggagtgacagcctggcccaactggctcaagccagggcagccctctgtggaatcccaaccccgagcctggcgtccggcctgtggcgcaccctgcaagtgggctggaacatgcagctgctgcccgcgggcttggcgtcctttgttgaagtggtcagcctatggtttgcagaggggcagcggtacagccacgcggcaggagagtgtgctcgcaacgccacctgcacccactacacgcagctcgtgtgggccacctcaagccagctgggctgtgggcggcacctgtgctctgcaggccaggcagcgatagaagcctttgtctgtgcctactcccccagaggcaactgggaggtcaacgggaagacaatcgtcccctataagaagggtgcctggtgttcgctctgcacagccagtgtctcaggctgcttcaaagcctgggaccatgcaggggggctctgtgaggtccccaggaatccttgtcgcatgagctgccagaaccatggacgtctcaacatcagcacctgccactgccactgtccccctggctacacgggcagatactgccaagtgaggtgcagcctgcagtgtgtgcacggccggttccgggaggaggagtgctcgtgcgtctgtgacatcggctacgggggagcccagtgtgccaccaaggtgcattttcccttccacacctgtgacctgaggatcgacggagactgcttcatggtgtcttcagaggcagacacctattacagagccaggatgaaatgtcagaggaaaggcggggtgctggcccagatcaagagccagaaagtgcaggacatcctcgccttctatctgggccgcctggagaccaccaacgaggtgattgacagtgacttcgagaccaggaacttctggatcgggctcacctacaagaccgccaaggactccttccgctgggccacaggggagcaccaggccttcaccagttttgcctttgggcagcctgacaaccacgggtttggcaactgcgtggagctgcaggcttcagctgccttcaactggaacaaccagcgctgcaaaacccgaaaccgttacatctgccagtttgcccaggagcacatctcccggtggggcccagggtcctgaggcctgaccacatggctccctcgcctgccctgggagcaccggctctgcttacctgtccgcccacctgtctggaacaagggccaggttaagaccacatgcctcatgtccaaagaggtctcagaccttgcacaatgccagaagttgggcagagagaggcagggaggccagtgagggccagggagtgagtgttagaagaagctggggcccttcgcctgcttttgattgggaagatgggcttcaattagatggcaaaggagaggacaccgccagtggtccaaaaaggctgctctcttccacctggcccagaccctgtggggcagcggagcttccctgtggcatgaaccccacagggtattaaattatgaatcagctgaacctgtgcatgctcatttcaaagggaaattcagatgatccaggatgaccctggagagaccagagggggcctgaggcttcactgcagcggcctccacccacctattccctttcctggtcaccttcatggtccaggacactctctggaagttctgggtctccccaagaagaggaagaccagactctgcctcagtgaggggcagttctcatggctggggcccaggcaggcagggtattaatagaagttgctctgaatgtctgggagacgacgcgtgtgtgttgcccccaccggcggagtgtcatcgcaccagggccaatggtagtcagagcctgtgcagtcccgctccctcacccagctcctcag

SEQ ID NO: 123032 - DNA, 2291 bp, Homo sapiens
  Payload ID: 4159
  Gene Symbol: CLEC18C
  Gene Name: C-type lectin domain family 18, member C
  ENST ID: ENST00000611662
  CDS Start-End: 219-1127
cggccatcggtcactaatctgcagcactggaatgtccgcaggccaatcagcggggtctctgggggctccccaagggtgctaataatcccacaatgattagcaggggccgcggcccagcctgactcctggagattgtgaatagctccatccagcctgagaaacaagccgggtggctgagccaggctgtgcacggagtgcctgacgggcccaacagacccatgctgcatccagagacctcccctggccgggggcatctcctggctgtgctcctggccctccttggcaccgcctgggcagaggtgtggccaccccagctgcaggagcaggctccgatggccggagccctgaacaggaaggagagtttcttgctcctctccctgcacaaccgcctgcgcagctgggtccagccccctgcggctgacatgcggaggctggactggagtgacagcctggcccaactggctcaagccagggcagccctctgtggaatcccaaccccgagcctggcgtccggcctgtggcgcaccctgcaagtgggctggaacatgcagctgctgcccgcgggcttggcgtcctttgttgaagtggtcagcctatggtttgcagaggggcagcggtacagccacgcggcaggagagtgtgctcgcaacgccacctgcacccactacacgcagctcgtgtgggccacctcaagccagctgggctgtgggcggcacctgtgctctgcaggccaggcagcgatagaagcctttgtctgtgcctactcccccagaggcaactgggaggtcaacgggaagacaatcgtcccctataagaagggtgcctggtgttcgctctgcacagccagtgtctcaggctgcttcaaagcctgggaccatgcaggggggctctgtgaggtccccaggaatccttgtcgcatgagctgccagaaccatggacgtctcaacatcagcacctgccactgccactgtccccctggctacacgggcagatactgccaagtgaggtgcagcctgcagtgtgtgcacggccggttccgggaggaggagtgctcgtgcgtctgtgacatcggctacgagcccagtgtgccaccaaggtgcattttcccttccacacctgtgacctgaggatcgacggagactgcttcatggtgtcttcagaggcagacacctattacagagccaggatgaaatgtcagaggaaaggcggggtgctggcccagatcaagagccagaaagtgcaggacatcctcgccttctatctgggccgcctggagaccaccaacgaggtgattgacagtgacttcgagaccaggaacttctggatcgggctcacctacaagaccgccaaggactccttccgctgggccacaggggagcaccaggccttcaccagttttgcctttgggcagcctgacaaccacgggtttggcaactgcgtggagctgcaggcttcagctgccttcaactggaacaaccagcgctgcaaaacccgaaaccgttacatctgccagtttgcccaggagcacatctcccggtggggcccagggtcctgaggcctgaccacatggctccctcgcctgccctgggagcaccggctctgcttacctgtccgcccacctgtctggaacaagggccaggttaagaccacatgcctcatgtccaaagaggtctcagaccttgcacaatgccagaagttgggcagagagaggcagggaggccagtgagggccagggagtgagtgttagaagaagctggggcccttcgcctgcttttgattgggaagatgggcttcaattagatggcaaaggagaggacaccgccagtggtccaaaaaggctgctctcttccacctggcccagaccctgtggggcagcggagcttccctgtggcatgaaccccacagggtattaaattatgaatcagctgaacctgtgcatgctcatttcaaagggaaattcagatgatccaggatgaccctggagagaccagagggggcctgaggcttcactgcagcggcctccacccacctattccctttcctggtcaccttcatggtccaggacactctctggaagttctgggtctccccaagaagaggaagaccagactctgcctcagtgaggggcagttctcatggctggggcccaggcaggcagggtattaatagaagttgctctgaatgtctgggagacgacgcgtgtgtgttgcccccaccggcggagtgtcatcgcaccagggccaatggtagtcagagcctgtgcagtcccgctccctcacccagctcctcag

SEQ ID NO: 123033 - DNA, 2288 bp, Homo sapiens
  Payload ID: 4159
  Gene Symbol: CLEC18C
  Gene Name: C-type lectin domain family 18, member C
  ENST ID: ENST00000611356
  CDS Start-End: 219-1124
cggccatcggtcactaatctgcagcactggaatgtccgcaggccaatcagcggggtctctgggggctccccaagggtgctaataatcccacaatgattagcaggggccgcggcccagcctgactcctggagattgtgaatagctccatccagcctgagaaacaagccgggtggctgagccaggctgtgcacggagtgcctgacgggcccaacagacccatgctgcatccagagacctcccctggccgggggcatctcctggctgtgctcctggccctccttggcaccgcctgggcagaggtgtggccaccccagctgcaggagcaggctccgatggccggagccctgaacaggaaggagagtttcttgctcctctccctgcacaaccgcctgcgcagctgggtccagccccctgcggctgacatgcggaggctggactggagtgacagcctggccaactggctcaagccaggcagccctctgtggaatcccaaccccgagcctggcgtccggcctgtggcgcaccctgcaagtgggctggaacatgcagcttgcccgcgggcttggcgtcctttgttgaagtggagcctatggtttgcagaggggcagcggtacagccacgcggcaggagagtgtgctcgcaacgccacctgcacccactacacgcagctcgtgtgggccacctcaagccagctgggctgtgggcggcacctgtgctctgcaggccaggcagcgatagaagcctttgtctgtgcctactcccccagaggcaactgggaggtcaacgggaagacaatcgtcccctataagaagggtgcctggtgttcgctctgcacagccagtgtctcaggctgcttcaaagcctgggaccatgcaggggggctctgtgaggtccccaggaatccttgtcgcatgagctgccagaaccatggacgtctcaacatcagcacctgccactgccactgtccccctggctacacgggcagatactgccaagtgaggtgcagcctgcagtgtgtgcacggccggttccgggaggaggagtgctcgtgcgtctgtgacatcggctacggggagcccagtgtgccaccaaggtgcattttcccttccacacctgtgacctgaggatcgacggagactgcttcatggtgtcttcagaggcagacacctattacagagccaggatgaaatgtcagaggaaaggcggggtgctggcccagatcaagagccagaaagtgcaggacatcctcgccttctatctgggccgcctggagaccaccaacgaggtgattgacagtgacttcgagaccaggaacttctggatcgggctcacctacaagaccgccaaggactccttccgctgggccacaggggagcaccaggccttcaccagttttgcctttgggcagcctgacaaccacgggtttggcaactgcgtggagctgcaggcttcagctgccttcaactggaacaaccagcgctgcaaaacccgaaaccgttacatctgccagtttgcccaggagcacatctcccggtggggcccagggtcctgaggcctgaccacatggctccctcgcctgccctgggagcaccggctctgcttacctgtccgcccacctgtctggaacaagggccaggttaagaccacatgcctcatgtccaaagaggtctcagaccttgcacaatgccagaagttgggcagagagaggcagggaggccagtgagggccagggagtgagtgttagaagaagctggggcccttcgcctgcttttgattgggaagatgggcttcaattagatggcaaaggagaggacaccgccagtggtccaaaaaggctgctctcttccacctggcccagaccctgtggggcagcggagcttccctgtggcatgaaccccacagggtattaaattatgaatcagctgaacctgtgcatgctcatttcaaagggaaattcagatgatccaggatgaccctggagagaccagagggggcctgaggcttcactgcagcggcctccacccacctattccctttcctggtcaccttcatggtccaggacactctctggaagttctgggtctccccaagaagaggaagaccagactctgcctcagtgaggggcagttctcatggctggggcccaggcaggcagggtattaatagaagttgctctgaatgtctgggagacgacgcgtgtgtgttgcccccaccggcggagtgtcatcgcaccagggccaatggtagtcagagcctgtgcagtcccgctccctcacccagctcctcag

SEQ ID NO: 123034 - DNA, 666 bp, Homo sapiens
  Payload ID: 4160
  Gene Symbol: CLEC19A
  Gene Name: C-type lectin domain family 19, member A
  Uniprot ID: Q6UXS0
  ENST ID: ENST00000465414
  CDS Start-End: 74-484
cctggacccaagctccagccaaaaagcctctctcctccactcaggctgggaggttgctttctaggagctcaggatgcaaaggtggacactgtgggctgcagccttcctgaccctccactctgcacaggcctttccacaaacagacatcagtatcagtccagccctgccagagctgcccctgccttccctgtgccccctgttctggatggagttcaaaggccactgctatcgattcttccctctcaataagacctgggctgaggccgacctctactgttctgagttctctgtgggcaggaagtccgccaagctggcctccatccacagctgggaggagaatgtctttgtatatgacctcgtgaacagctgtgttcccggcatcccagctgacgtctggacaggccttcatgatcacagacaggtgagaaagcagtggccattgggcccccttggaagctccagccaggattctattttgatttaataagcttttcacatcagtgccaggtcacggctatgcacacagcatatagagagaaatcagacaccaagatgtcacagttacagcatgaccaatttgtgaaagacatttaatgatgtcctactaaatgatgggaacagatagcatggtcagagaaaacctgtttggcttgggttctcttaaaa

SEQ ID NO: 123035 - DNA, 782 bp, Homo sapiens
  Payload ID: 4160
  Gene Symbol: CLEC19A
  Gene Name: C-type lectin domain family 19, member A
  ENST ID: ENST00000476906
  CDS Start-End: 70-267
gacccaagctccagccaaaaagcctctctcctccactcaggctgggaggttgctttctaggagctcaggatgcaaaggtggacactgtgggctgcagccttcctgaccctccactctgcacaggcctttccacaaacagacatcagtatcagtccagtctgtttcctttctgcccccagccctgccagagctgcccctgccttccctgtgccccctgttctggatggagttcaaaggccactgctatcgattcttccctctcaataagacctgggctgaggccgacctctactgttctgagttctctgtgggcaggaagtccgccaagctggcctccatccacaggtcaaatccagagatgcccatgtaggaccggccacatatgggtgacttaatgaaaaatggaggccgaattggatcatatcctctatttactttggtccaggaagctgggaggagaatgtctttgtatatgacctcgtgaacagctgtgttcccggcatcccagctgacgtctggacaggccttcatgatcacagacaggtgagaaagcagtggccattgggcccccttggaagctccagccaggattctattttgatttaataagcttttcacatcagtgccaggtcacggctatgcacacagcatatagagagaaatcagacaccaagatgtcacagttacagcatgaccaatttgtgaaagacatttaatgatgtcctactaaatgatgggaacagatagcatggtcagagaaaacctgtttggcttgggttctc

SEQ ID NO: 123036 - DNA, 557 bp, Homo sapiens
  Payload ID: 4160
  Gene Symbol: CLEC19A
  Gene Name: C-type lectin domain family 19, member A
  ENST ID: ENST00000493231
  CDS Start-End: 114-374
ccagctcctgccaggctccatctgaccctaggagagcaatcctggacccaagctccagccaaaaagcctctctcctccactcaggctgggaggttgctttctaggagctcaggatgcaaaggtggacactgtgggctgcagccttcctgaccctccactctgcacaggcctttccacaaacagacatcagtatcagtccagccctgccagagctgcccctgccttccctgtgccccctgttctggatggagttcaaaggccactgctatcgattcttccctctcaataagacctgggctgaggccgacctctactgttctgagttctctgtgggcaggaagtccgccaagctggcctccatccacagcctttgaactggaacatcagcctttttcctgcctttggactcaaactgaaacatcagttctttctgggactcaagcctgccagccttcagactggaactacaccagcagctctcctggatctcaggccttcatattcaggcaggaaatataccatcagctctcctgggtctccagcttgcccatccaccc

SEQ ID NO: 123037 - DNA, 732 bp, Homo sapiens
  Payload ID: 4161
  Gene Symbol: CLEC2A
  Gene Name: C-type lectin domain family 2, member A
  Uniprot ID: Q6UVW9
  ENST ID: ENST00000339766
  CDS Start-End: 19-501
atcggttagcgccttgccatgattaatccagagctgcgggatggcagagctgatggcttcatacatcggatagttcccaagttgatacaaaactggaagattggccttatgtgcttcctgagtattattattactacagtttgcattattatgatagccacatggtccaagcatgctaaacctgtggcatgttcaggggactggcttggagtgagagataagtgtttctatttttctgatgataccagaaattggacagccagtaaaatattttgtagtttgcagaaagcagaacttgctcagattgatacacaagaagacatggaatttttgaagaggtacgcaggaactgatatgcactggattggactaagcaggaaacaaggagattcttggaaatggacaaatggcaccacattcaatggttggccatcaaactccaaatggtcttgcaactggagcctccgacaatggcttcttctgctgggaccccttagataggcctctgagggagctctgactgccgtttccccaaaacaatgtcccctgtcagcaggaagcagttaaatctgtcttcatccttatccttaatataacggcagttagatgtacttctttagagggagtaaatttatcaattcagagcaattcatcctcctctttccatctttgattcacagttaataggctataaattttgataatgtagaataaactacagaaaacttcttg

SEQ ID NO: 123038 - DNA, 916 bp, Homo sapiens
  Payload ID: 4161
  Gene Symbol: CLEC2A
  Gene Name: C-type lectin domain family 2, member A
  Uniprot ID: Q6UVW9
  ENST ID: ENST00000455827
  CDS Start-End: 53-577
tgaaaagctttctagtcctctcctactgatctccatcggttagcgccttgccatgattaatccagagctgcgggatggcagagctgatggcttcatacatcggatagttcccaagttgatacaaaactggaagattggccttatgtgcttcctgagtattattattactacagtttgcattattatgatagccacatggtccaagcatgctaaacctgtggcatgttcaggggactggcttggagtgagagataagtgtttctatttttctgatgataccagaaattggacagccagtaaaatattttgtagtttgcagaaagcagaacttgctcagattgatacacaagaagacatggaatttttgaagaggtacgcaggaactgatatgcactggattggactaagcaggaaacaaggagattcttggaaatggacaaatggcaccacattcaatggttggtttgaaattatagggaacggatcctttgctttcttgagtgctgatggagtccatagttccagaggatttattgatatcaagtggatttgcagcaaacctaaatattttttatagagcagaaaaaacttgaaaatgattatcacacttcaagattgaaagaagagctaattatgcaaaagtggctttctcacttattctgttacagaatacggaacctctggtgagggcccattttctagtttatagatggaaacttcttgctgtgccctgccatggttaaagagacaaggccgttctctggagccttttataagggcacaatcacatttactatggctccatcctcatgaactaatcacctcctgatggatggctccatcccctaataccatcacactggtgattagctttcaatttatgagttttgggaggacccaaatactcagaacatag

SEQ ID NO: 123039 - DNA, 1700 bp, Homo sapiens
  Payload ID: 4162
  Gene Symbol: CLEC2B
  Gene Name: C-type lectin domain family 2, member B
  Uniprot ID: Q92478
  ENST ID: ENST00000228438
  CDS Start-End: 935-1384
ttttcctcttcaagtttctctctcagaacaaatgcagtgttaatcccgaagccgcttgcgggacactggcttcttctcctcagtttcctccctaatatatttgttgaggggtaatacaaaatcactgggaaactgattagagcagatttgaagacaaaattgtggcctggtaacttagcaaaagcataatggtgtcatcttgtatgctgatgataacgttctgggcactttgttactttcgttttcttttttccctctgtgtgtctttgtgtgtgtttgtgtgtgtgctcacacccacacgtgtgactttgcacgcatttgtctttgagagagagataatagtttttgtttttctttcagtagccaaagtttaaaccattgctttttctttgattctatcgcttttaaggtgatctttcttaacacaggataagaaagcagtaatgtcctaaagaatgctgttgaattaattagtatcagcctctcctacagttctggaaggatacgtggttaagtaccactcctggatgaatcagaaaaacagccacttgagcaatttcgtgttctgtggttcagatgagaatcccagttgagaaagtaagaaaatatgtgtttattcttcagctttaaattgttatatcacaaacttccttcctccttggcaagctttcttttttgacgagaagaaaattgtaataaacaacagtatgactaatagatagtcacatggttacttccagtttgcaaaatgctatttatactttgagttactcttcaaaagtggtatacctctagtttggagctgtgctgtaaaaacaagagtaacatttttatattaaagttaaataaagttacaactttgaagagagtttctgcaagacatgacacaaagctgctagcagaaaatcaaaacgctgattaaaagaagcacggtatgatgaccaaacataaaaagtgttttataattgttggtgttttaataacaactaatattattactctgatagttaaactaactcgagattctcagagtttatgcccctatgattggattggtttccaaaacaaatgctattatttctctaaagaagaaggagattggaattcaagtaaatacaactgttccactcaacatgccgacctaactataattgacaacatagaagaaatgaattttcttaggcggtataaatgcagttctgatcactggattggactgaagatggcaaaaaatcgaacaggacaatgggtagatggagctacatttaccaaatcgtttggcatgagagggagtgaaggatgtgcctacctcagcgatgatggtgcagcaacagctagatgttacaccgaaagaaaatggatttgcaggaaaagaatacactaagttaatgtctaagataatggggaaaatagaaaataacattattaagtgtaaaaccagcaaagtacttttttaattaaacaaagttcgagttttgtacctgtctggttaattctgcttacgtgtcaggctacacataaaagccacttcaaagattggcaaaaaatggttacaggtattctgctgagtttttttctttctttctttctctctctctctttctttctttctttctttctttctttttttaactgtaaaccagaaaacaattgtggggatcaaggacagacatagcacttagacaggactttcatgaccc

SEQ ID NO: 123040 - DNA, 745 bp, Homo sapiens
  Payload ID: 4162
  Gene Symbol: CLEC2B
  Gene Name: C-type lectin domain family 2, member B
  ENST ID: ENST00000538152
  CDS Start-End: 336-578
ggaagtggacaaatagtgtaataaatatgtggtaattggaaatgctgtgcgagagctcaatttcaaacttgtctttctaggagcttacagtttgaaaattgtgaaggaatagatattcaaattgaacatttatcaatttggaatcatatctaaagaaaatgtatctaacatatttgtttcacaaaaaaaactgaaggtcagaggaaaaataaagtactttttcaaaactccatagctattttctagtgaggccaggagttgaacaattgttgccttgcacttcacaacctacgaaacaagaggtacacagtaggttgtcataaaaattggcatgtatgattttgaaattaattttgtctctaaagaattttcttaggcggtataaatgcagttctgatcactggattggactgaagatggcaaaaaatcgaacaggacaatgggtagatggagctacatttaccaaatcgtttggcatgagagggagtgaaggatgtgcctacctcagcgatgatggtgcagcaacagctagatgttacaccgaaagaaaatggatttgcaggaaaagaatacactaagttaatgtctaagataatggggaaaatagaaaataacattattaagtgtaaaaccagcaaagtacttttttaattaaacaaagttcgagttttgtacctgtctggttaattctgcttacgtgtcaggctacacataaaagccacttcaaagattggcaaaaaatggt

SEQ ID NO: 123041 - DNA, 465 bp, Homo sapiens
  Payload ID: 4163
  Gene Symbol: CLEC2D
  Gene Name: C-type lectin domain family 2, member D
  Uniprot ID: Q9UHP7
  ENST ID: ENST00000261339
  CDS Start-End: 1-465
atgcatgacagtaacaatgtggagaaagacattacaccatctgaattgcctgcaaacccagcaataagagctaactgccatcaagagccatcagtatgtcttcaagctgcatgcccagaaagctggattggttttcaaagaaagtgtttctatttttctgatgacaccaagaactggacatcaagtcagaggttttgtgactcacaagatgctgatcttgctcaggttgaaagcttccaggaactgaatttcctgttgagatataaaggcccatctgatcactggattgggctgagcagagaacaaggccaaccatggaaatggataaatggtactgaatggacaagacagtttcctatcctgggagcaggagagtgtgcctatttgaatgacaaaggtgccagtagtgccaggcactacacagagaggaagtggatttgttccaaatcagatatacatgtctag

SEQ ID NO: 123042 - DNA, 935 bp, Homo sapiens
  Payload ID: 4163
  Gene Symbol: CLEC2D
  Gene Name: C-type lectin domain family 2, member D
  Uniprot ID: Q9UHP7
  ENST ID: ENST00000261340
  CDS Start-End: 23-607
actcatagaaactggaggcaaaatgcatgacagtaacaatgtggagaaagacattacaccatctgaattgcctgcaaacccaggttgtctgcattcaaaagagcattctattaaagctaccttaatttggcgcttatttttcttaatcatgtttctgacaatcatagtgtgtggaatggttgctgctttaagcgcaataagagctaactgccatcaagagccatcagtatgtcttcaagctgcatgcccagaaagctggattggttttcaaagaaagtgtttctatttttctgatgacaccaagaactggacatcaagtcagaggttttgtgactcacaagatgctgatcttgctcaggttgaaagcttccaggaactgaatttcctgttgagatataaaggcccatctgatcactggattgggctgagcagagaacaaggccaaccatggaaatggataaatggtactgaatggacaagacagttagtcatgaaagaagatggtgccaacttgtatgttgcaaaggtttcacaagttcctcgaatgaatccaagacctgtcatggtttcctatcctgggagcaggagagtgtgcctatttgaatgacaaaggtgccagtagtgccaggcactacacagagaggaagtggatttgttccaaatcagatatacatgtctagatgttacagcaaagccccaactaatctttagaagcatattggaactgataactccattttaaaatgagcaaagaatttatttcttataccaacaggtatatgaaaatatgctcaatatcactaataactgggaaaatacaaatcaaaatcatagtaaaatattacctgttttcatggtgctaatattacctgttctcccactgctaatgacatacccgagactgagtaatttataaataaaagagatttaattga

SEQ ID NO: 123043 - DNA, 5279 bp, Homo sapiens
  Payload ID: 4163
  Gene Symbol: CLEC2D
  Gene Name: C-type lectin domain family 2, member D
  Uniprot ID: Q9UHP7
  ENST ID: ENST00000290855
  CDS Start-End: 23-598
actcatagaaactggaggcaaaatgcatgacagtaacaatgtggagaaagacattacaccatctgaattgcctgcaaacccaggttgtctgcattcaaaagagcattctattaaagctaccttaatttggcgcttatttttcttaatcatgtttctgacaatcatagtgtgtggaatggttgctgctttaagcgcaataagagctaactgccatcaagagccatcagtatgtcttcaagctgcatgcccagaaagctggattggttttcaaagaaagtgtttctatttttctgatgacaccaagaactggacatcaagtcagaggttttgtgactcacaagatgctgatcttgctcaggttgaaagcttccaggaactgaatttcctgttgagatataaaggcccatctgatcactggattgggctgagcagagaacaaggccaaccatggaaatggataaatggtactgaatggacaagacagtttcctatcctgggagcaggagagtgtgcctatttgaatgacaaaggtgccagtagtgccaggcactacacagagaggaagtggatttgttccaaatcagatatacatgtctagatgttacagcaaagccccaactaatctttagaagcatattggaactgataactccattttaaaatgagcaaagaatttatttcttataccaacaggtatatgaaaatatgctcaatatcactaataactgggaaaatacaaatcaaaatcatagtaaaatattacctgttttcatggtgctaatattacctgttctcccactgctaatgacatacccgagactgagtaatttataaataaaagagatttaattgactcatagttccacatggctggggaggtcttgcaatcatgacagaaggcaaatgggaagcaaagtcatgtcttatgtggtggcaggcagggggacttgtgcacaggaactcctatttatacaaccatcagatatcttgagacaagaacagtatggggctccctggtgtgattccgtcctgcgcggctgttctctggagcagcattcatttatcttcgtctgccttgtctcctacctaagtgtgtgtcgccacccgatggaagattcgatggacatggacatgagccccctgaggccccagaactatcttttcagttgtgaactaaaggccgacaaagatgatcactttaaggtggataatgatgaaaatgagaccagttatctttaagaacggtcagctcaggggctggtgcaaaggatgaactgcacattgttgaagcagaggccatgaatgacgaaggcagtccaattaaagtaacactggcaactttgaaaatgtctgtacagccaacggtttctcttgggggctttgaaataacaccaccagtggacttaaggttgaagtgtggttcagggccagtgcatattagtggacagcacttagtagctgtgaaggaaggtgcagagtcagaagatgaagaagaggaggatgtgaaactcttaagtatatctggaaagcagtctgcccctggaggtgggcagaaaaaagtaaaacttgctgctgctgctgatgatgatgatgatgaagatgatgatgatgatgatgacgaggaagctgaagaaaaagcgccagtgaagaaatctatacgagatactccagccaaaaatgcacaaaagtcaaatcagaatggaaaagactcaaaaccatcatcaacaccaagatcaaaaggacaagaatccttcaaaaaacaggaaaaatctcctaaaacaccaaaaggatctagttctgtagaagacattaaagcaaaaatgcaagcaagtatagaaaaacgtggttctcttcccaaagtggaaaccaagttcatcaattatgtgaagaatttcttctggatgactgaccaagaggctattcaagatctctggcagtggaggaagtctctttaagaaaatagtttaaacaatttgttaaaaattttccatcttatttcatttctgtaacagttgatatctggctgtcctttttatagtgcagagtgagaactttccctaccatgtttgataaatgttgtccaggttctattgccaagaatgtgttgtccaaaatgcctgtttagtttttaaagatggaactccaccctttgcttggttttaagtatgtatgggatgctatgataggacatagtagtagcagtggtcagacatggaaatggtggggagacaaaagtatacacgtgaaataaaactcagtattttaataaagtaaaaaaaaaaaaaaaggtatggggaaaactgcccccataaagcaattgtctccacctggccctgccctttgcatgtggagattattacaattcaaggtgaaatttgggtggagacacaaccaaaccatatcagatggctatatcaaaaagacaagaaataacaagcattggtgagagtgtggagaagacggaacccttgtacacagttggtgggaacacagtttggtgcagccattatagaaaacgtcatggaggttcctaaagaaattaaaaagagaactaccatatgagccagcaatcccttttccagatatacacccaaaggaaatgaaatcaccacctcataaagatatctgctttcctgtttattataacacatctttattcataatagccaagatacggaactaactgaagtgaccattaacagatgaatggataaagaaattgtcatatatataaaacacacacattatatacatacatacatatatatatatatataaaaaatagaatattattcagccttgtaaaaagaaatcctgttatgttgggaacaagccccccaaaatctggccataaactcaccccaaaactggccataaacaaaatctctgcagcactgtgacatgttagtgatggccataacacccacgctggaaggttgtgggtttatgggaatgagggcaaggaacacctggcctgcccagggtggaaaaccacttaaaggcgttcttaagctacaaacaatagcatgagcgatctgtgccttaaggacatgttcctgctgcagttaactagcccaatctattcctttaattcggcccatcccttcatttcccataagggatacttttagttaatttaatatctatagaaacaatgctaatgactggcttgctgttaataaatacatgggtaaatctctgttctgggctctcagctctgaaggctgtgagacccctgatttcccacttcacacctctatatttctgtgtgtgtgtctttagttcctctggcgctgctgggttaggatctacccgactgagctggtctcagcactgttatttgaaacaatgtaaataaacctatagggtttattatatatactaagtgaaataagccagacacagaaaaaaaatgttgcatgatctcacttatagtgaaacttaaaaaaaaaacccaaatacatagaaatagagtagaatggtggttaccagagatgaggaaaatacagagacacaggtcaaaagatacagagttgcagttacaaagggtgagtatgtctagatatctaacatacagtatgaggactataatagtattgcactgtgtactgaaaacttgatgacagattttagatattcttaccacacagacaaaaagaaatgtaagtatgtgagatgaagcttatgttaattagattaagtgtatgtacataaaaacatcacattatacacatcaaatatatacaataaaaaagcacattgggagatacatgataaatttctatctgcagttgctatttgcatttttaaaggatatttttattttttaaatttttagctgacaactgtataattatggaatacaatgtgatgttctgatatatgtgtacactatggaatgattaaatcaaactaacatttcatcatctcacatacttatcattttctgtggtgagaacatttgaaatttattctcttgacaattttgaaagatccaatacactattattaactatagtcactatgctgtgcaatagatctcaaaagcttattcctcttaactgaaacctactaccctgtgacatgtggggaacatctctctattccccagccccagtccctaaatgttgaatacacaatggggaaaaaatagtcttcaatgaatggtggtgggaaaattgtatatccacatgcagaagaataaaattggacccttacctcctaccatatataaaaaccaactgaaaatcgattaaagacttaaactgtaaaactactaaaagaaaatatagggagaaagcttcacaacgttggtctgggcaataatttttggatttgacctcaaaagtagatgcaaccacagtgaaaataaacaaatgaaattgcataaaataaaaaatgtttctgcacagcaaaggaaataattaatggagtaaagagacaacttacagattgggagaatatatttccaaactattgttggggctcagaaacggataccctaacatatagtgatttgacaggtggaactaaagaagactcgaggtctctctgacctcctcctcaacctctgtttcttaatcctctgttttcccagagcacaggaggaagttctctgaagttcctttatctgctttaagttcagactcaccaaataagaaaacagttaattctggtgccttccatgggttttcattaactgaagtcatattgtaggaaaaagaatgaagtctcttaacccacctggatagatttttctcacaaaccattgtcttctctgcaagcccagtagactttgtcccaggccatttatgtgatcttcaccccattaagttctccccaaattatttactcttcccccaaaatcacccacacttccccatctccctctcccctaaggacaagggtatatcaccatctataccccattgcttggtggggtgatcactctgattctctgcatgcatttttatagatttgtttgccatttatcctattaatctgcattctgtcaattgtggcaagttatcagcatattttttaacttttaattattcttaatggaaagacacttctgtatacactggaaatctcaggaaatttcttttttccttaagcttaattgaaatgtttacttttcagtaaaatttcaagcttgagtaatgttcatgcctgcttttcattgaaatagaatgaaaaggttgcacaatattattttcatgaaattacttctagtataattctgaataaacactttgaaaggcagtgaactgtaaata

SEQ ID NO: 123044 - DNA, 1552 bp, Homo sapiens
  Payload ID: 4163
  Gene Symbol: CLEC2D
  Gene Name: C-type lectin domain family 2, member D
  ENST ID: ENST00000325960
  CDS Start-End: 23-391
actcatagaaactggaggcaaaatgcatgacagtaacaatgtggagaaagacattacaccatctgaattgcctgcaaacccaggttgtctgcattcaaaagagcattctattaaagctaccttaatttggcgcttatttttcttaatcatgtttctgacaatcatagtgtgtggaatggttgctgctttaagcgcaataagagctaactgccatcaagagccatcagtatgtcttcaagctgcatgcccagaaagctggattggttttcaaagaaagtgtttctatttttctgatgacaccaagaactggacatcaagtcagaggttttgtgactcacaagatgctgatcttgctcaggttgaaagcttccaggaactggtaagaaaatagttctggccagaatcaaagattcagccctacaaggatatgttttcctgtgaaattatctaagagaatttcctgttgagatataaaggcccatctgatcactggattgggctgagcagagaacaaggccaaccatggaaatggataaatggtactgaatggacaagacagttagtcatgaaagaagatggtgccaacttgtatgttgcaaaggtttcacaagttcctcgaatgaatccaagacctgtcatggatcttcagattactaaaaagatttgagataatgctggaaaaattggattcacacaatttcactcaatgtttgtctgagagatgagacagttttgaaaagctactttattgtaatacattcatcaatattggaaatataactttatttaataaaaagagccccagactggacattggcaggtttgaaatgagttttttctcattagcttttgaccttggatgggatggtaagttttagaaatcagagaacatgtacatttatacattgttgtatctacactgccttgcacattgtgactgcttcataaatatctagaattaacttttatttcttattttacaatacggaagtagtaaattttctctacctaattcttaaaatggttttttgtttgtttgtatttttgagagacagggtcttactctgttacccaggctggagtgcagtagtaccatcgtggctcactgcagccttgacttccctggctcaagtgagcctcccatctcagcctcctgagtagctgggactacaggtttcctatcctgggagcaggagagtgtgcctatttgaatgacaaaggtgccagtagtgccaggcactacacagagaggaagtggatttgttccaaatcagatatacatgtctagatgttacagcaaagccccaactaatctttagaagcatattggaactgataactccattttaaaatgagcaaagaatttatttcttataccaacaggtatatgaaaatatgctcaatatcactaataactgggaaaatacaaatcaaaatcatagtaaaatattacctgttttcatggtgctaatattacctgttctcccactgctaatgacatacccgagactgagtaatttataaataaaagagatttaattgactcatagtt

SEQ ID NO: 123045 - DNA, 1508 bp, Homo sapiens
  Payload ID: 4163
  Gene Symbol: CLEC2D
  Gene Name: C-type lectin domain family 2, member D
  ENST ID: ENST00000444971
  CDS Start-End: 19-387
atagaaactggaggcaaaatgcatgacagtaacaatgtggagaaagacattacaccatctgaattgcctgcaaacccaggttgtctgcattcaaaagagcattctattaaagctaccttaatttggcgcttatttttcttaatcatgtttctgacaatcatagtgtgtggaatggttgctgctttaagcgcaataagagctaactgccatcaagagccatcagtatgtcttcaagctgcatgcccagaaagctggattggttttcaaagaaagtgtttctatttttctgatgacaccaagaactggacatcaagtcagaggttttgtgactcacaagatgctgatcttgctcaggttgaaagcttccaggaactggtaagaaaatagttctggccagaatcaaagattcagccctacaaggatatgttttcctgtgaaattatctaagaggtttcctatcctgggagcaggagagtgtgcctatttgaatgacaaaggtgccagtagtgccaggcactacacagagaggaagtggatttgttccaaatcagatatacatgtctagatgttacagcaaagccccaactaatctttagaagcatattggaactgataactccattttaaaatgagcaaagaatttatttcttataccaacaggtatatgaaaatatgctcaatatcactaataactgggaaaatacaaatcaaaatcatagtaaaatattacctgttttcatggtgctaatattacctgttctcccactgctaatgacatacccgagactgagtaatttataaataaaagagatttaattgactcatagttccacatggctggggaggtcttgcaatcatgacagaaggcaaatgggaagcaaagtcatgtcttatgtggtggcaggcagggggacttgtgcacaggaactcctatttatacaaccatcagatatcttgagacaagaacagtatggggctccctggtgtgattccgtcctgcgcggctgttctctggagcagcattcatttatcttcgtctgccttgtctcctacctaagtgtgtgtcgccacccgatggaagattcgatggacatggacatgagccccctgaggccccagaactatcttttcagttgtgaactaaaggccgacaaagatgatcactttaaggtggataatgatgaaaatgagaccagttatctttaagaacggtcagctcaggggctggtgcaaaggatgaactgcacattgttgaagcagaggccatgaatgacgaaggcagtccaattaaagtaacactggcaactttgaaaatgtctgtacagccaacggtttctcttgggggctttgaaataacaccaccagtggacttaaggttgaagtgtggttcagggccagtgcatattagtggacagcacttagtagctgtgaaggaaggtgcagagtcagaagatgaagaagaggaggatgtgaaactcttaagtatatctggaaagcagtctgcccct

SEQ ID NO: 123046 - DNA, 850 bp, Homo sapiens
  Payload ID: 4163
  Gene Symbol: CLEC2D
  Gene Name: C-type lectin domain family 2, member D
  ENST ID: ENST00000430909
  CDS Start-End: 1-522
tgtctgcattcaaaagagcattctattaaagctaccttaatttggcgcttatttttcttaatcatgtttctgacaatcatagtgtgtggaatggttgctgctttaagcgcaataagagctaactgccatcaagagccatcagtatgtcttcaagctgcatgcccagaaagctggattggttttcaaagaaagtgtttctatttttctgatgacaccaagaactggacatcaagtcagaggttttgtgactcacaagatgctgatcttgctcaggttgaaagcttccaggaactgaatttcctgttgagatataaaggcccatctgatcactggattgggctgagcagagaacaaggccaaccatggaaatggataaatggtactgaatggacaagacagttagtcatgaaagaagatggtgccaacttgtatgttgcaaaggtttcacaagttcctcgaatgaatccaagacctgtcatggtttcctatcctgggagcaggagagtgtgcctatttgaatgacaaaggtgccagtagtgccaggcactacacagagaggaagtggatttgttccaaatcagatatacatgtctagatgttacagcaaagccccaactaatctttagaagcatattggaactgataactccattttaaaatgagcaaagaatttatttcttataccaacaggtatatgaaaatatgctcaatatcactaataactgggaaaatacaaatcaaaatcatagtaaaatattacctgttttcatggtgctaatattacctgttctcccactgctaatgacatacccgagactgagtaatttataaataaaagagatttaattga

SEQ ID NO: 123047 - DNA, 389 bp, Homo sapiens
  Payload ID: 4163
  Gene Symbol: CLEC2D
  Gene Name: C-type lectin domain family 2, member D
  ENST ID: ENST00000544322
  CDS Start-End: 1-321
gagcattctattaaagctaccttaatttggcgcttatttttcttaatcatgtttctgacaatcatagtgtgtggaatggttgctgctttaagcgcaataagagctaactgccatcaagagccatcagtatgtcttcaagctgcatgcccagaaagctggattggttttcaaagaaagtgtttctatttttctgatgacaccaagaactggacatcaagtcagaggttttgtgactcacaagatgctgatcttgctcaggttgaaagcttccaggaactggtttcctatcctgggagcaggagagtgtgcctatttgaatgacaaaggtgccagtagtgccaggcactacacagagaggaagtggatttgttccaaatcagatatacatg

SEQ ID NO: 123048 - DNA, 571 bp, Homo sapiens
  Payload ID: 4163
  Gene Symbol: CLEC2D
  Gene Name: C-type lectin domain family 2, member D
  ENST ID: ENST00000536355
  CDS Start-End: 210-452
caaaaggggcccaccaaagctgccttgttccttctactatgtgaggacacatctagaagttaccatcaatgaaccagaaagtgggcccttaccaggcaccaaatctgccagcactctgatcttggacttccagcctcctgaactgttgtctgcattcaaaagagcattctattaaagctaccttaatttggcgcttatttttcttaatcatgtttctgacaatcatagtgtgtggaatggttgctgctttaagcgcaataagagctaactgccatcaagagccatcagtatgtcttcaagctgcatgcccagaaagctggattggttttcaaagaaagtgtttctatttttctgatgacaccaagaactggacatcaagtcagaggttttgtgactcacaagatgctgatcttgctcaggttgaaagcttccaggaactggtaagaaaatagttctggccagaatcaaagattcagccctacaaggatatgttttcctgtgaaattatctaagagaatttcctgttgagatataaaggcccatctgatcactggattgggctgagcagaga

SEQ ID NO: 123049 - DNA, 1855 bp, Homo sapiens
  Payload ID: 4163
  Gene Symbol: CLEC2D
  Gene Name: C-type lectin domain family 2, member D
  Uniprot ID: Q9UHP7
  ENST ID: ENST00000479877
  CDS Start-End: 8-472
aggcaaaatgcatgacagtaacaatgtggagaaagacattacaccatctgaattgcctgcaaacccaggttgtctgcattcaaaagagcattctattaaagctaccttaatttggcgcttatttttcttaatcatgtttctgacaatcatagtgtgtggaatggttgctgctttaagcgcaataagagctaactgccatcaagagccatcagtatgtcttcaagctgcatgcccagaaagctggattggttttcaaagaaagtgtttctatttttctgatgacaccaagaactggacatcaagtcagaggttttgtgactcacaagatgctgatcttgctcaggttgaaagcttccaggaactgaatttcctgttgagatataaaggcccatctgatcactggattgggctgagcagagaacaaggccaaccatggaaatggataaatggtactgaatggacaagacagtaagttctaaaaatctggcagtaatatttgtatttgaatttactttgcattaaatctgaagtgttctctagttacatgctttaaaaaattctcattttaaggttagtcatgaaagaagatggtgccaacttgtatgttgcaaaggtttcacaagttcctcgaatgaatccaagacctgtcatggtgaggtagactgactgtgaacttggctccaggcttatctatgtcattttcaaacactttcattttaagcaaaccatacaatatctttaagtctgttccttacctccacaacaaaattaaattgcacttgtcctcctgatttcacagggttgatgtgaggaacagaggttttgatgtatcagggaaagattatgagtgacagcaattatacctattatttaaaataagacaatagttttaaaattttaaaatgggtaaagtttggcactagaaaatttaatctcaattgtatatttataggatcttcagattactaaaaagatttgagataatgctggaaaaattggattcacacaatttcactcaatgtttgtctgagagatgagacagttttgaaaagctactttattgtaatacattcatcaatattggaaatataactttatttaataaaaagagccccagactggacattggcaggtttgaaatgagttttttctcattagcttttgaccttggatgggatggtaagttttagaaatcagagaacatgtacatttatacattgttgtatctacactgccttgcacattgtgactgcttcataaatatctagaattaacttttatttcttattttacaatacggaagtagtaaattttctctacctaattcttaaaatggttttttgtttgtttgtatttttgagagacagggtcttactctgttacccaggctggagtgcagtagtaccatcgtggctcactgcagccttgacttccctggctcaagtgagcctcccatctcagcctcctgagtagctgggactacaggtttcctatcctgggagcaggagagtgtgcctatttgaatgacaaaggtgccagtagtgccaggcactacacagagaggaagtggatttgttccaaatcagatatacatgtctagatgttacagcaaagccccaactaatctttagaagcatattggaactgataactccattttaaaatgagcaaagaatttatttcttataccaacaggtatatgaaaatatgctcaatatcactaataactgggaaaatacaaatcaaaatcatagtaaaatattacctgttttcatggtgctaatattacctgttctcccactgctaatgacatacccgagactgagtaatttataaataaaagagatttaattga

SEQ ID NO: 123050 - DNA, 399 bp, Homo sapiens
  Payload ID: 4163
  Gene Symbol: CLEC2D
  Gene Name: C-type lectin domain family 2, member D
  Uniprot ID: Q9UHP7
  ENST ID: ENST00000543300
  CDS Start-End: 1-399
atgcatgacagtaacaatgtggagaaagacattacaccatctgaattgcctgcaaacccaggttgtctgcattcaaaagagcattctattaaagctaccttaatttggcgcttatttttcttaatcatgtttctgacaatcatagtgtgtggaatggttgctgctttaagcgcaataagagctaactgccatcaagagccatcagtatgtcttcaagctgcatgcccagaaagctggattggttttcaaagaaagtgtttctatttttctgatgacaccaagaactggacatcaagtcagaggttttgtgactcacaagatgctgatcttgctcaggttgaaagcttccaggaactggtttcctatcctgggagcaggagagtgtgcctatttgaatga

SEQ ID NO: 123051 - DNA, 541 bp, Homo sapiens
  Payload ID: 4163
  Gene Symbol: CLEC2D
  Gene Name: C-type lectin domain family 2, member D
  ENST ID: ENST00000492359
  CDS Start-End: 19-183
atagaaactggaggcaaaatgcatgacagtaacaatgtggagaaagacattacaccatctgaattgcctgcaaacccaggcacttctgtctcctgctgccatgtgaagaagaacacgtttgcttcctcttccaccattattgttgtctgcattcaaaagagcattctattaaagctaccttaatttggcgcttatttttcttaatcatgtttctgacaatcatagtgtgtggaatggttgctgctttaagcgcaataagagctaactgccatcaagagccatcagtatgtcttcaagctgcatgcccagaaagctggattggttttcaaagaaagtgtttctatttttctgatgacaccaagaactggacatcaagtcagaggttttgtgactcacaagatgctgatcttgctcaggttgaaagcttccaggaactgaatttcctgttgagatataaaggcccatctgatcactggattgggctgagcagagaacaaggccaaccatggaaatggataaatggtactgaatggacaagaca

SEQ ID NO: 123052 - DNA, 761 bp, Homo sapiens
  Payload ID: 4163
  Gene Symbol: CLEC2D
  Gene Name: C-type lectin domain family 2, member D
  ENST ID: ENST00000460309
  CDS Start-End: 1-402
gcaataagagctaactgccatcaagagccatcagtatgtcttcaagctgcatgcccagaaagctggattggttttcaaagaaagtgtttctatttttctgatgacaccaagaactggacatcaagtcagaggttttgtgactcacaagatgctgatcttgctcaggttgaaagcttccaggaactgaatttcctgttgagatataaaggcccatctgatcactggattgggctgagcagagaacaaggccaaccatggaaatggataaatggtactgaatggacaagacaagacagggtcttactctgttacccaggctggagtgcagtagtaccatcgtggctcactgcagccttgacttccctggctcaagtgagcctcccatctcagcctcctgagtagctgggactacaggtttcctatcctgggagcaggagagtgtgcctatttgaatgacaaaggtgccagtagtgccaggcactacacagagaggaagtggatttgttccaaatcagatatacatgtctagatgttacagcaaagccccaactaatctttagaagcatattggaactgataactccattttaaaatgagcaaagaatttatttcttataccaacaggtatatgaaaatatgctcaatatcactaataactgggaaaatacaaatcaaaatcatagtaaaatattacctgttttcatggtgctaatattacctgttctcccactgctaatgacatacccgagactgagtaattt

SEQ ID NO: 123053 - DNA, 981 bp, Homo sapiens
  Payload ID: 4163
  Gene Symbol: CLEC2D
  Gene Name: C-type lectin domain family 2, member D
  ENST ID: ENST00000476198
  CDS Start-End: 269-511
agcttgcagggatccatgggagtagaacctactgattgagactgctgggctctcctccttggcttcagccccctttccatgggactggatggttctcgtgcctcactggagttccaggcaccactggagtatgtaaaaactcctgcagctcagtgcctgcctaaacagccaccaatgggagtggctgtcattggtttgcccaggttgtctgcattcaaaagagcattctattaaagctaccttaatttggcgcttatttttcttaatcatgtttctgacaatcatagtgtgtggaatggttgctgctttaagcgcaataagagctaactgccatcaagagccatcagtatgtcttcaagctgcatgcccagaaagctggattggttttcaaagaaagtgtttctatttttctgatgacaccaagaactggacatcaagtcagaggttttgtgactcacaagatgctgatcttgctcaggttgaaagcttccaggaactggtaagaaaatagttctggccagaatcaaagattcagccctacaaggatatgttttcctgtgaaattatctaagagaatttcctgttgagatataaaggcccatctgatcactggattgggctgagcagagaacaaggccaaccatggaaatggataaatggtactgaatggacaagacagttagtcatgaaagaagatggtgccaacttgtatgttgcaaaggtttcacaagttcctcgaatgaatccaagacctgtcatggtgaggtagactgactgtgaacttggctccaggcttatctatgtcattttcaaacactttcattttaagcaaaccatacaatatctttaagtctgttccttacctccacaacaaaattaaattgcacttgtcctcctgatttcacagggttgatgtgaggaacagaggttttgatgtatcagggaaagattatgagtgacagcaattatacctattattta

SEQ ID NO: 123054 - DNA, 288 bp, Homo sapiens
  Payload ID: 4163
  Gene Symbol: CLEC2D
  Gene Name: C-type lectin domain family 2, member D
  Uniprot ID: Q9UHP7
  ENST ID: ENST00000545918
  CDS Start-End: 1-288
atgcatgacagtaacaatgtggagaaagacattacaccatctgaattgcctgcaaacccagcaataagagctaactgccatcaagagccatcagtatgtcttcaagctgcatgcccagaaagctggattggttttcaaagaaagtgtttctatttttctgatgacaccaagaactggacatcaagtcagaggttttgtgactcacaagatgctgatcttgctcaggttgaaagcttccaggaactggtttcctatcctgggagcaggagagtgtgcctatttgaatga

SEQ ID NO: 123055 - DNA, 778 bp, Homo sapiens
  Payload ID: 4163
  Gene Symbol: CLEC2D
  Gene Name: C-type lectin domain family 2, member D
  ENST ID: ENST00000466035
  CDS Start-End: 1-423
gtggagaaagacattacaccatctgaattgcctgcaaacccagcaataagagctaactgccatcaagagccatcagtatgtcttcaagctgcatgcccagaaagctggattggttttcaaagaaagtgtttctatttttctgatgacaccaagaactggacatcaagtcagaggttttgtgactcacaagatgctgatcttgctcaggttgaaagcttccaggaactgaatttcctgttgagatataaaggcccatctgatcactggattgggctgagcagagaacaaggccaaccatggaaatggataaatggtactgaatggacaagacagttagtcatgaaagaagatggtgccaacttgtatgttgcaaaggtttcacaagttcctcgaatgaatccaagacctgtcatggtgaggtagactgactgtgaacttggctccaggcttatctatgtcattttcaaacactttcattttaagcaaaccatacaatatctttaagtctgttccttacctccacaacaaaattaaattgcacttgtcctcctgatttcacagggttgatgtgaggaacagaggttttgatgtatcagggaaagattatgagtgacagcaattatacctattatttaaaataagacaatagttttaaaattttaaaatgggtaaagtttggcactagaaaatttaatctcaattgtatatttataggatcttcagattactaaaaagatttgagataatgctggaaaaattggattcacacaatttcact

SEQ ID NO: 123056 - DNA, 1359 bp, Homo sapiens
  Payload ID: 4164
  Gene Symbol: CLEC2L
  Gene Name: C-type lectin domain family 2, member L
  Uniprot ID: P0C7M8
  ENST ID: ENST00000422142
  CDS Start-End: 73-717
gccgagtgcgcgtcgggctgggccccgcaccccggtgcaggagcgcgggcgcggcgcggcggagcgccccgcatggagccggcccgggagcccccctcgcgggcccggccgccgccgcccctcgccgcgcgccccgcgcccgcccccgccgcccccaggccgcgttcgcccgcagaggctgaggcccgcggccccgaggggctgctgcggcgatccgggtcgggctacgagggcagcaccagctggaaggcggccttggaggacaccaccacacgcctcctgctgggtgccatcgcggtccttctgttcgccatcttggtggtgatgagcatcttggcttccaagggctgcatcaagtgcgaagcgccctgcccggaggactggctgctctacggaaggaagtgctacttcttttccgaggaacccagagactggaacacaggcaggcagtactgccacacccacgaggcggtgctggctgtgattcagagccagaaggagctggaatttatgttcaagttcacgcggagggagccctggattggactacgcagagttggggacgaattccactgggtcaacggggacccgtttgatccggacacgttcaccatcgcaggtccaggggagtgtgtcttcgtggagcccaccaggctggtgtcgacggagtgtctgatgacccggccctgggtgtgcagcaagatggcctatacttgaggtgggtggggccagaggtggccccgcccctaggcctgtgggaggtgtctggtgtctgctcaagacctgcttccagcggagccgcctgccctctgcaaggcgaagcggtgggtgcgtggcctccgccccaggcccctctcccaggccctggcgctctgagtccctggttcctggcctcctttgtctgcaggcaggtcgtgtggctcagcagttaaatcccatatgctaggtagtgtaggcatctgcccacctacacacacacacatgcataggtacacgcacgcacagacgctgtcccttctgaagctcagtgtccatcctgagccaccccacagatctctctccggccccctagaagccctctcctcactgcagccctggtgctctggggaaggaggggcattgacaggtggtttgactgttcacccagcagccccgcttccccactggtttctctcctggctgccggcggaggtaggctgggaaagcttccccctcacctaggccgggccagccccgccccgggccccagaggtcccctgcatcccccttctttgccttgcctgggttctcaggcagggcccctgctgtgtccgtggtgctgttgtattggtcactaacggaataaagagttaatatctc

SEQ ID NO: 123057 - DNA, 324 bp, Homo sapiens
  Payload ID: 4164
  Gene Symbol: CLEC2L
  Gene Name: C-type lectin domain family 2, member L
  ENST ID: ENST00000521281
  CDS Start-End: 1-324
acgagggcagcaccagctggaaggcggccttggaggcttccaagggctgcatcaagtgcgaagcgccctgcccggaggactggctgctctacggaaggaagtgctacttcttttccgaggaacccagagactggaacacaggcaggcagtactgccacacccacgaggcggtgctggctgtgattcagagccagaaggagctggaatttatgttcaagttcacgcggagggagccctggattggactacgcagagttggggacgaattccactgggtcaacggggacccgtttgatccggacacgttcaccatcgcaggtccag

SEQ ID NO: 123058 - DNA, 1971 bp, Homo sapiens
  Payload ID: 4165
  Gene Symbol: CLEC3A
  Gene Name: C-type lectin domain family 3, member A
  ENST ID: ENST00000299642
  CDS Start-End: 86-706
acttttataagccagccccaggcatcccagagcaagatgtagctgtgtagtctccttccatagctgctctaagggggctggcaacatggctcagcaggcttgccccagagccatggcaaagaatggacttgtaatttgcatcctggtgatcaccttactcctggaccagaccaccagccacacatccagattaaaagccaggaagcacagcaaacgtcgagtgagagacaaggatggagatctgaagactcaaattgaaaagctctggacagaagtcaatgccttgaaggaaattcaagccctgcagacagtctgtctccgaggcactaaagttcacaagaaatgctaccttgcttcagaaggtttgaagcatttccatgaggccaatgaagactgcatttccaaaggaggaatcctggttatccccaggaactccgacgaaatcaacgccctccaagactatggtaaaaggagcctgccaggtgtcaatgacttttggctgggcatcaatgacatggtcacggaaggcaagtttgttgacgtcaacggaatcgctatctccttcctcaactgggaccgtgcacagcctaacggtggcaagcgagaaaactgtgtcctgttctcccaatcagctcagggcaagtggagtgatgaggcctgtcgcagcagcaagagatacatatgcgagttcaccatccctcaataggtctttctccaatgtgtcctccaagcaagattcatcataacttataggttcatgatctctaagatcaagtaaaaatcataatttttacttattaaaaaattgcaacacaagatcaatgtccatagcaatatgatagcatcagccaattttgctaacacatttctttgggattttgcccttcctggggtataggggatcagaaatattgatccatgtgcacgcagataaaatggcttctgctaaacagactaaaatctttctctctagtctttctcacttgtacaaacccagtttgttttcaaaaaatcacagtagcaatgcaactcatcactctagaaaagcaagcttaggctacctgaaagattttcccttggaagtttagcgtatgtttgactaacaaaaattccctacatcagagactctaggtgctatataatccaaaaacttttcagcctgttgctcattctgtcccatgctggcaataataccttgtcagcccattacccttattttgaattgctccatctcctggtgggacttgtatcttgtctgccatatcagaacacaaacccctgaagaggttctgatttgattttttttttttcttcatgcctaccctttttttggaagtttccagccgcaatttgaaatgaaatgacaaggtgtatatttgatcaattttcattcccaccattgcattacaacctctaacttaaatgggtaaccctaaggcatatcaaagaagcagattgcatgataaacggaaacagaaaaaaagaacctacatttattttgctttagcatccttactctcaccttttatgagattgagagtggacttacatttccttttttacattttcgtatacttattttttttagccatcattatatgtttaagtctattatgggcaaccaatctttggaagctgaaaactgaatttaaagaatgctatcttggaaaattgcatacgtctgtgcaattttttattctgcctagtgctattctgcttgtttaactagattgtacaaaataacttcattgcttaatatcaaattacaaagtttagacttggagggaaatgggctttttagaagcaaacaattttaaatatattttgttcttcaaataaatagtgtttaaacattgaatgtgttttgtgaacaatatcccactttgcaaactttaactacacatgcttggaattaagttttagctgttttcattgctcaataataaagcctgaattctgatcaatagaaaa

SEQ ID NO: 123059 - DNA, 1204 bp, Homo sapiens
  Payload ID: 4165
  Gene Symbol: CLEC3A
  Gene Name: C-type lectin domain family 3, member A
  ENST ID: ENST00000567430
  CDS Start-End: 86-238
acttttataagccagccccaggcatcccagagcaagatgtagctgtgtagtctccttccatagctgctctaagggggctggcaacatggctcagcaggcttgccccagagccatggcaaagaatggacttgtaatttgcatcctggtgatcaccttactcctggaccagaccaccagccacacatccagattaaaagccaggaagcacagcaaacgtcgagtgagaggtatctgctgaatcctccaaggggaacagaataaggggaagatccctggagatcagattctcagatccagtatcccgtgtgctgacctgccatgacaaacactggcagggagcctgccatagaggaaaagagtaagaattggctgagttcacatatgggctccatcaataactagcggccaggtgagattaggtatcatcactgtgccatctttgggaagaatgagaaaatagccactgcaataattttctggagggctattttttcctatgggacactgatggaggaagaccacagcccattgactagaaaaaggcctggaatggagttcacgccctcagagctcgtgcaggagccatctatgaactacaagcacattgactccgtatcctcacatgagccctgggaggcagccactgttaatatcctcattttatggatgaggaaactgttgccctgttaaagcttaatcagctttattatttgcttcccatcactgctgtcacaacttgccacaaactcactgatgtcacacaacacaaagttattatcttatggtttgggaggtcagatgtccaaagttggtctccttgggctaaaatcaaggtgtcagtgaggttggttccttctgaaattctgaggggagaatttgtttccttgcctttttattttgtttttgtttttgagacagagtctcactctgtcacccaggctggggtgcagtggcgccatcttggctcactgtaacctccacctcctgggttcaagagattgtcatgcctcagcctcccaagtagctgggattacaggtgcatgccaccacacccagctaatttttatatttttagtatagacagggtttcaccatgttggccaggctcgactcaaactcctgatctcaggtgacccccaacctcagcctccaaagtgctgggattacaagcctgagccactgtgcctggccttccttgcctttt

SEQ ID NO: 123060 - DNA, 936 bp, Homo sapiens
  Payload ID: 4166
  Gene Symbol: CLEC3B
  Gene Name: C-type lectin domain family 3, member B
  Uniprot ID: P05452
  ENST ID: ENST00000296130
  CDS Start-End: 181-789
cttctgcaggcttgtgtgtttgttttatttttttggcacgcctgcagccaagttggggagggtttcctggacagaggtcctttggctgctgccttaagacgtgcagcctgggccgtggctgtcactgcgttcggacccagacccgctgcaggcagcagcagcccccgcccgcgcagcagcatggagctctggggggcctacctcctcctctgcctcttctccctcctgacccaggtcaccaccgagccaccaacccagaagcccaagaagattgtaaatgccaagaaagatgttgtgaacacaaagatgtttgaggagctcaagagccgtctggacaccctggcccaggaggtggccctgctgaaggagcagcaggccctgcagacggtctgcctgaaggggaccaaggtgcacatgaaatgctttctggccttcacccagacgaagaccttccacgaggccagcgaggactgcatctcgcgcgggggcaccctgggcacccctcagactggctcggagaacgacgccctgtatgagtacctgcgccagagcgtgggcaacgaggccgagatctggctgggcctcaacgacatggcggccgagggcacctgggtggacatgaccggcgcccgcatcgcctacaagaactgggagactgagatcaccgcgcaacccgatggcggcaagaccgagaactgcgcggtcctgtcaggcgcggccaacggcaagtggttcgacaagcgctgccgcgatcagctgccctacatctgccagttcgggatcgtgtagccggcggggcgggggccgtggggggcctggaggagggcaggggccgcgggaggccgggaggagggtggggaccttgcagcccccatcctctccgtgcgcttggagcctctttttgcaaataaagttggtgcagcttcgcggagagga

SEQ ID NO: 123061 - DNA, 752 bp, Homo sapiens
  Payload ID: 4166
  Gene Symbol: CLEC3B
  Gene Name: C-type lectin domain family 3, member B
  ENST ID: ENST00000428034
  CDS Start-End: 126-608
cggcttagcccagagcctggcctcctctgtaagagtggaaaacctgggttccttctgccctcatcttattagtagctgtgatgggcacacactcagccaagcactgagatgttgtgaacacaaagatgtttgaggagctcaagagccgtctggacaccctggcccaggaggtggccctgctgaaggagcagcaggccctgcagacggtctgcctgaaggggaccaaggtgcacatgaaatgctttctggccttcacccagacgaagaccttccacgaggccagcgaggactgcatctcgcgcgggggcaccctgggcacccctcagactggctcggagaacgacgccctgtatgagtacctgcgccagagcgtgggcaacgaggccgagatctggctgggcctcaacgacatggcggccgagggcacctgggtggacatgaccggcgcccgcatcgcctacaagaactgggagactgagatcaccgcgcaacccgatggcggcaagaccgagaactgcgcggtcctgtcaggcgcggccaacggcaagtggttcgacaagcgctgccgcgatcagctgccctacatctgccagttcgggatcgtgtagccggcggggcgggggccgtggggggcctggaggagggcaggggccgcgggaggccgggaggagggtggggaccttgcagcccccatcctctccgtgcgcttggagcctctttttgcaaataaagttggtgcagcttcgcggaga

SEQ ID NO: 123062 - DNA, 1281 bp, Homo sapiens
  Payload ID: 4167
  Gene Symbol: CLEC4A
  Gene Name: C-type lectin domain family 4, member A
  Uniprot ID: Q9UMR7
  ENST ID: ENST00000229332
  CDS Start-End: 248-961
ctgtgattctcactatactggtcctgaggaaagggcttctgtgaactgcggtttttagtttttattgtggttcttagttctcatgagacccctcttgaggatatgtgcctatctggtgcctctgctctccactagttgagtgaaaggaaggaggtaatttaccaccatgtttggttcctgtttataagatgttttaagaaagatctgaaacagattttctgaagaaagcagaagctctcttcccattatgacttcggaaatcacttatgctgaagtgaggttcaaaaatgaattcaagtcctcaggcatcaacacagcctcttctgcagcttccaaggagaggactgcccctcacaaaagtaataccggattccccaagctgctttgtgcctcactgttgatatttttcctgctattggcaatctcattctttattgcttttgtcattttctttcaaaaatattctcagcttcttgaaaaaaagactacaaaagagctggttcatacaacattggagtgtgtgaaaaaaaatatgcccgtggaagagacagcctggagctgttgcccaaagaattggaagtcatttagttccaactgctactttatttctactgaatcagcatcttggcaagacagtgagaaggactgtgctagaatggaggctcacctgctggtgataaacactcaagaagagcaggatttcatcttccagaatctgcaagaagaatctgcttattttgtggggctctcagatccagaaggtcagcgacattggcaatgggttgatcagacaccatacaatgaaagttccacattctggcatccacgtgagcccagtgatcccaatgagcgctgcgttgtgctaaattttcgtaaatcacccaaaagatggggctggaatgatgttaattgtcttggtcctcaaaggtcagtttgtgagatgatgaagatccacttatgaactgaacattctccatgaacaggtggttggattggtatctgtcattgtagggatagataataagctcttcttattcatgtgtaagggaggtccatagaatttaggtggtctgtcaactattctacttatgagagaattggtctgtacattgactgattcactttttcataaagtgagcatttattgagcattttttcatgtgccagagcctgtactggaggcccccattgtgcacacatggagagaacatgagtctctcttaatttttatctggttgctaaagaattatttaccaataaaattatatgatgtggtgtctc

SEQ ID NO: 123063 - DNA, 615 bp, Homo sapiens
  Payload ID: 4167
  Gene Symbol: CLEC4A
  Gene Name: C-type lectin domain family 4, member A
  Uniprot ID: Q9UMR7
  ENST ID: ENST00000352620
  CDS Start-End: 1-615
atgacttcggaaatcacttatgctgaagtgaggttcaaaaatgaattcaagtcctcaggcatcaacacagcctcttctgcagcttccaaggagaggactgcccctcacaaaagtaataccggattccccaagctgctttgtgcctcactgttgatatttttcctgctattggcaatctcattctttattgcttttgtcaagacagcctggagctgttgcccaaagaattggaagtcatttagttccaactgctactttatttctactgaatcagcatcttggcaagacagtgagaaggactgtgctagaatggaggctcacctgctggtgataaacactcaagaagagcaggatttcatcttccagaatctgcaagaagaatctgcttattttgtggggctctcagatccagaaggtcagcgacattggcaatgggttgatcagacaccatacaatgaaagttccacattctggcatccacgtgagcccagtgatcccaatgagcgctgcgttgtgctaaattttcgtaaatcacccaaaagatggggctggaatgatgttaattgtcttggtcctcaaaggtcagtttgtgagatgatgaagatccacttatga

SEQ ID NO: 123064 - DNA, 841 bp, Homo sapiens
  Payload ID: 4167
  Gene Symbol: CLEC4A
  Gene Name: C-type lectin domain family 4, member A
  Uniprot ID: Q9UMR7
  ENST ID: ENST00000345999
  CDS Start-End: 27-524
aagaaagcagaagctctcttcccattatgacttcggaaatcacttatgctgaagtgaggttcaaaaatgaattcaagtcctcaggcatcaacacagcctcttctgcagagacagcctggagctgttgcccaaagaattggaagtcatttagttccaactgctactttatttctactgaatcagcatcttggcaagacagtgagaaggactgtgctagaatggaggctcacctgctggtgataaacactcaagaagagcaggatttcatcttccagaatctgcaagaagaatctgcttattttgtggggctctcagatccagaaggtcagcgacattggcaatgggttgatcagacaccatacaatgaaagttccacattctggcatccacgtgagcccagtgatcccaatgagcgctgcgttgtgctaaattttcgtaaatcacccaaaagatggggctggaatgatgttaattgtcttggtcctcaaaggtcagtttgtgagatgatgaagatccacttatgaactgaacattctccatgaacaggtggttggattggtatctgtcattgtagggatagataataagctcttcttattcatgtgtaagggaggtccatagaatttaggtggtctgtcaactattctacttatgagagaattggtctgtacattgactgattcactttttcataaagtgagcatttattgagcattttttcatgtgccagagcctgtactggaggcccccattgtgcacacatggagagaacatgagtctctcttaatttttatctggttgctaaagaattatttaccaataaaattatatgatgtggtgt

SEQ ID NO: 123065 - DNA, 597 bp, Homo sapiens
  Payload ID: 4167
  Gene Symbol: CLEC4A
  Gene Name: C-type lectin domain family 4, member A
  Uniprot ID: Q9UMR7
  ENST ID: ENST00000360500
  CDS Start-End: 1-597
atgacttcggaaatcacttatgctgaagtgaggttcaaaaatgaattcaagtcctcaggcatcaacacagcctcttctgcagttttctttcaaaaatattctcagcttcttgaaaaaaagactacaaaagagctggttcatacaacattggagtgtgtgaaaaaaaatatgcccgtggaagagacagcctggagctgttgcccaaagaattggaagtcatttagttccaactgctactttatttctactgaatcagcatcttggcaagacagtgagaaggactgtgctagaatggaggctcacctgctggtgataaacactcaagaagagcaggatttcatcttccagaatctgcaagaagaatctgcttattttgtggggctctcagatccagaaggtcagcgacattggcaatgggttgatcagacaccatacaatgaaagttccacattctggcatccacgtgagcccagtgatcccaatgagcgctgcgttgtgctaaattttcgtaaatcacccaaaagatggggctggaatgatgttaattgtcttggtcctcaaaggtcagtttgtgagatgatgaagatccacttatga

SEQ ID NO: 123066 - DNA, 349 bp, Homo sapiens
  Payload ID: 4167
  Gene Symbol: CLEC4A
  Gene Name: C-type lectin domain family 4, member A
  ENST ID: ENST00000546339
  CDS Start-End: 1-255
ttcaaaaatgaattcaagtcctcaggcatcaacacagcctcttctgcagcttccaaggagaggactgcccctcacaaaagtaataccggattccccaagctgctttgtgcctcactgttgatatttttcctgctattggcaatctcattctttattgcttttgtcagatttcatcttccagaatctgcaagaagaatctgcttattttgtggggctctcagatccagaaggtcagcgacattggcaatgggttgatcagacaccatacaatgaaagttccacattctggcatccacgtgagcccagtgatcccaatgagcgctgcgttgtgctaaattttcgtaaatca

SEQ ID NO: 123067 - DNA, 1126 bp, Homo sapiens
  Payload ID: 4168
  Gene Symbol: CLEC4C
  Gene Name: C-type lectin domain family 4, member C
  Uniprot ID: Q8WTT0
  ENST ID: ENST00000354629
  CDS Start-End: 397-945
ttgctttctgtgctgtgcaagctttgttctttcgctgtttgggtccacggttcttttatgagctgtgataccgcggaagtctgtagcttcactcctgaagctagcaagaccacaagctcgccgagagaaacgagtaactctagacgtgccatcttaaaagctgtaacaccgcgaggcagatcctgcctcccacagtcaccctgctcccaagtgcaacctctgtctgaccctgcatggtgtgcggtgccctcctgcctcaggcctaggcgaagaaggatctaagggcttggcttgtttgaaagaaccacaccccgaaagtaacatctttggagaaagtgatacaagagcttctgcacccacctgatagaggaagtccaaagggtgtgcgcacacacaatggtgcctgaagaagagcctcaagaccgagtgcctcacaattttatgtatagcaaaactgtcaagaggctgtccaagttacgagagtatcaacagtatcatccaagcctgacctgcgtcatggaaggaaaggacatagaagattggagctgctgcccaaccccttggacttcatttcagtctagttgctactttatttctactgggatgcaatcttggactaagagtcaaaagaactgttctgtgatgggggctgatctggtggtgatcaacaccagggaagaacaggatttcatcattcagaatctgaaaagaaattcttcttattttctggggctgtcagatccagggggtcggcgacattggcaatgggttgaccagacaccatacaatgaaaatgtcacattctggcactcaggtgaacccaataaccttgatgagcgttgtgcgataataaatttccgttcttcagaagaatggggctggaatgacattcactgtcatgtacctcagaagtcaatttgcaagatgaagaagatctacatataaatgaaatattctccctggaaatgtgtttgggttggcatccaccgttgtagaaagctaaattgattttttaatttatgtgtaagttttgtacaaggaatgcccctaaaatgtttcagcaggctgtcacctattacacttatgatataatccattcacacattcatttattcatttattcatt

SEQ ID NO: 123068 - DNA, 970 bp, Homo sapiens
  Payload ID: 4168
  Gene Symbol: CLEC4C
  Gene Name: C-type lectin domain family 4, member C
  Uniprot ID: Q8WTT0
  ENST ID: ENST00000360345
  CDS Start-End: 175-816
actgcagagtctcctaagtcacatctcttcctttgcaagagtaggcgaagaaggatctaagggcttggcttgtttgaaagaaccacaccccgaaagtaacatctttggagaaagtgatacaagagcttctgcacccacctgatagaggaagtccaaagggtgtgcgcacacacaatggtgcctgaagaagagcctcaagaccgagagaaaggactctggtggttccagttgaaggtctggtccatggcagtcgtatccatcttgctcctcagtgtctgtttcactgtgagttctgtggtgcctcacaattttatgtatagcaaaactgtcaagaggctgtccaagttacgagagtatcaacagtatcatccaagcctgacctgcgtcatggaaggaaaggacatagaagattggagctgctgcccaaccccttggacttcatttcagtctagttgctactttatttctactgggatgcaatcttggactaagagtcaaaagaactgttctgtgatgggggctgatctggtggtgatcaacaccagggaagaacaggatttcatcattcagaatctgaaaagaaattcttcttattttctggggctgtcagatccagggggtcggcgacattggcaatgggttgaccagacaccatacaatgaaaatgtcacattctggcactcaggtgaacccaataaccttgatgagcgttgtgcgataataaatttccgttcttcagaagaatggggctggaatgacattcactgtcatgtacctcagaagtcaatttgcaagatgaagaagatctacatataaatgaaatattctccctggaaatgtgtttgggttggcatccaccgttgtagaaagctaaattgattttttaatttatgtgtaagttttgtacaaggaatgcccctaaaatgtttcagcaggctgtcacctattacacttatgatataatccattc

SEQ ID NO: 123069 - DNA, 577 bp, Homo sapiens
  Payload ID: 4168
  Gene Symbol: CLEC4C
  Gene Name: C-type lectin domain family 4, member C
  ENST ID: ENST00000537530
  CDS Start-End: 1-267
gattggagctgctgcccaaccccttggacttcatttcagtctagttgctactttatttctactgggatgcaatcttggactaagagtcaaaagaactgttctgtgatgggggctgatctggtggtgatcaacaccagggaagaacaggatttcatcattcagaatctgaaaagaaattcttcttattttctggggctgtcagatccagggggtcggcgacattggcaatgggttgaccagacaccatacaatgaaaatgtcacgtgagtatagaatgagattctggcactcaggtgaacccaataaccttgatgagcgttgtgcgataataaatttccgttcttcagaagaatggggctggaatgacattcactgtcatgtacctcagaagtcaatttgcaagatgaagaagatctacatataaatgaaatattctccctggaaatgtgtttgggttggcatccaccgttgtagaaagctaaattgattttttaatttatgtgtaagttttgtacaaggaatgcccctaaaatgtttcagcaggctgtcacctattacacttatgatataatccatt

SEQ ID NO: 123070 - DNA, 1314 bp, Homo sapiens
  Payload ID: 4168
  Gene Symbol: CLEC4C
  Gene Name: C-type lectin domain family 4, member C
  Uniprot ID: Q8WTT0
  ENST ID: ENST00000542353
  CDS Start-End: 492-1133
cagtgattctcgtgcctcagcctcctgagtagccgaaattacagacgtgtgccaccatgcttggctaattttttggatttttagtagagatggggtttcactatgttggccaggctagtcttgaactcctggcctgaagcaatccgcccacctcagcctcccaaagtgctgagattataggcacgagccactacacctggccacaaaattctttaaagaagccaatcccatcctccctcaagagccaaggggccacctcaccctcttgttacagcagatcctgcctcccacagtcaccctgctcccaagtgcaacctctgtctgaccctgcatggtgtgcggtgccctcctgcctcaggccgcgaagaaggatctaagggcttggcttgtttgaaagaaccacaccccgaaagtaacatctttggagaaagtgatacaagagcttctgcacccacctgatagaggaagtccaaagggtgtgcgcacacacaatggtgcctgaagaagagcctcaagaccgagagaaaggactctggtggttccagttgaaggtctggtccatggcagtcgtatccatcttgctcctcagtgtctgtttcactgtgagttctgtggtgcctcacaattttatgtatagcaaaactgtcaagaggctgtccaagttacgagagtatcaacagtatcatccaagcctgacctgcgtcatggaaggaaaggacatagaagattggagctgctgcccaaccccttggacttcatttcagtctagttgctactttatttctactgggatgcaatcttggactaagagtcaaaagaactgttctgtgatgggggctgatctggtggtgatcaacaccagggaagaacaggatttcatcattcagaatctgaaaagaaattcttcttattttctggggctgtcagatccagggggtcggcgacattggcaatgggttgaccagacaccatacaatgaaaatgtcacattctggcactcaggtgaacccaataaccttgatgagcgttgtgcgataataaatttccgttcttcagaagaatggggctggaatgacattcactgtcatgtacctcagaagtcaatttgcaagatgaagaagatctacatataaatgaaatattctccctggaaatgtgtttgggttggcatccaccgttgtagaaagctaaattgattttttaatttatgtgtaagttttgtacaaggaatgcccctaaaatgtttcagcaggctgtcacctattacacttatgatataatccattcacacattcatttattcatttattcatt

SEQ ID NO: 123071 - DNA, 414 bp, Homo sapiens
  Payload ID: 4168
  Gene Symbol: CLEC4C
  Gene Name: C-type lectin domain family 4, member C
  ENST ID: ENST00000543765
  CDS Start-End: 1-414
gaagaagagcctcaagaccgagagaaaggactctggtggttccagttgaaggtctggtccatggcagtcgtatccatcttgctcctcagtgtctgtttcactgtgagttctgtggattggagctgctgcccaaccccttggacttcatttcagtctagttgctactttatttctactgggatgcaatcttggactaagagtcaaaagaactgttctgtgatgggggctgatctggtggtgatcaacaccagggaagaacaggatttcatcattcagaatctgaaaagaaattcttcttattttctggggctgtcagatccagggggtcggcgacattggcaatgggttgaccagacaccatacaatgaaaatgtcacattctggcactcaggtgaacccaataaccttgatgag

SEQ ID NO: 123072 - DNA, 860 bp, Homo sapiens
  Payload ID: 4168
  Gene Symbol: CLEC4C
  Gene Name: C-type lectin domain family 4, member C
  Uniprot ID: Q8WTT0
  ENST ID: ENST00000540085
  CDS Start-End: 158-706
gtcacatctcttcctttgcaagagtaggcgaagaaggatctaagggcttggcttgtttgaaagaaccacaccccgaaagtaacatctttggagaaagtgatacaagagcttctgcacccacctgatagaggaagtccaaagggtgtgcgcacacacaatggtgcctgaagaagagcctcaagaccgagtgcctcacaattttatgtatagcaaaactgtcaagaggctgtccaagttacgagagtatcaacagtatcatccaagcctgacctgcgtcatggaaggaaaggacatagaagattggagctgctgcccaaccccttggacttcatttcagtctagttgctactttatttctactgggatgcaatcttggactaagagtcaaaagaactgttctgtgatgggggctgatctggtggtgatcaacaccagggaagaacaggatttcatcattcagaatctgaaaagaaattcttcttattttctggggctgtcagatccagggggtcggcgacattggcaatgggttgaccagacaccatacaatgaaaatgtcacattctggcactcaggtgaacccaataaccttgatgagcgttgtgcgataataaatttccgttcttcagaagaatggggctggaatgacattcactgtcatgtacctcagaagtcaatttgcaagatgaagaagatctacatataaatgaaatattctccctggaaatgtgtttgggttggcatccaccgttgtagaaagctaaattgattttttaatttatgtgtaagttttgtacaaggaatgcccctaaaatgtttcagcaggctgtcacctattacacttatgatataatccattc

SEQ ID NO: 123073 - DNA, 1936 bp, Homo sapiens
  Payload ID: 4169
  Gene Symbol: CLEC4D
  Gene Name: C-type lectin domain family 4, member D
  Uniprot ID: Q8WXI8
  ENST ID: ENST00000299665
  CDS Start-End: 194-841
ctttgaaaaagacttcttttgagctaactttcttatactggtacctttctaatctcactacaatatgtaacattggtgttcgatctcaagtatttctgaatatattcccctatccacagaaatatactctgggggaaaaaaaatagaacaaattcttgccgtcctgaccattgaacaagagactaattagacaatggggctagaaaaacctcaaagtaaactggaaggaggcatgcatccccagctgataccttcggttattgctgtagttttcatcttacttctcagtgtctgttttattgcaagttgtttggtgactcatcacaacttttcacgctgtaagagaggcacaggagtgcacaagttagagcaccatgcaaagctcaaatgcatcaaagagaaatcagaactgaaaagtgctgaagggagcacctggaactgttgtcctattgactggagagccttccagtccaactgctattttcctcttactgacaacaagacgtgggctgagagtgaaaggaactgttcagggatgggggcccatctgatgaccatcagcacggaagctgagcagaactttattattcagtttctggatagacggctttcctatttccttggacttagagatgagaatgccaaaggtcagtggcgttgggtggaccagacgccatttaacccacgcagagtattctggcataagaatgaacccgacaactctcagggagaaaactgtgttgttcttgtttataaccaagataaatgggcctggaatgatgttccttgtaactttgaagcaagtaggatttgtaaaatacctggaacaacattgaactagaaactcagaaagtggtccttgtgatggaaagagaaaagaaaaaccaattagaataaggcagaatgtacgtgcgtcattggaacacagaaaacatgctggttcatacagcgtttttagtcataatggtcttttttattttgtttgattcattcgagacaacatgtgtgtatgtgtgtgtgtgtgtgtgtagataatgtggtttttgtatggtgtttgatggaaggaataatctttctttgctttcttagtagtatttcaaggtgtttacttttcaattggtgtgcactgaatgcatgtatggaagaatagcgtgaataatgcaatctctttgtcatttttccccttctcagactcttagctcttaaaattcaaagatgggatattctaactggtagtggtgcatcatttttaacccaaatattgcaagcactttaaagatttgaaaccacatttttattgtttgatgtttcattttcagactttttaatgtcagtcattacaattacattgcatgaggaaaatttttccagaacaacagtgtggaatagttctgaattatgctgttctacagatagaaaaaaagtccaaatgcctttaaaaatttacttcttactccacccaacacgtttttgcaaagcaagaagtctttgtaagacaccttaaacaaagtccttcaattctacagcagaggaaataaaatcccccagaagccaaagggctcaccttcacattgttagttcatgacagacccaggtgtgcttcattagagataacatacattccctttggtatcacaggaagttactggggattactcgacctcattacttagctaacgactggataaaatttcttaattgtttgaagtaacattgtattcgtgtttgcattattaatttgaatagaaaataatcacattttcaacccatttatacaaattgttaatgtttctttagagctgtataactatagtttgaactagcaaggaagttattgttttgacaaccagaaattatgcttttctggtgcatgaaacattaattgcaaagggcagtcacatccaactttaataaaatatggtggtctttcttaaaa

SEQ ID NO: 123074 - DNA, 583 bp, Homo sapiens
  Payload ID: 4169
  Gene Symbol: CLEC4D
  Gene Name: C-type lectin domain family 4, member D
  ENST ID: ENST00000382064
  CDS Start-End: 152-583
gcctggcaaggtttagcggaggcctgcagtctgtctgctcctcagcaccatgaattcgactccatgcagctctccataaatatactctgggggaaaaaaaatagaacaaattcttgccgtcctgaccattgaacaagagactaattagacaatggggctagaaaaacctcaaagtaaactggaaggaggcatgcatccccagctgataccttcggttattgctgtagttttcatcttacttctcagtgtctgttttattgcaagttgtttggtgactcatcacaacttttcacgctgtaagagaggcacaggagtgcacaagttagagcaccatgcaaagctcaaatgcatcaaagagaaatcagaactgaaaagtgctgaagggagcacctggaactgttgtcctattgactggagagccttccagtccaactgctattttcctcttactgacaacaagacgtgggctgagagtgaaaggaactgttcagggatgggggcccatctgatgaccatcagcacggaagctgagcagaactttattattcagtttctggatagacggctttcctatttccttgga

SEQ ID NO: 123075 - DNA, 2159 bp, Homo sapiens
  Payload ID: 4170
  Gene Symbol: CLEC4E
  Gene Name: C-type lectin domain family 4, member E
  Uniprot ID: Q9ULY5
  ENST ID: ENST00000299663
  CDS Start-End: 167-826
aatattctacatctatcggagctgaacttcctaaaagacaaagtgtttatctttcaagattcattctccctgaatcttaccaacaaaacactcctgaggagaaagaaagagagggagggagagaaaaagagagagagagaaacaaaaaaccaaagagagagaaaaaatgaattcatctaaatcatctgaaacacaatgcacagagagaggatgcttctcttcccaaatgttcttatggactgttgctgggatccccatcctatttctcagtgcctgtttcatcaccagatgtgttgtgacatttcgcatctttcaaacctgtgatgagaaaaagtttcagctacctgagaatttcacagagctctcctgctacaattatggatcaggttcagtcaagaattgttgtccattgaactgggaatattttcaatccagctgctacttcttttctactgacaccatttcctgggcgttaagtttaaagaactgctcagccatgggggctcacctggtggttatcaactcacaggaggagcaggaattcctttcctacaagaaacctaaaatgagagagttttttattggactgtcagaccaggttgtcgagggtcagtggcaatgggtggacggcacacctttgacaaagtctctgagcttctgggatgtaggggagcccaacaacatagctaccctggaggactgtgccaccatgagagactcttcaaacccaaggcaaaattggaatgatgtaacctgtttcctcaattattttcggatttgtgaaatggtaggaataaatcctttgaacaaaggaaaatctctttaagaacagaaggcacaactcaaatgtgtaaagaaggaagagcaagaacatggccacacccaccgccccacacgagaaatttgtgcgctgaacttcaaaggacttcataagtatttgttactctgatataaataaaaataagtagttttaaatgttataattcatgttactggctgaagtgcattttctctctacgttagtctcaggtcctcttcccagaatttacaaagcaattcactaccttttgctacatttgcctcattttttagtgttcgtatgaaagtacagggacacggagccaagacagagtctagcaaagaaggggattttggaaggtgccttccaaaaatctcctgaatccgggctctgtagcaggtcctcttctttctagcttctgacaagtctgtcttctcttcttggtttcataccgttcttatctcctgcccaagcatatatcgtctctttactcccctgtataatgagtaagaagcttcttcaagtcatgaaacttattcctgctcagaataccggtgtggcctttctggctacaggcctccactgcaccttcttagggaagggcatgccagccatcagctccaaacaggctgtaaccaagtccacccatccctggggcttcctttgctctgccttattttcaattgactgaatggatctcaccagattttgtatctattgctcagctaggacccgagtccaatagtcaatttattctaagcgaacattcatctccacactttcctgtctcaagcccatccattatttcttaacttttattttagctttcgggggtacatgttaaaggctttttatataggtaaactcatgtcgtggaggtttgttgtacagattatttcatcacccaggtattaagcccagtgcctaatattgtttttttcggctcctctccctcctcctaccttccgccctcaagtagactccagtgtctgttattcccttctttgtgtttatgaattctcatcatttagctcccacttataagtgaggacatgcagtatttggttttctgttcccatgtttgctaaggataatggtctccagttctaccgatgttcccacaaaagacataatcttcttttttaaggctgcttagtattccatggtatctatgtatcacattttctctatccaatctattgttgactcacatttagattgattccatgtttttgctattgtgaatagtgctgcaatgaacattcgtgtgcatgtgtctttatggtagaaagatttatatttctctgagtatgtatccagtaatagcccattcatttattgcataaaattctaccaatac

SEQ ID NO: 123076 - DNA, 701 bp, Homo sapiens
  Payload ID: 4170
  Gene Symbol: CLEC4E
  Gene Name: C-type lectin domain family 4, member E
  ENST ID: ENST00000446457
  CDS Start-End: 81-359
aacactcctgaggagaaagaaagagagggagggagagaaaaagagagagagagaaacaaaaaaccaaagagagagaaaaaatgaattcatctaaatcatctgaaacacaatgcacagagagaggatgcttctcttcccaaatgttcttatggactgttgctgggatccccatcctatttctcagtgcctgtttcatcaccagatgtgttgtgacatttcgcatctttcaaacctgtgatgagaaaaagtttcagctacctgagaatttcacagagctctcctgctacaattatggatcaggtataatagtcccaaaggtgaacatcaaaatttacaaagcaacattttctggcttctagattgactttgggacagcttctgggatgtaggggagcccaacaacatagctaccctggaggactgtgccaccatgagagactcttcaaacccaaggcaaaattggaatgatgtaacctgtttcctcaattattttcggatttgtgaaatggtaggaataaatcctttgaacaaaggaaaatctctttaagaacagaaggcacaactcaaatgtgtaaagaaggaagagcaagaacatggccacacccaccgccccacacgagaaatttgtgcgctgaacttcaaaggacttcataagtatttgttactctgatataaataaaaataagtagttttaaatgtta

SEQ ID NO: 123077 - DNA, 566 bp, Homo sapiens
  Payload ID: 4170
  Gene Symbol: CLEC4E
  Gene Name: C-type lectin domain family 4, member E
  ENST ID: ENST00000450725
  CDS Start-End: 109-387
attcattctccctgaatcttaccaacaaaacactcctgaggagaaagaaagagagggagggagagaaaaagagagagagagaaacaaaaaaccaaagagagagaaaaaatgaattcatctaaatcatctgaaacacaatgcacagagagaggatgcttctcttcccaaatgttcttatggactgttgctgggatccccatcctatttctcagtgcctgtttcatcaccagatgtgttgtgacatttcgcatctttcaaacctgtgatgagaaaaagtttcagctacctgagaatttcacagagctctcctgctacaattatggatcaggtataatagtcccaaaggtgaacatcaaaatttacaaagcaacattttctggcttctagattgactttgggacaggaattcctttcctacaagaaacctaaaatgagagagttttttattggactgtcagaccaggttgtcgagggtcagtggcaatgggtggacggcacacctttgacaaagtctctgagcttctgggatgtaggggagcccaacaacatagctaccctggaggact

SEQ ID NO: 123078 - DNA, 730 bp, Homo sapiens
  Payload ID: 4170
  Gene Symbol: CLEC4E
  Gene Name: C-type lectin domain family 4, member E
  ENST ID: ENST00000545274
  CDS Start-End: 77-601
ctcctgaggagaaagaaagagagggagggagagaaaaagagagagagagaaacaaaaaaccaaagagagagaaaaaatgaattcatctaaatcatctgaaacacaatgcacagagagaggatgcttctcttcccaaatgttcttatggactgttgctgggatccccatcctatttctcagtgcctgtttcatcaccagatgtgttgtgacatttcgcatctttcaaacctgtgatgagaaaaagtttcagctacctgagaatttcacagagctctcctgctacaattatggatcaggtataatagtcccaaaggaattcctttcctacaagaaacctaaaatgagagagttttttattggactgtcagaccaggttgtcgagggtcagtggcaatgggtggacggcacacctttgacaaagtctctgagcttctgggatgtaggggagcccaacaacatagctaccctggaggactgtgccaccatgagagactcttcaaacccaaggcaaaattggaatgatgtaacctgtttcctcaattattttcggatttgtgaaatggtaggaataaatcctttgaacaaaggaaaatctctttaagaacagaaggcacaactcaaatgtgtaaagaaggaagagcaagaacatggccacacccaccgccccacacgagaaatttgtgcgctgaacttcaaaggacttcataagtatttgttactctgatataaa

SEQ ID NO: 123079 - DNA, 420 bp, Homo sapiens
  Payload ID: 4170
  Gene Symbol: CLEC4E
  Gene Name: C-type lectin domain family 4, member E
  ENST ID: ENST00000537698
  CDS Start-End: 1-284
agaatttcacagagctctcctgctacaattatggatcaggttcagtcaagaattgttgtccattgaactgggaatattttcaatccagctgctacttcttttctactgacaccatttcctgggcgttaagtttaaagaactgctcagccatgggggctcacctggtggttatcaactcacaggaggagcagcttctgggatgtaggggagcccaacaacatagctaccctggaggactgtgccaccatgagagactcttcaaacccaaggcaaaattggaatgatgtaacctgtttcctcaattattttcggatttgtgaaatggtaggaataaatcctttgaacaaaggaaaatctctttaagaacagaaggcacaactcaaatgtgtaaagaaggaagagcaagaacatggccacacc

SEQ ID NO: 123080 - DNA, 2475 bp, Homo sapiens
  Payload ID: 4171
  Gene Symbol: CLEC4F
  Gene Name: C-type lectin domain family 4, member F
  Uniprot ID: Q8N1N0
  ENST ID: ENST00000272367
  CDS Start-End: 78-1847
cactgccattggtccacgggacggcccttccaggagccagtggctgggagcagtgctggaggatcaaggaagcagagatggacggtgaggcagtccgcttctgcacagataaccagtgtgtctccctgcacccccaagaggtggactctgtggcaatggctcctgcagcccccaagataccgaggctcgttcaggctaccccggcatttatggctgtgaccttggtcttctctcttgtgactctctttgtagtggttcaacagcagacaagacctgttccgaagcctgtgcaagccgtaattctgggagacaacattactgggcatttaccttttgaacccaacaatcatcaccactttggcagggaggcagaaatgcgagagcttatccagacatttaaaggccacatggagaattccagtgcctgggtagtagaaatccagatgttgaagtgcagagtggacaatgtcaattcgcagctccaggtgctcggtgatcatctgggaaacaccaatgctgacatccagatggtaaaaggagttctaaaggatgccactacattgagtttgcagacacagatgttaaggagttccctggagggaaccaatgctgagatccagaggctcaaggaagaccttgaaaaggcagatgctttaactttccagacgctgaatttcttaaaaagcagtttagaaaacaccagcattgagctccacgtgctaagcagaggcttagaaaatgcaaactctgaaattcagatgttgaatgccagtttggaaacggcaaatacccaggctcagttagccaatagcagtttaaagaacgctaatgctgagatctatgttttgagaggccatctagatagtgtcaatgacttgaggacccagaaccaggttttaagaaatagtttggaaggagccaatgctgagatccagggactaaaggaaaatttgcagaacacaaatgctttaaactcccagacccaggcctttataaaaagcagttttgacaacactagtgctgagatccagttcttaagaggtcatttggaaagagctggtgatgaaattcacgtgttaaaaagggatttgaaaatggtcacagcccagacccaaaaagcaaatggccgtctggaccagacagatactcagattcaggtattcaagtcagagatggaaaatgtgaataccttaaatgcccagattcaggtcttaaatggtcatatgaaaaatgccagcagagagatacagaccctaaaacaaggaatgaagaatgcttcagccttaacttcccagacccagatgttagacagcaatctgcagaaggccagtgccgagatccagaggttaagaggggatctagagaacaccaaagctctaaccatggaaatccagcaggagcagagtcgcctgaagaccctccatgtggtcattacttcacaggaacagctacaaagaacccaaagtcagcttctccagatggtcctgcaaggctggaagttcaatggtggaagcttatattatttttctagtgtcaagaagtcttggcatgaggctgagcagttctgcgtgtcccagggagcccatctggcatctgtggcctccaaggaggagcaggcatttctggtagagttcacaagtaaagtgtactactggatcggtctcactgacaggggcacagagggctcctggcgctggacagatgggacaccattcaacgccgcccagaacaaagcgcctggttccaagggatcctgcccactcagaaagtatattattgtgaattctgggatgggagcttgcagcttcatagacacccctccctgtccctggatcctcagtaactaagagcaacctgagcacagacaccctcagggtactccttctcccagccctgtcctcatcctagggccactaggggatgaaggacccatctcaagtcagctccctagactcatcccatgtcagctccctaggagccacagcaccaggaagggatgctgccttcatctaacagtataaagccctgttgtcttcgggttttgggaaaagaatcagtctgacaactggcggcacaagaatgggcagactgaagactgtgtccaaattcagcagaagtggaatgacatgacctgtgacaccccctatcagtgggtgtgcaagaagcccatgggccagggtgtggcctgagggcaggccagagctgaggggctgctcctgcttgccaatactgaccctcctcctcgatgccttcggagcctctgagctctgcttgttctctgggaccttccgttggccttgtggacttcctgccttgttctttgattcagccctttcaaacatgcttacctcgagtgacccagtgacatcagtggcttctcaagggaagagccttgctgtgcccctgtagcctcagcacccagcacaggcctgtcagacagcaggtcctcaataaatactcgctggatcaacaaaa

SEQ ID NO: 123081 - DNA, 2012 bp, Homo sapiens
  Payload ID: 4171
  Gene Symbol: CLEC4F
  Gene Name: C-type lectin domain family 4, member F
  Uniprot ID: Q8N1N0
  ENST ID: ENST00000426626
  CDS Start-End: 25-1728
tgctggaggatcaaggaagcagagatggacggtgaggcagtccgcttctgcacagataaccagtgtgtctccctgcacccccaagaggtggactctgtggcaatggctcctgcagcccccaagataccgaggctcgttcaggctaccccggcatttatggctgtgaccttggtcttctctcttgtgactctctttgtagtggttcaacagcagacaagacctgttccgaagcctgtgcaagccgtaattctgggagacaacattactgggcatttaccttttgaacccaacaatcatcaccactttggcagggaggcagaaatgcgagagcttatccagacatttaaaggccacatggagaattccagtgcctgggtagtagaaatccagatgttgaagtgcagagtggacaatgtcaattcgcagctccaggtgctcggtgatcatctgggaaacaccaatgctgacatccagatggtaaaaggagttctaaaggatgccactacattgagtttgcagacacagatgttaaggagttccctggagggaaccaatgctgagatccagaggctcaaggaagaccttgaaaaggcagatgctttaactttccagacgctgaatttcttaaaaagcagtttagaaaacaccagcattgagctccacgtgctaagcagaggcttagaaaatgcaaactctgaaattcagatgttgaatgccagtttggaaacggcaaatacccaggctcagttagccaatagcagtttaaagaacgctaatgctgagatctatgttttgagaggccatctagatagtgtcaatgacttgaggacccagaaccaggttttaagaaatagtttggaaggagccaatgctgagatccagggactaaaggaaaatttgcagaacacaaatgctttaaactcccagacccaggcctttataaaaagcagttttgacaacactagtgctgagatccagttcttaagaggtcatttggaaagagctggtgatgaaattcacgtgttaaaaagggatttgaaaatggtcacagcccagacccaaaaagcaaatggccgtctggaccagacagatactcagattcaggtattcaagtcagagatggaaaatgtgaataccttaaatgcccagattcaggtcttaaatggtcatatgaaaaatgccagcagagagatacagaccctaaaacaaggaatgaagaatgcttcagccttaacttcccagacccagatgttagacagcaatctgcagaaggccagtgccgagatccagaggttaagaggggatctagagaacaccaaagctctaaccatggaaatccagcaggagcagagtcgcctgaagaccctccatgtggtcattacttcacaggaacagctacaaagaacccaaagtcagcttctccagatggtcctgcaaggctggaagttcaatggtggaagcttatattatttttctagtgtcaagaagtcttggcatgaggctgagcagttctgcgtgtcccagggagcccatctggcatctgtggcctccaaggaggagcaggcatttctggtagagttcacaagtaaagtgtactactggatcggtctcactgacaggggcacagagggctcctggcgctggacagatgggacaccattcaacgccgcccagaacaaagcgagccacagcaccaggaagggatgctgccttcatctaacagtataaagccctgttgtcttcgggttttgggaaaagaatcagtctgacaactggcggcacaagaatgggcagactgaagactgtgtccaaattcagcagaagtggaatgacatgacctgtgacaccccctatcagtgggtgtgcaagaagcccatgggccagggtgtggcctgagggcaggccagagctgaggggctgctcctgcttgccaatactgaccctcctcctcgatgccttcggagcctctgagctctgcttgttctctgggaccttccgttggccttgtggac

SEQ ID NO: 123082 - DNA, 1360 bp, Homo sapiens
  Payload ID: 4172
  Gene Symbol: CLEC4G
  Gene Name: C-type lectin domain family 4, member G
  Uniprot ID: Q6UXB4
  ENST ID: ENST00000328853
  CDS Start-End: 70-951
agtgcgtaggtccagtgagaacaggcgtgaaatttatatctctgcccaggactgggtgcctgcatcgccatggacaccaccaggtacagcaagtggggcggcagctccgaggaggtccccggagggccctggggacgctgggtgcactggagcaggagacccctcttcttggccctggctgtcctggtcaccacagtcctttgggctgtgattctgagtatcctattgtccaaggcctccacggagcgcgcggcgctgcttgacggccacgacctgctgaggacaaacgcctcgaagcagacggcggcgctgggtgccctgaaggaggaggtcggagactgccacagctgctgctcggggacgcaggcgcagctgcagaccacgcgcgcggagcttggggaggcgcaggcgaagctgatggagcaggagagcgccctgcgggaactgcgtgagcgcgtgacccagggcttggctgaagccggcaggggccgtgaggacgtccgcactgagctgttccgggcgctggaggccgtgaggctccagaacaactcctgcgagccgtgccccacgtcgtggctgtccttcgagggctcctgctactttttctctgtgccaaagacgacgtgggcggcggcgcaggatcactgcgcagatgccagcgcgcacctggtgatcgttgggggcctggatgagcagggcttcctcactcggaacacgcgtggccgtggttactggctgggcctgagggctgtgcgccatctgggcaaggttcagggctaccagtgggtggacggagtctctctcagcttcagccactggaaccagggagagcccaatgacgcttgggggcgcgagaactgtgtcatgatgctgcacacggggctgtggaacgacgcaccgtgtgacagcgagaaggacggctggatctgtgagaaaaggcacaactgctgaccccgcccagtgccctggagccgcgcccattgcagcatgtcgtatcctgggggctgctcacctccctggctcctggagctgattgccaaagagttttttcttcctcatccaccgctgctgagtctcagaaacacttggcccaacatagccctgtccagcccagtgcctgggctctgggacctccatgccgacctcatcctaactccactcacgcagacccaacctaacctccactagctccaaaatccctgctcctgcgtccccgtgatatgcctccacttctctccctaaccaaggttaggtgactgaggactggagctgtttggttttctcgcattttccaccaaactggaagctgtttttgcagcctgaggaagcatcaataaatatttgagaaatgaatccagga

SEQ ID NO: 123083 - DNA, 509 bp, Homo sapiens
  Payload ID: 4172
  Gene Symbol: CLEC4G
  Gene Name: C-type lectin domain family 4, member G
  ENST ID: ENST00000599020
  CDS Start-End: 62-509
ggctgaagcaatcctccagcctcagcctcctgagtagctgggactaccgatacacatcaccatgcccagaaatgagggtcttgttatattgcccaggctggtctggtctggaactcctgggctcagtgatccttccatgtcggcctcccaaagtgctgggattacaggactgggtgcctgcatcgccatggacaccaccaggtacagcaagtggggcggcagctccgaggaggtccccggagggccctggggacgctgggtgcactggagcaggagacccctcttcttggccctggctgtcctggtcaccacagtcctttgggctgtgattctgagtatcctattgtccaaggcctccacggagcgcgcggcgctgcttgacggccacgacctgctgaggacaaacgcctcgaagcagacggcggcgctgggtgccctgaaggaggaggtcggagactgccacagctgctgctcggggacgcaggcgcagctgcagaccacgcgcgcgg

SEQ ID NO: 123084 - DNA, 1278 bp, Homo sapiens
  Payload ID: 4172
  Gene Symbol: CLEC4G
  Gene Name: C-type lectin domain family 4, member G
  ENST ID: ENST00000620128
  CDS Start-End: 339-1097
ccaggtacagcaagtggggcggcagctccgaggaggtccccggagggccctggggacgctgggtgcactggagcaggagacccctcttcttggccctggctgtcctggtcaccacagtcctttgggctgtgattctgagtatcctattgtccaaggcctccacggagcgcgcggcgctgcttgacggccacgacctgctgaggacaaacgcctcgaagcagacggcggcgctgggtgccctgaaggaggaggtcggagactgccacagctgctgctcggggacgcaggcgcagctgcagaccacgcgcgcggagcttggggaggcgcaggcgaagctgatggagcaggagagcgccctgcgggaactgcgtgagcgcgtgacccagggcttggctgaagccggcaggggccgtgaggacgtccgcactgagctgttccgggcgctggaggccgtgaggctccagaacaactcctgcgagccgtgccccacgtcgtggctgtccttcgagggctcctgctactttttctctgtgccaaagacgacgtgggcggcggcgcaggatcactgcgcagatgccagcgcgcacctggtgatcgttgggggcctggatgagcagggcttcctcactcggaacacgcgtggccgtggttactggctgggcctgagggctgtgcgccatctgggcaaggttcagggctaccagtgggtggacggagtctctctcagcttcagccactggaaccagggagagcccaatgacgcttgggggcgcgagaactgtgtcatgatgctgcacacggggctgtggaacgacgcaccgtgtgacagcgagaaggacggctggatctgtgagaaaaggcacctgctgaccccgcccagtgccctggagccgcgcccattgcagcatgtcgtatcctgggggctgctcacctccctggctcctggagctgattgccaaagagttttttcttcctcatccaccgctgctgagtctcagaaacacttggcccaacatagccctgtccagcccagtgcctgggctctgggacctccatgccgacctcatcctaactccactcacgcagacccaacctaacctccactagctccaaaatccctgctcctgcgtccccgtgatatgcctccacttctctccctaaccaaggttaggtgactgaggactggagctgtttggttttctcgcattttccaccaaactggaagctgtttttgcagcctgaggaagcatcaataaatatttgagaaatgaatccagg

SEQ ID NO: 123085 - DNA, 1865 bp, Homo sapiens
  Payload ID: 4173
  Gene Symbol: CLEC4M
  Gene Name: C-type lectin domain family 4, member M
  Uniprot ID: Q9H2X3
  ENST ID: ENST00000248228
  CDS Start-End: 119-1249
acccagcttcctgtttgtcttcctgagagacagtagatttagaaagtgaggatcagagggtggaaaataaaagctgtggtccccaggagtcctgaacatctggggacagcgggaaaacatgagtgactccaaggaaccaagggtgcagcagctgggcctcctggaagaagatccaacaaccagtggcatcagactttttccaagagactttcaattccagcagatacatggccacaagagctctacagggtgtcttggccatggcgccctggtgctgcaactcctctccttcatgctcttggctggggtcctggtggccatccttgtccaagtgtccaaggtccccagctccctaagtcaggaacaatccgagcaagacgcaatctaccagaacctgacccagcttaaagctgcagtgggtgagctctcagagaaatccaagctgcaggagatctaccaggagctgacccagctgaaggctgcagtgggtgagttgccagagaaatccaagctgcaggagatctaccaggagctgacccggctgaaggctgcagtgggtgagttgccagagaaatccaagctgcaggagatctaccaggagctgacccggctgaaggctgcagtgggtgagttgccagagaaatccaagctgcaggagatctaccaggagctgacggagctgaaggctgcagtgggtgagttgccagagaaatccaagctgcaggagatctaccaggagctgacccagctgaaggctgcagtgggtgagttgccagaccagtccaagcagcagcaaatctatcaagaactgaccgatttgaagactgcatttgaacgcctgtgccgccactgtcccaaggactggacattcttccaaggaaactgttacttcatgtctaactcccagcggaactggcacgactccgtcaccgcctgccaggaagtgagggcccagctcgtcgtaatcaaaactgctgaggagcagaacttcctacagctgcagacttccaggagtaaccgcttctcctggatgggactttcagacctaaatcaggaaggcacgtggcaatgggtggacggctcacctctgtcacccagcttccagcggtactggaacagtggagaacccaacaatagcgggaatgaagactgtgcggaatttagtggcagtggctggaacgacaatcgatgtgacgttgacaattactggatctgcaaaaagcccgcagcctgcttcagagacgaatagttgtttccctgctagcctcagcctccattgtggtatagcagaacttcacccacttgtaagccagcgcttcttctctccatccttggaccttcacaaatgccctgagacggttctctgttcgatttttcatcccctatgaacctgggtcttattctgtccttctgatgcctccaagtttccctggtgtagagcttgtgttcttggcccatccttggagctttataagtgacctgagtgggatgcatttagggggcgggcttggtatgttgtatgaatccactctctgttccttttggagattagactatttggattcatgtgtagctgccctgtcccctggggctttatctcatccatgcaaactaccatctgctcaacttccagctacaccccgtgcacccttttgactggggacttgctggttgaaggagctcatcttgcaggctggaagcaccagggaattaattcccccagtcaaccaatggcatccagagagggcatggaggctccatacaacctcttccacccccacatctttctttgtcctatacatgtcttccatttggctgtttctgagttgtagcctttataataaagtggtaaatgttgtaactgc

SEQ ID NO: 123086 - DNA, 1935 bp, Homo sapiens
  Payload ID: 4173
  Gene Symbol: CLEC4M
  Gene Name: C-type lectin domain family 4, member M
  Uniprot ID: Q9H2X3
  ENST ID: ENST00000327325
  CDS Start-End: 119-1318
acccagcttcctgtttgtcttcctgagagacagtagatttagaaagtgaggatcagagggtggaaaataaaagctgtggtccccaggagtcctgaacatctggggacagcgggaaaacatgagtgactccaaggaaccaagggtgcagcagctgggcctcctggaagaagatccaacaaccagtggcatcagactttttccaagagactttcaattccagcagatacatggccacaagagctctacagggtgtcttggccatggcgccctggtgctgcaactcctctccttcatgctcttggctggggtcctggtggccatccttgtccaagtgtccaaggtccccagctccctaagtcaggaacaatccgagcaagacgcaatctaccagaacctgacccagcttaaagctgcagtgggtgagctctcagagaaatccaagctgcaggagatctaccaggagctgacccagctgaaggctgcagtgggtgagttgccagagaaatccaagctgcaggagatctaccaggagctgacccggctgaaggctgcagtgggtgagttgccagagaaatccaagctgcaggagatctaccaggagctgacccggctgaaggctgcagtgggtgagttgccagagaaatccaagctgcaggagatctaccaggagctgacccggctgaaggctgcagtgggtgagttgccagagaaatccaagctgcaggagatctaccaggagctgacggagctgaaggctgcagtgggtgagttgccagagaaatccaagctgcaggagatctaccaggagctgacccagctgaaggctgcagtgggtgagttgccagaccagtccaagcagcagcaaatctatcaagaactgaccgatttgaagactgcatttgaacgcctgtgccgccactgtcccaaggactggacattcttccaaggaaactgttacttcatgtctaactcccagcggaactggcacgactccgtcaccgcctgccaggaagtgagggcccagctcgtcgtaatcaaaactgctgaggagcagaacttcctacagctgcagacttccaggagtaaccgcttctcctggatgggactttcagacctaaatcaggaaggcacgtggcaatgggtggacggctcacctctgtcacccagcttccagcggtactggaacagtggagaacccaacaatagcgggaatgaagactgtgcggaatttagtggcagtggctggaacgacaatcgatgtgacgttgacaattactggatctgcaaaaagcccgcagcctgcttcagagacgaatagttgtttccctgctagcctcagcctccattgtggtatagcagaacttcacccacttgtaagccagcgcttcttctctccatccttggaccttcacaaatgccctgagacggttctctgttcgatttttcatcccctatgaacctgggtcttattctgtccttctgatgcctccaagtttccctggtgtagagcttgtgttcttggcccatccttggagctttataagtgacctgagtgggatgcatttagggggcgggcttggtatgttgtatgaatccactctctgttccttttggagattagactatttggattcatgtgtagctgccctgtcccctggggctttatctcatccatgcaaactaccatctgctcaacttccagctacaccccgtgcacccttttgactggggacttgctggttgaaggagctcatcttgcaggctggaagcaccagggaattaattcccccagtcaaccaatggcatccagagagggcatggaggctccatacaacctcttccacccccacatctttctttgtcctatacatgtcttccatttggctgtttctgagttgtagcctttataataaagtggtaaatgttgtaactgca

SEQ ID NO: 123087 - DNA, 1781 bp, Homo sapiens
  Payload ID: 4173
  Gene Symbol: CLEC4M
  Gene Name: C-type lectin domain family 4, member M
  ENST ID: ENST00000334806
  CDS Start-End: 119-1165
acccagcttcctgtttgtcttcctgagagacagtagatttagaaagtgaggatcagagggtggaaaataaaagctgtggtccccaggagtcctgaacatctggggacagcgggaaaacatgagtgactccaaggaaccaagggtgcagcagctgggcctcctggggtgtcttggccatggcgccctggtgctgcaactcctctccttcatgctcttggctggggtcctggtggccatccttgtccaagtgtccaaggtccccagctccctaagtcaggaacaatccgagcaagacgcaatctaccagaacctgacccagcttaaagctgcagtgggtgagctctcagagaaatccaagctgcaggagatctaccaggagctgacccagctgaaggctgcagtgggtgagttgccagagaaatccaagctgcaggagatctaccaggagctgacccggctgaaggctgcagtgggtgagttgccagagaaatccaagctgcaggagatctaccaggagctgacccggctgaaggctgcagtgggtgagttgccagagaaatccaagctgcaggagatctaccaggagctgacggagctgaaggctgcagtgggtgagttgccagagaaatccaagctgcaggagatctaccaggagctgacccagctgaaggctgcagtgggtgagttgccagaccagtccaagcagcagcaaatctatcaagaactgaccgatttgaagactgcatttgaacgcctgtgccgccactgtcccaaggactggacattcttccaaggaaactgttacttcatgtctaactcccagcggaactggcacgactccgtcaccgcctgccaggaagtgagggcccagctcgtcgtaatcaaaactgctgaggagcagaacttcctacagctgcagacttccaggagtaaccgcttctcctggatgggactttcagacctaaatcaggaaggcacgtggcaatgggtggacggctcacctctgtcacccagcttccagcggtactggaacagtggagaacccaacaatagcgggaatgaagactgtgcggaatttagtggcagtggctggaacgacaatcgatgtgacgttgacaattactggatctgcaaaaagcccgcagcctgcttcagagacgaatagttgtttccctgctagcctcagcctccattgtggtatagcagaacttcacccacttgtaagccagcgcttcttctctccatccttggaccttcacaaatgccctgagacggttctctgttcgatttttcatcccctatgaacctgggtcttattctgtccttctgatgcctccaagtttccctggtgtagagcttgtgttcttggcccatccttggagctttataagtgacctgagtgggatgcatttagggggcgggcttggtatgttgtatgaatccactctctgttccttttggagattagactatttggattcatgtgtagctgccctgtcccctggggctttatctcatccatgcaaactaccatctgctcaacttccagctacaccccgtgcacccttttgactggggacttgctggttgaaggagctcatcttgcaggctggaagcaccagggaattaattcccccagtcaaccaatggcatccagagagggcatggaggctccatacaacctcttccacccccacatctttctttgtcctatacatgtcttccatttggctgtttctgagttgtagcctttataataaagtggtaaatgttgtaactgc

SEQ ID NO: 123088 - DNA, 1733 bp, Homo sapiens
  Payload ID: 4173
  Gene Symbol: CLEC4M
  Gene Name: C-type lectin domain family 4, member M
  Uniprot ID: Q9H2X3
  ENST ID: ENST00000359059
  CDS Start-End: 119-1117
acccagcttcctgtttgtcttcctgagagacagtagatttagaaagtgaggatcagagggtggaaaataaaagctgtggtccccaggagtcctgaacatctggggacagcgggaaaacatgagtgactccaaggaaccaagggtgcagcagctgggcctcctggaagaagatccaacaaccagtggcatcagactttttccaagagactttcaattccagcagatacatggccacaagagctctacagttccttttcttcttggcccagtgtccaaggtccccagctccctaagtcaggaacaatccgagcaagacgcaatctaccagaacctgacccagcttaaagctgcagtgggtgagctctcagagaaatccaagctgcaggagatctaccaggagctgacccagctgaaggctgcagtgggtgagttgccagagaaatccaagctgcaggagatctaccaggagctgacccggctgaaggctgcagtgggtgagttgccagagaaatccaagctgcaggagatctaccaggagctgacccggctgaaggctgcagtgggtgagttgccagagaaatccaagctgcaggagatctaccaggagctgacggagctgaaggctgcagtgggtgagttgccagagaaatccaagctgcaggagatctaccaggagctgacccagctgaaggctgcagtggaacgcctgtgccgccactgtcccaaggactggacattcttccaaggaaactgttacttcatgtctaactcccagcggaactggcacgactccgtcaccgcctgccaggaagtgagggcccagctcgtcgtaatcaaaactgctgaggagcagaacttcctacagctgcagacttccaggagtaaccgcttctcctggatgggactttcagacctaaatcaggaaggcacgtggcaatgggtggacggctcacctctgtcacccagcttccagcggtactggaacagtggagaacccaacaatagcgggaatgaagactgtgcggaatttagtggcagtggctggaacgacaatcgatgtgacgttgacaattactggatctgcaaaaagcccgcagcctgcttcagagacgaatagttgtttccctgctagcctcagcctccattgtggtatagcagaacttcacccacttgtaagccagcgcttcttctctccatccttggaccttcacaaatgccctgagacggttctctgttcgatttttcatcccctatgaacctgggtcttattctgtccttctgatgcctccaagtttccctggtgtagagcttgtgttcttggcccatccttggagctttataagtgacctgagtgggatgcatttagggggcgggcttggtatgttgtatgaatccactctctgttccttttggagattagactatttggattcatgtgtagctgccctgtcccctggggctttatctcatccatgcaaactaccatctgctcaacttccagctacaccccgtgcacccttttgactggggacttgctggttgaaggagctcatcttgcaggctggaagcaccagggaattaattcccccagtcaaccaatggcatccagagagggcatggaggctccatacaacctcttccacccccacatctttctttgtcctatacatgtcttccatttggctgtttctgagttgtagcctttataataaagtggtaaatgttgtaactgc

SEQ ID NO: 123089 - DNA, 1898 bp, Homo sapiens
  Payload ID: 4173
  Gene Symbol: CLEC4M
  Gene Name: C-type lectin domain family 4, member M
  ENST ID: ENST00000394122
  CDS Start-End: 119-1282
acccagcttcctgtttgtcttcctgagagacagtagatttagaaagtgaggatcagagggtggaaaataaaagctgtggtccccaggagtcctgaacatctggggacagcgggaaaacatgagtgactccaaggaaccaagggtgcagcagctgggcctcctggaagaagatccaacaaccaactttcaattccagcagatacatggccacaagagctctacagggtgtcttggccatggcgccctggtgctgcaactcctctccttcatgctcttggctggggtcctgccaagattgtccaaggtccccagctccctaagtcaggaacaatccgagcaagacgcaatctaccagaacctgacccagcttaaagctgcagtgggtgagctctcagagaaatccaagctgcaggagatctaccaggagctgacccagctgaaggctgcagtgggtgagttgccagagaaatccaagctgcaggagatctaccaggagctgacccggctgaaggctgcagtgggtgagttgccagagaaatccaagctgcaggagatctaccaggagctgacccggctgaaggctgcagtgggtgagttgccagagaaatccaagctgcaggagatctaccaggagctgacccggctgaaggctgcagtgggtgagttgccagagaaatccaagctgcaggagatctaccaggagctgacggagctgaaggctgcagtgggtgagttgccagagaaatccaagctgcaggagatctaccaggagctgacccagctgaaggctgcagtgggtgagttgccagaccagtccaagcagcagcaaatctatcaagaactgaccgatttgaagactgcatttgaacgcctgtgccgccactgtcccaaggactggacattcttccaaggaaactgttacttcatgtctaactcccagcggaactggcacgactccgtcaccgcctgccaggaagtgagggcccagctcgtcgtaatcaaaactgctgaggagcagaacttcctacagctgcagacttccaggagtaaccgcttctcctggatgggactttcagacctaaatcaggaaggcacgtggcaatgggtggacggctcacctctgtcacccagcttccagcggtactggaacagtggagaacccaacaatagcgggaatgaagactgtgcggaatttagtggcagtggctggaacgacaatcgatgtgacgttgacaattactggatctgcaaaaagcccgcagcctgcttcagagacgaatagttgtttccctgctagcctcagcctccattgtggtatagcagaacttcacccacttgtaagccagcgcttcttctctccatccttggaccttcacaaatgccctgagacggttctctgttcgatttttcatcccctatgaacctgggtcttattctgtccttctgatgcctccaagtttccctggtgtagagcttgtgttcttggcccatccttggagctttataagtgacctgagtgggatgcatttagggggcgggcttggtatgttgtatgaatccactctctgttccttttggagattagactatttggattcatgtgtagctgccctgtcccctggggctttatctcatccatgcaaactaccatctgctcaacttccagctacaccccgtgcacccttttgactggggacttgctggttgaaggagctcatcttgcaggctggaagcaccagggaattaattcccccagtcaaccaatggcatccagagagggcatggaggctccatacaacctcttccacccccacatctttctttgtcctatacatgtcttccatttggctgtttctgagttgtagcctttataataaagtggtaaatgttgtaactgc

SEQ ID NO: 123090 - DNA, 792 bp, Homo sapiens
  Payload ID: 4173
  Gene Symbol: CLEC4M
  Gene Name: C-type lectin domain family 4, member M
  Uniprot ID: Q9H2X3
  ENST ID: ENST00000595496
  CDS Start-End: 1-792
atgagtgactccaaggaaccaagggtgcagcagctgggcctcctggaagaagatccaacaaccagtggcatcagactttttccaagagactttcaattccagcagatacatggccacaagagctctacagttccttttcttcttggcccagtgtccaaggtccccagctccctaagtcaggaacaatccgagcaagacgcaatctaccagaacctgacccagcttaaagctgcagtgggtgagctctcagagaaatccaagctgcaggagatctaccaggagctgacccagctgaaggctgcagtgggtgagttgccagagaaatccaagctgcaggagatctaccaggagctgacccggctgaaggctgcagtggaacgcctgtgccgccactgtcccaaggactggacattcttccaaggaaactgttacttcatgtctaactcccagcggaactggcacgactccgtcaccgcctgccaggaagtgagggcccagctcgtcgtaatcaaaactgctgaggagcagaacttcctacagctgcagacttccaggagtaaccgcttctcctggatgggactttcagacctaaatcaggaaggcacgtggcaatgggtggacggctcacctctgtcacccagcttccagcggtactggaacagtggagaacccaacaatagcgggaatgaagactgtgcggaatttagtggcagtggctggaacgacaatcgatgtgacgttgacaattactggatctgcaaaaagcccgcagcctgcttcagagacgaatag

SEQ ID NO: 123091 - DNA, 999 bp, Homo sapiens
  Payload ID: 4173
  Gene Symbol: CLEC4M
  Gene Name: C-type lectin domain family 4, member M
  ENST ID: ENST00000596707
  CDS Start-End: 1-999
atgagtgactccaaggaaccaagggtgcagcagctgggcctcctggaagaagatccaacaaccagtggcatcagactttttccaagagactttcaattccagcagatacatggccacaagagctctacagttccttttcttcttggcccagtgtccaaggtccccagctccctaagtcaggaacaatccgagcaagacgcaatctaccagaacctgacccagcttaaagctgcagtgggtgagctctcagagaaatccaagctgcaggagatctaccaggagctgacccagctgaaggctgcagtgggtgagttgccagagaaatccaagctgcaggagatctaccaggagctgacccggctgaaggctgcagtgggtgagttgccagagaaatccaagctgcaggagatctaccaggagctgacccggctgaaggctgcagtgggtgagttgccagagaaatccaagctgcaggagatctaccaggagctgacccggctgaaggctgcagtgggtgagttgccagagaaatccaagctgcaggagatctaccaggagctgacggagctgaaggctgcagtggaacgcctgtgccgccactgtcccaaggactggacattcttccaaggaaactgttacttcatgtctaactcccagcggaactggcacgactccgtcaccgcctgccaggaagtgagggcccagctcgtcgtaatcaaaactgctgaggagcagaacttcctacagctgcagacttccaggagtaaccgcttctcctggatgggactttcagacctaaatcaggaaggcacgtggcaatgggtggacggctcacctctgtcacccagcttccagcggtactggaacagtggagaacccaacaatagcgggaatgaagactgtgcggaatttagtggcagtggctggaacgacaatcgatgtgacgttgacaattactggatctgcaaaaagcccgcagcctgcttcagagacgaatag

SEQ ID NO: 123092 - DNA, 870 bp, Homo sapiens
  Payload ID: 4173
  Gene Symbol: CLEC4M
  Gene Name: C-type lectin domain family 4, member M
  ENST ID: ENST00000595751
  CDS Start-End: 24-870
acatctggggacagcgggaaaacatgagtgactccaaggaaccaagggtgcagcagctgggcctcctggaagaagatccaacaaccagtggcatcagactttttccaagagactttcaattccagcagatacatggccacaagagctctacagtgtccaaggtccccagctccctaagtcaggaacaatccgagcaagacgcaatctaccagaacctgacccagcttaaagctgcagtgggtgagctctcagagaaatccaagctgcaggagatctaccaggagctgacccagctgaaggctgcagtgggtgagttgccagagaaatccaagctgcaggagatctaccaggagctgacccggctgaaggctgcagtgggtgagttgccagagaaatccaagctgcaggagatctaccaggagctgacccggctgaaggctgcagtgggtgagttgccagagaaatccaagctgcaggagatctaccaggagctgacccggctgaaggctgcagtgggtgagttgccagagaaatccaagctgcaggagatctaccaggagctgacggagctgaaggctgcagtgggtgagttgccagagaaatccaagctgcaggagatctaccaggagctgacccagctgaaggctgcagtgggtgagttgccagaccagtccaagcagcagcaaatctatcaagaactgaccgatttgaagactgcatttgaacgcctgtgccgccactgtcccaaggactggacattcttccaaggaaactgttacttcatgtctaactcccagcggaactggcacgactccgtcaccgcctgccaggaagtgagggcccagctcgtcgtaatcaaaactgctgagg

SEQ ID NO: 123093 - DNA, 1669 bp, Homo sapiens
  Payload ID: 4173
  Gene Symbol: CLEC4M
  Gene Name: C-type lectin domain family 4, member M
  Uniprot ID: Q9H2X3
  ENST ID: ENST00000596363
  CDS Start-End: 51-941
aaaagctgtggtccccaggagtcctgaacatctggggacagcgggaaaacatgagtgactccaaggaaccaagggtgcagcagctgggcctcctggggtgtcttggccatggcgccctggtgctgcaactcctctccttcatgctcttggctggggtcctggtggccatccttgtccaagtgtccaaggtccccagctccctaagtcaggaacaatccgagcaagacgcaatctaccagaacctgacccagcttaaagctgcagtgggtgagctctcagagaaatccaagctgcaggagatctaccaggagctgacccagctgaaggctgcagtgggtgagttgccagagaaatccaagctgcaggagatctaccaggagctgacccggctgaaggctgcagtgggtgagttgccagagaaatccaagctgcaggagatctaccaggagctgacccggctgaaggctgcagtgggtgagttgccagagaaatccaagctgcaggagatctaccaggagctgacccggctgaaggctgcagtgggtgagttgccagagaaatccaagctgcaggagatctaccaggagctgacggagctgaaggctgcagtgggtgagttgccagagaaatccaagctgcaggagatctaccaggagctgacccagctgaaggctgcagtgggtgagttgccagaccagtccaagcagcagcaaatctatcaagaactgaccgatttgaagactgcatttgaacgcctgtgccgccactgtcccaaggactggacattcttccaaggaaactgttacttcatgtctaactcccagcggaactggcacgactccgtcaccgcctgccaggaagtgagggcccagctcgtcgtaatcaaaactgctgaggagcagcttccagcggtactggaacagtggagaacccaacaatagcgggaatgaagactgtgcggaatttagtggcagtggctggaacgacaatcgatgtgacgttgacaattactggatctgcaaaaagcccgcagcctgcttcagagacgaatagttgtttccctgctagcctcagcctccattgtggtatagcagaacttcacccacttgtaagccagcgcttcttctctccatccttggaccttcacaaatgccctgagacggttctctgttcgatttttcatcccctatgaacctgggtcttattctgtccttctgatgcctccaagtttccctggtgtagagcttgtgttcttggcccatccttggagctttataagtgacctgagtgggatgcatttagggggcgggcttggtatgttgtatgaatccactctctgttccttttggagattagactatttggattcatgtgtagctgccctgtcccctggggctttatctcatccatgcaaactaccatctgctcaacttccagctacaccccgtgcacccttttgactggggacttgctggttgaaggagctcatcttgcaggctggaagcaccagggaattaattcccccagtcaaccaatggcatccagagagggcatggaggctccatacaacctcttccacccccacatctttctttgtcctatacatgtcttccatttggctgtttctgagttgtagcctttataataaagtggtaaatgttgtaactgc

SEQ ID NO: 123094 - DNA, 811 bp, Homo sapiens
  Payload ID: 4173
  Gene Symbol: CLEC4M
  Gene Name: C-type lectin domain family 4, member M
  Uniprot ID: Q9H2X3
  ENST ID: ENST00000597522
  CDS Start-End: 1-699
atgagtgactccaaggaaccaagggtgcagcagctgggcctcctggaagaagatccaacaaccagtggcatcagactttttccaagagactttcaattccagcagatacatggccacaagagctctacagggtgtcttggccatggcgccctggtgctgcaactcctctccttcatgctcttggctggggtcctggtggccatccttgtccaagtgtccaaggtccccagctccctaagtcaggaacaatccgagcaagacgcaatctaccagaacctgacccagcttaaagctgcagtgggtgagctctcagagaaatccaagctgcaggagatctaccaggagctgacccagctgaaggctgcagtgggtgagttgccagagaaatccaagctgcaggagatctaccaggagctgacccggctgaaggctgcagtgggtgagttgccagagaaatccaagctgcaggagatctaccaggagctgacccggctgaaggctgcagtggaacgcctgtgccgccactgtcccaaggactggacattcttccaaggaaactgttacttcatgtctaactcccagcggaactggcacgactccgtcaccgcctgccaggaagtgagggcccagctcgtcgtaatcaaaactgctgaggagcagcttccagcggtactggaacagtggagaacccaacaatagcgggaatgaagactgtgcggaatttagtggcagtggctggaacgacaatcgatgtgacgttgacaattactggatctgcaaaaagcccgcagcctgcttcagagacgaatag

SEQ ID NO: 123095 - DNA, 1555 bp, Homo sapiens
  Payload ID: 4174
  Gene Symbol: CLEC5A
  Gene Name: C-type lectin domain family 5, member A
  ENST ID: ENST00000418498
  CDS Start-End: 222-383
ccctttgccaagaaccccactgaacaggaagaggtatttcttggggatgctaccaaggcagagactgtgaagaaggaagaacgttgcttgggcaaaaggagcatattctcaggagacggggcccctgcctgccacaccaagcattaggccaccaggaagacccccatctgcaagcaagcctagccttccagggagaaagaggcccctgcagctccttcatcatgaactggcacatgatcatctctgggcttattgtggtagtgcttaaagttgttggaatgaccttatttctactttatttcccacagatttttaacaaaagtaacgatggtttcaccaccaccaggagctatggaacagaagtttcttcaggacataactgatgctgagaagtattttattggcttaatttaccatcgtgaagagaaaaggtggcgttggatcaacaactctgtgttcaatggcaatgttaccaatcagaatcagaatttcaactgtgcgaccattggcctaacaaagacatttgatgctgcatcatgtgacatcagctaccgcaggatctgtgagaagaatgccaaatgatcacagttccctgtgacaagaactatacttgcaactctttttgaatccatacaggtcgtctggccaatgattcttttacttacctatctgtctaccagtagcggtccttgcccatttgggaaactgagcttctttcttctgcactgggggactggatgctagccatctccaggagacaggatcagttttacggaaacaactcagttagtatagagatgaggtccgcttctgtagtactgagcatttctgactgatcaaaaaggcctagtctgttgacagggtttgttttattttagcctcagagtataccatactactagggagtaactgtagagtgagaaattataaacattatttagggattaccatggtggaagagggataaacataggtcctgtgacttcgtctctgttctcaagggaaccccattcacatgcccctcctaactccacaagcgagggtagcagaggctctcctcagtctgaactaaggcttggccttggggagggctcctagtgctgagcttggagcagcacggacagcagcattgtttatgggaatggagagaggtctgggcaggataggaaccttcttggagacccctttgaagaaaaccaggcagccaagggagccaaacacactagatttctgttcttcagcaaagccctgaagagacacttaagctaaaaattcccttgtcatatttctgaaactccattataacatatgtaactcctttgtaaccaaaatttaggtaagcaggcttcctttgctctgaaggttttgagtacctggctgtatttgttgagtatttttaaaattttggatagtctcttaggcaacaataatcacaatatattcatcccttcagttctggagaaagcctgataccaggcacagcctactgaccccaaggagcctggcactgattggcatcacattgatctagaactggtccagccgacgaagagta

SEQ ID NO: 123096 - DNA, 501 bp, Homo sapiens
  Payload ID: 4174
  Gene Symbol: CLEC5A
  Gene Name: C-type lectin domain family 5, member A
  ENST ID: ENST00000439991
  CDS Start-End: 158-412
gaaggaagaacgttgcttgggcaaaaggagcatattctcaggagacggggcccctgcctgccacaccaagcattaggccaccaggaagacccccatctgcaagcaagcctagccttccagggagaaagagtcccacagatttttaacaaaagtaacgatggtttcaccaccaccaggagctatggaacagaagtttcttcaggacataactgatgctgagaagtattttattggcttaatttaccatcgtgaagagaaaaggtggcgttggatcaacaactctgtgttcaatggcaatgttaccaatcagaatcagaatttcaactgtgcgaccattggcctaacaaagacatttgatgctgcatcatgtgacatcagctaccgcaggatctgtgagaagaatgccaaatgatcacagttccctgtgacaagaactatacttgcaactctttttgaatccatacaggtcgtctggccaatgattcttttacttacctatct

SEQ ID NO: 123097 - DNA, 743 bp, Homo sapiens
  Payload ID: 4174
  Gene Symbol: CLEC5A
  Gene Name: C-type lectin domain family 5, member A
  ENST ID: ENST00000438351
  CDS Start-End: 148-615
ggaagaacgttgcttgggcaaaaggagcatattctcaggagacggggcccctgcctgccacaccaagcattaggccaccaggaagacccccatctgcaagcaagcctagccttccagggagaaagaggcccctgcagctccttcatcatgaactggcacatgatcatctctgggcttattgtggtagtgcttaaagttgttggaatgaccttatttctactttatttcccacagatttttaacaaaagtaacgatggtttcaccaccaccaggagctatggaacagtctgccccaaagactgggaattttatcaagcaagatgttttttcttatccacttctgaatcatcttggaatgaaagcagggacttttgcaaaggaaaaggatccacattggcaattgtcaacacgccagagaaactgaagtttcttcaggacataactgatgctgagaagtattttattggcttaatttaccatcgtgaagagaaaaggtggcgttggatcaacaactctgtgttcaatggcaagtacgtgaacatgccacagtttcctggggatcttggtttgcttcaaaagaccaaacctgagattgctgggttcaccctggaatagctcaaacgctgacacttgactctgttctgctcttctcctttcttccaacccatctattccctgagacacattttaataaatgttttcttatgaaagagatcaaactttcataaggagaaagaagagta

SEQ ID NO: 123098 - DNA, 1420 bp, Homo sapiens
  Payload ID: 4174
  Gene Symbol: CLEC5A
  Gene Name: C-type lectin domain family 5, member A
  ENST ID: ENST00000551012
  CDS Start-End: 159-656
actgtgaagaaggaagaacgttgcttgggcaaaaggagcatattctcaggagacggggcccctgcctgccacaccaagcattaggccaccaggaagacccccatctgcaagcaagcctagccttccagggagaaagaggcccctgcagctccttcatcatgaactggcacatgatcatctctgggcttattgtggtagtgcttaaagttgttggaatgaccttatttctactttatttcccacagatttttaacaaaagtaacgatggtttcaccaccaccaggagctatggaacagtctgccccaaagactgggaattttatcaagcaagatgttttttcttatccacttctgaatcatcttggaatgaaagcagggacttttgcaaaggaaaaggatccacattggcaattgtcaacacgccagagaaactgaagtttcttcaggacataactgatgctgagaagtattttattggcttaatttaccatcgtgaagagaaaaggtggcgttggatcaacaactctgtgttcaatggcaatgttaccaatcagaatcagaatttcaactgtgcgaccattggcctaacaaagacatttgatgctgcatcatgtgacatcagctaccgcaggatctgtgagaagaatgccaaatgatcacagttccctgtgacaagaactatacttgcaactctttttgaatccatacaggtcgtctggccaatgattcttttacttacctatctgtctaccagtagcggtccttgcccatttgggaaactgagcttctttcttctgcactgggggactggatgctagccatctccaggagacaggatcagttttacggaaacaactcagttagtatagagatgaggtccgcttctgtagtactgagcatttctgactgatcaaaaaggcctagtctgttgacagggtttgttttattttagcctcagagtataccatactactagggagtaactgtagagtgagaaattataaacattatttagggattaccatggtggaagagggataaacataggtcctgtgacttcgtctctgttctcaagggaaccccattcacatgcccctcctaactccacaagcgagggtagcagaggctctcctcagtctgaactaaggcttggccttggggagggctcctagtgctgagcttggagcagcacggacagcagcattgtttatgggaatggagagaggtctgggcaggataggaaccttcttggagacccctttgaagaaaaccaggcagccaagggagccaaacacactagatttctgttcttcagcaaagccctgaagagacacttaagctaaaaattcccttgtcatatttctgaaactccattataacatatgtaactcctttgtaaccaaaatttaggtaagcaggc

SEQ ID NO: 123099 - DNA, 3511 bp, Homo sapiens
  Payload ID: 4174
  Gene Symbol: CLEC5A
  Gene Name: C-type lectin domain family 5, member A
  Uniprot ID: Q9NY25
  ENST ID: ENST00000546910
  CDS Start-End: 198-764
caggaagaggtatttcttggggatgctaccaaggcagagactgtgaagaaggaagaacgttgcttgggcaaaaggagcatattctcaggagacggggcccctgcctgccacaccaagcattaggccaccaggaagacccccatctgcaagcaagcctagccttccagggagaaagaggcccctgcagctccttcatcatgaactggcacatgatcatctctgggcttattgtggtagtgcttaaagttgttggaatgaccttatttctactttatttcccacagatttttaacaaaagtaacgatggtttcaccaccaccaggagctatggaacagtctcacagatttttgggagcagttccccaagtcccaacggcttcattaccacaaggagctatggaacagtctgccccaaagactgggaattttatcaagcaagatgttttttcttatccacttctgaatcatcttggaatgaaagcagggacttttgcaaaggaaaaggatccacattggcaattgtcaacacgccagagaaactgaagtttcttcaggacataactgatgctgagaagtattttattggcttaatttaccatcgtgaagagaaaaggtggcgttggatcaacaactctgtgttcaatggcaatgttaccaatcagaatcagaatttcaactgtgcgaccattggcctaacaaagacatttgatgctgcatcatgtgacatcagctaccgcaggatctgtgagaagaatgccaaatgatcacagttccctgtgacaagaactatacttgcaactctttttgaatccatacaggtcgtctggccaatgattcttttacttacctatctgtctaccagtagcggtccttgcccatttgggaaactgagcttctttcttctgcactgggggactggatgctagccatctccaggagacaggatcagttttacggaaacaactcagttagtatagagatgaggtccgcttctgtagtactgagcatttctgactgatcaaaaaggcctagtctgttgacagggtttgttttattttagcctcagagtataccatactactagggagtaactgtagagtgagaaattataaacattatttagggattaccatggtggaagagggataaacataggtcctgtgacttcgtctctgttctcaagggaaccccattcacatgcccctcctaactccacaagcgagggtagcagaggctctcctcagtctgaactaaggcttggccttggggagggctcctagtgctgagcttggagcagcacggacagcagcattgtttatgggaatggagagaggtctgggcaggataggaaccttcttggagacccctttgaagaaaaccaggcagccaagggagccaaacacactagatttctgttcttcagcaaagccctgaagagacacttaagctaaaaattcccttgtcatatttctgaaactccattataacatatgtaactcctttgtaaccaaaatttaggtaagcaggcttcctttgctctgaaggttttgagtacctggctgtatttgttgagtatttttaaaattttggatagtctcttaggcaacaataatcacaatatattcatcccttcagttctggagaaagcctgataccaggcacagcctactgaccccaaggagcctggcactgattggcatcacattgatctagaactggtccagccgacgaagagtaggaaaagagaagggctgctcagggaaacattggctgggggcacggaataagcacatagtaaaaagggaacatcagggtcaaatggaaatcacctgagacaggaaacagggagttcatttggccacactggaagaaaggcaagaaagaggaagacaagtcttggagtaccctggctgttctccacactcacaagacatcagctatatactctgcttggtgcataagaaagagaaaagagatgccttttgtgttttgagtaagaataattaaaccataaggaagaccatgtataaaactgatggaaataatagtcaccaaagtacagcacataccattttgtgtctaataacaatgtagcacagtaatgactgtacatgtcattgtatgtataccaaacaagattgttgtaaatcatattttttattacaacactaagttctgcttctgcattcctaggtttcatcatttttggctccttagcatggccacttacaattttttaacatgagataacacatcaggtgtcagaacttgcttgaagggaattaccagaagtaatttgtgtttgagatggggtggaaattggaattatattagtagccggtggagatacaagttctctgactgtgttgggaaaggataagtgctaccgttgagaagggaagaaaggctgagtctaggtggagaaaaatatcaacagaactctagccaaaggcaagccccagaactcagacaacagaaaggaaatcctaatccttctgttttgagaagagagaactgtagttgcttcacttcctatttcatgacagaataactgcaaacttttaagatcaggaaatgtagacatctagtgatttctttagtagacagtttaatttcccccaagattaggagacacttctgtgcaggttctaaaaggagcccaatggcctggggtgggagtggggagtagatagggaatatgtgggatttggtttaagttcatcattggaagagttcctggatccttgcaagcttagataaatgtgatctttattagatagcagtggcatgctttaaaaaaaaaaaaggcaatgaaaatttagcaagccactgaatttgagttttcactttgtttctaatatgctgtgtgaatcagtacagttttcttaccctttcttggtcttaatttccttactgataaaatggggtagtaatacctatctcaaaaaattattgcacatattaaataacattcctctatgtatctcaatggcattagacattaggagaagcattttgtggaggatttgaagttgagatcttcatccaagaagtagcttttcaatttgctagaagcttaatgtaggcaagccacttcatttttcagaacttgtttactcatttataatatgggaataaaaatttgtgcaagtcagagaagggtgccttaaaaatgttgtggccaagccacatgagatcaaagacacacttttcatgacctcaaatgtgggcccagcctaggtcagccaacccccatccaacccttagactcacgaacaaatccacctgagatcagcagagccaccctagatcagctgaaactctaagcacaaaaataaaaacttatcactgtataccactggagttttctggttatctctcgtatagcaaaatctaactgatgcaatctccatctggccttcatccttctccctttattgtcctttcgtgtattgttcatccagcaaccaggatgatcttgttaaaacattaaacagattctgtcactctt

SEQ ID NO: 123100 - DNA, 1682 bp, Homo sapiens
  Payload ID: 4175
  Gene Symbol: CLEC6A
  Gene Name: C-type lectin domain family 6, member A
  Uniprot ID: Q6EIG7
  ENST ID: ENST00000382073
  CDS Start-End: 187-816
agttgtaattgtgacttcttcttttgaggtacacttaatgttggaagtctcttagtcctataagagtgtgtagcagtttgtccctgagctctagcttctttaaatgaagctgagtctctgggcaacatctttagggagagaggtacaaaaggttcctggaccttctcaacacagggagcctgcataatgatgcaagagcagcaacctcaaagtacagagaaaagaggctggttgtccctgagactctggtctgtggctgggatttccattgcactcctcagtgcttgcttcattgtgagctgtgtagtaacttaccattttacatatggtgaaactggcaaaaggctgtctgaactacactcatatcattcaagtctcacctgcttcagtgaagggacaaaggtgccagcctggggatgttgcccagcttcttggaagtcatttggttccagttgctacttcatttccagtgaagagaaggtttggtctaagagtgagcagaactgtgttgagatgggagcacatttggttgtgttcaacacagaagcagagcagaatttcattgtccagcagctgaatgagtcattttcttattttctggggctttcagacccacaaggtaataataattggcaatggattgataagacaccttatgagaaaaatgtcagattttggcacctaggtgagcccaatcattctgcagagcaatgtgcttcaatagtcttctggaaacctacaggatggggctggaatgatgttatctgtgaaactagaaggaattcaatatgtgagatgaataagatttacctatgagtagaagcttaattggaaagaagagaagaattactgacgtaattttttccctgacgtctttaaaattgaaccctatcatgaaatgataatttcttcctgaatttacacataatccttatgttatagaggttcacagaaatggaaagatacctgtttccctttaatcaatcttctcgtttcctcttttccattaatgatagaatgcacccttcctctctttgttccattctttcacttgttattcatttttttctttcttcacacttcattacacaaatatttattgtttcagagactgtactattttgtttgttagaagatttataaggcagtatcttttgaaaattatgactttccttcctcaatataccataaagaaatctttttggtcaagatggtagttggaactacaatcatctgaaggcctgacaagagttgaaagacatgttttctagatggctcactcacatggctggcaacttggtgttggctattaatgtaacctggaaataaattttattctgcagttagggatttggcattttatatatgttgattcaatcaagtttggcaagcagggtgttcgatactgctatatcctgtattcttggtttatttgttttatttctgagaaatatgtgttaagatctctcgctgattgggaatttgtctatttctcatttaaattttgtcaaatctttctttgcttgcaagcatttcttgttacccaaatctaatctattcctgaaaatatgatggttagcaaagtttgagataactagagcctgtaatccatcattttaaatggcaatgataatgacagtttatttttatgttatataaaaacctcaacaaattttccaaac

SEQ ID NO: 123101 - DNA, 2446 bp, Homo sapiens
  Payload ID: 4176
  Gene Symbol: CLEC7A
  Gene Name: C-type lectin domain family 7, member A
  Uniprot ID: Q9BXN2
  ENST ID: ENST00000353231
  CDS Start-End: 160-765
atctggttgaactacttaagcttaatttgttaaactccggtaagtacctagcccacatgatttgactcagagattctcttttgtccacagacagtcatctcaggagcagaaagaaaagagctcccaaatgctatatctattcaggggctctcaagaacaatggaatatcatcctgatttagaaaatttggatgaagatggatatactcaattacacttcgactctcaaagcaataccaggatagctgttgtttcagagaaaggatcgtgtgctgcatctcctccttggcgcctcattgctgtaattttgggaatcctatgcttggtaatactggtgatagctgtggtcctgggtaccatgggggttctttccagcccttgtcctcctaattggattatatatgagaagagctgttatctattcagcatgtcactaaattcctgggatggaagtaaaagacaatgctggcaactgggctctaatctcctaaagatagacagctcaaatgaattgggatttatagtaaaacaagtgtcttcccaacctgataattcattttggataggcctttctcggccccagactgaggtaccatggctctgggaggatggatcaacattctcttctaacttatttcagatcagaaccacagctacccaagaaaacccatctccaaattgtgtatggattcacgtgtcagtcatttatgaccaactgtgtagtgtgccctcatatagtatttgtgagaagaagttttcaatgtaagaggaagggtggagaaggagagagaaatatgtgaggtagtaaggaggacagaaaacagaacagaaaagagtaacagctgaggtcaagataaatgcagaaaatgtttagagagcttggccaactgtaatcttaaccaagaaattgaagggagaggctgtgatttctgtatttgtcgacctacaggtaggctagtattatttttctagttagtagatccctagacatggaatcagggcagccaagcttgagtttttattttttatttatttatttttttgagatagggtctcactttgttacccaggctggagtgcagtggcacaatctcgactcactgcagctatctctcgcctcagcccctcaagtagctgggactacaggtgcatgccaccatgccaggctaatttttggtgttttttgtagagactgggttttgccatgttgaccaagctggtctctaactcctgggcttaagtgatctgcccgccttggcctcccaaagtgctgggattacagatgtgagccaccacacctggccccaagcttgaattttcattctgccattgacttggcatttaccttgggtaagccataagcgaatcttaatttctggctctatcagagttgtttcatgctcaacaatgccattgaagtgcacggtgtgttgccacgatttgaccctcaacttctagcagtatatcagttatgaactgagggtgaaatatatttctgaatagctaaatgaagaaatgggaaaaaatcttcaccacagtcagagcaattttattattttcatcagtatgatcataattatgattatcatcttagtaaaaagcaggaactcctactttttctttatcaattaaatagctcagagagtacatctgccatatctctaatagaatctttttttttttttttttttttgagacagagtttcgctcttgttgcccaggctggagtgcaacggcacgatctcggctcaccgcaacctccgccccctgggttcaagcaattctcctgcctcagcctcccaagtagctgggattacagtcaggcaccaccacacccggctaattttgtatttttttagtagagacagggtttctccatgtcggtcagggtagtcccgaactcctgacctcaagtgatctgcctgcctcggcctcccaagtgctgggattacaggcgtgagccactgcacccagcctagaatcttgtataatatgtaattgtagggaaactgctctcataggaaagttttctgctttttaaatacaaaaatacataaaaatacataaaatctgatgatgaatataaaaaagtaaccaacctcattggaacaagtattaacattttggaatatgttttattagttttgtgatgtactgttttacaatttttaccatttttttcagtaattactgtaaaatggtattattggaatgaaactatatttcctcatgtgctgatttgtcttatttttttcatactttcccactggtgctatttttatttccaatggatatttctgtattactagggaggcatttacagtcctctaatgttgattaatatgtgaaaagaaattgtaccaattttactaaattatgcagtttaaaatggatgattttatgttatgtggatttcatttcaataaaaaaaaactcttatcaaaaaa

SEQ ID NO: 123102 - DNA, 1154 bp, Homo sapiens
  Payload ID: 4176
  Gene Symbol: CLEC7A
  Gene Name: C-type lectin domain family 7, member A
  Uniprot ID: Q9BXN2
  ENST ID: ENST00000298523
  CDS Start-End: 72-503
agacagtcatctcaggagcagaaagaaaagagctcccaaatgctatatctattcaggggctctcaagaacaatggaatatcatcctgatttagaaaatttggatgaagatggatatactcaattacacttcgactctcaaagcaataccaggatagctgttgtttcagagaaaggatcgtgtgctgcatctcctccttggcgcctcattgctgtaattttgggaatcctatgcttggtaatactggtgatagctgtggtcctgggtaccatgggggttctttccagcccttgtcctcctaattggattatatatgagaagagctgttatctattcagcatgtcactaaattcctgggatggaagtaaaagacaatgctggcaactgggctctaatctcctaaagatagacagctcaaatgaattgatttcagatcagaaccacagctacccaagaaaacccatctccaaattgtgtatggattcacgtgtcagtcatttatgaccaactgtgtagtgtgccctcatatagtatttgtgagaagaagttttcaatgtaagaggaagggtggagaaggagagagaaatatgtgaggtagtaaggaggacagaaaacagaacagaaaagagtaacagctgaggtcaagataaatgcagaaaatgtttagagagcttggccaactgtaatcttaaccaagaaattgaagggagaggctgtgatttctgtatttgtcgacctacaggtaggctagtattatttttctagttagtagatccctagacatggaatcagggcagccaagcttgagtttttattttttatttatttatttttttgagatagggtctcactttgttacccaggctggagtgcagtggcacaatctcgactcactgcagctatctctcgcctcagcccctcaagtagctgggactacaggtgcatgccaccatgccaggctaatttttggtgttttttgtagagactgggttttgccatgttgaccaagctggtctctaactcctgggcttaagtgatctgcccgccttggcctcccaaagtgctgggattacagatgtgagccaccacacctggccccaagcttgaattttcattctgccattgacttggcatttaccttgggtaagccataag

SEQ ID NO: 123103 - DNA, 1130 bp, Homo sapiens
  Payload ID: 4176
  Gene Symbol: CLEC7A
  Gene Name: C-type lectin domain family 7, member A
  Uniprot ID: Q9BXN2
  ENST ID: ENST00000304084
  CDS Start-End: 156-899
ggttgaactacttaagcttaatttgttaaactccggtaagtacctagcccacatgatttgactcagagattctcttttgtccacagacagtcatctcaggagcagaaagaaaagagctcccaaatgctatatctattcaggggctctcaagaacaatggaatatcatcctgatttagaaaatttggatgaagatggatatactcaattacacttcgactctcaaagcaataccaggatagctgttgtttcagagaaaggatcgtgtgctgcatctcctccttggcgcctcattgctgtaattttgggaatcctatgcttggtaatactggtgatagctgtggtcctgggtaccatggctatttggagatccaattcaggaagcaacacattggagaatggctactttctatcaagaaataaagagaaccacagtcaacccacacaatcatctttagaagacagtgtgactcctaccaaagctgtcaaaaccacaggggttctttccagcccttgtcctcctaattggattatatatgagaagagctgttatctattcagcatgtcactaaattcctgggatggaagtaaaagacaatgctggcaactgggctctaatctcctaaagatagacagctcaaatgaattgggatttatagtaaaacaagtgtcttcccaacctgataattcattttggataggcctttctcggccccagactgaggtaccatggctctgggaggatggatcaacattctcttctaacttatttcagatcagaaccacagctacccaagaaaacccatctccaaattgtgtatggattcacgtgtcagtcatttatgaccaactgtgtagtgtgccctcatatagtatttgtgagaagaagttttcaatgtaagaggaagggtggagaaggagagagaaatatgtgaggtagtaaggaggacagaaaacagaacagaaaagagtaacagctgaggtcaagataaatgcagaaaatgtttagagagcttggccaactgtaatcttaaccaagaaattgaagggagaggctgtgatttctgtatttgtcgacctacaggtaggctagtattatttttctagttagtagatccctagacatggaatc

SEQ ID NO: 123104 - DNA, 425 bp, Homo sapiens
  Payload ID: 4176
  Gene Symbol: CLEC7A
  Gene Name: C-type lectin domain family 7, member A
  Uniprot ID: Q9BXN2
  ENST ID: ENST00000310002
  CDS Start-End: 108-341
ccacatgatttgactcagagattctcttttgtccacagacagtcatctcaggagcagaaagaaaagagctcccaaatgctatatctattcaggggctctcaagaacaatggaatatcatcctgatttagaaaatttggatgaagatggatatactcaattacacttcgactctcaaagcaataccaggatagctgttgtttcagagaaaggatcgtgtgctgcatctcctccttggcgcctcattgctgtaattttgggaatcctatgcttggtaatactggtgatagctgtggtcctgggtaccatggctggtttcaaagctgtggaattcaaaggataaattaatgaagaaaacaagcggagctgaagaagaaagtacaatatggtgctgtcttcctaatgaaataaattcactaaatggaca

SEQ ID NO: 123105 - DNA, 355 bp, Homo sapiens
  Payload ID: 4176
  Gene Symbol: CLEC7A
  Gene Name: C-type lectin domain family 7, member A
  Uniprot ID: Q9BXN2
  ENST ID: ENST00000349926
  CDS Start-End: 1-138
atggaatatcatcctgatttagaaaatttggatgaagatggatatactcaattacacttcgactctcaaagcaataccaggatagctgttgtttcagagaaagggatttatagtaaaacaagtgtcttcccaacctgataattcattttggataggcctttctcggccccagactgaggtaccatggctctgggaggatggatcaacattctcttctaacttatttcagatcagaaccacagctacccaagaaaacccatctccaaattgtgtatggattcacgtgtcagtcatttatgaccaactgtgtagtgtgccctcatatagtatttgtgagaagaagttttcaatgtaa

SEQ ID NO: 123106 - DNA, 1000 bp, Homo sapiens
  Payload ID: 4176
  Gene Symbol: CLEC7A
  Gene Name: C-type lectin domain family 7, member A
  Uniprot ID: Q9BXN2
  ENST ID: ENST00000396484
  CDS Start-End: 104-610
atgatttgactcagagattctcttttgtccacagacagtcatctcaggagcagaaagaaaagagctcccaaatgctatatctattcaggggctctcaagaacaatggaatatcatcctgatttagaaaatttggatgaagatggatatactcaattacacttcgactctcaaagcaataccaggatagctgttgtttcagagaaaggggttctttccagcccttgtcctcctaattggattatatatgagaagagctgttatctattcagcatgtcactaaattcctgggatggaagtaaaagacaatgctggcaactgggctctaatctcctaaagatagacagctcaaatgaattgggatttatagtaaaacaagtgtcttcccaacctgataattcattttggataggcctttctcggccccagactgaggtaccatggctctgggaggatggatcaacattctcttctaacttatttcagatcagaaccacagctacccaagaaaacccatctccaaattgtgtatggattcacgtgtcagtcatttatgaccaactgtgtagtgtgccctcatatagtatttgtgagaagaagttttcaatgtaagaggaagggtggagaaggagagagaaatatgtgaggtagtaaggaggacagaaaacagaacagaaaagagtaacagctgaggtcaagataaatgcagaaaatgtttagagagcttggccaactgtaatcttaaccaagaaattgaagggagaggctgtgatttctgtatttgtcgacctacaggtaggctagtattatttttctagttagtagatccctagacatggaatcagggcagccaagcttgagtttttattttttatttatttatttttttgagatagggtctcactttgttacccaggctggagtgcagtggcacaatctcgactcactgcagctatctctcgcctcagcccctcaagtagctgggactacaggtgcatgcca

SEQ ID NO: 123107 - DNA, 625 bp, Homo sapiens
  Payload ID: 4176
  Gene Symbol: CLEC7A
  Gene Name: C-type lectin domain family 7, member A
  Uniprot ID: Q9BXN2
  ENST ID: ENST00000533022
  CDS Start-End: 1-570
atggaatatcatcctgatttagaaaatttggatgaagatggatatactcaattacacttcgactctcaaagcaataccaggatagctgttgtttcagagaaaggatcgtgtgctgcatctcctccttggcgcctcattgctgtaattttgggaatcctatgcttggtaatactggtgatagctgtggtcctgggtaccatggctatttggagatccaattcaggaagcaacacattggagaatggctactttctatcaagaaataaagagaaccacagtcaacccacacaatcatctttagaagacagtgtgactcctaccaaagctgtcaaaaccacaggggttctttccagcccttgtcctcctaattggattatatatgagaagagctgttatctattcagcatgtcactaaattcctgggatggaagtaaaagacaatgctggcaactgggctctaatctcctaaagatagacagctcaaatgaattgatttcagatcagaaccacagctacccaagaaaacccatctccaaattgtgtatggattcacgtgtcagtcatttatgaccaactgtgtagtgtgccctcatatagtatttgtgagaagaagttttcaatgtaa

SEQ ID NO: 123108 - DNA, 1592 bp, Homo sapiens
  Payload ID: 4176
  Gene Symbol: CLEC7A
  Gene Name: C-type lectin domain family 7, member A
  Uniprot ID: Q9BXN2
  ENST ID: ENST00000529761
  CDS Start-End: 72-815
atttcctgctcttgaatatctggttgaactacttaagcttaatttgttaaactccggggctctcaagaacaatggaatatcatcctgatttagaaaatttggatgaagatggatatactcaattacacttcgactctcaaagcaataccaggatagctgttgtttcagagaaaggatcgtgtgctgcatctcctccttggcgcctcattgctgtaattttgggaatcctatgcttggtaatactggtgatagctgtggtcctgggtaccatggctatttggagatccaattcaggaagcaacacattggagaatggctactttctatcaagaaataaagagaaccacagtcaacccacacaatcatctttagaagacagtgtgactcctaccaaagctgtcaaaaccacaggggttctttccagcccttgtcctcctaattggattatatatgagaagagctgttatctattcagcatgtcactaaattcctgggatggaagtaaaagacaatgctggcaactgggctctaatctcctaaagatagacagctcaaatgaattgggatttatagtaaaacaagtgtcttcccaacctgataattcattttggataggcctttctcggccccagactgaggtaccatggctctgggaggatggatcaacattctcttctaacttatttcagatcagaaccacagctacccaagaaaacccatctccaaattgtgtatggattcacgtgtcagtcatttatgaccaactgtgtagtgtgccctcatatagtatttgtgagaagaagttttcaatgtaagaggaagggtggagaaggagagagaaatatgtgaggtagtaaggaggacagaaaacagaacagaaaagagtaacagctgaggtcaagataaatgcagaaaatgtttagagagcttggccaactgtaatcttaaccaagaaattgaagggagaggctgtgatttctgtatttgtcgacctacaggtaggctagtattatttttctagttagtagatccctagacatggaatcagggcagccaagcttgagtttttattttttatttatttatttttttgagatagggtctcactttgttacccagcctagaatcttgtataatatgtaattgtagggaaactgctctcataggaaagttttctgctttttaaatacaaaaatacataaaaatacataaaatctgatgatgaatataaaaaagtaaccaacctcattggaacaagtattaacattttggaatatgttttattagttttgtgatgtactgttttacaatttttaccatttttttcagtaattactgtaaaatggtattattggaatgaaactatatttcctcatgtgctgatttgtcttatttttttcatactttcccactggtgctatttttatttccaatggatatttctgtattactagggaggcatttacagtcctctaatgttgattaatatgtgaaaagaaattgtaccaattttactaaattatgcagtttaaaatggatgattttatgttatgtggatttcatttcaataaaaaaaaactcttatcaaaaaa

SEQ ID NO: 123109 - DNA, 915 bp, Homo sapiens
  Payload ID: 4176
  Gene Symbol: CLEC7A
  Gene Name: C-type lectin domain family 7, member A
  Uniprot ID: Q9BXN2
  ENST ID: ENST00000531192
  CDS Start-End: 176-754
tttcctgctcttgaatatctggttgaactacttaagcttaatttgttaaactccggtaagtacctagcccacatgatttgactcagagattctcttttgtccacagacagtcatctcaggagcagaaagaaaagagctcccaaatgctatatctattcaggggctctcaagaacaatggaatatcatcctgatttagaaaatttggatgaagatggatatactcaattacacttcgactctcaaagcaataccaggatagctgttgtttcagagaaaggatcgtgtgctgcatctcctccttggcgcctcattgctgtaattttgggaatcctatgcttggtaatactggtgatagctgtggtcctgggtaccatggctatttggagatccaattcaggaagcaacacattggagaatggctactttctatcaagaaataaagagaaccacagtcaacccacacaatcatctttagaagacagtgtgactcctaccaaagctgtcaaaaccacaggggttctttccagcccttgtcctcctaattggattatatatgagaagagctgttatctattcagcatgtcactaaattcctgggatggaagtaaaagacaatgctggcaactgggctctaatctcctaaagatagacagctcaaatgaattgagtctcactctgttgcccaagctagagtgcagtgaagccgcgacatcccaggctcaagtgatcctcccacctcagcttcctgagtagggatttatagtaaaacaagtgtcttcccaacctgataattcattttggataggcctttctcggccccagactgaggtaccatggctctgggaggatggatcaacattctcttctaacttatttcagatcagaaccacagctacccaagaaaacccatctcc

SEQ ID NO: 123110 - DNA, 573 bp, Homo sapiens
  Payload ID: 4176
  Gene Symbol: CLEC7A
  Gene Name: C-type lectin domain family 7, member A
  ENST ID: ENST00000525605
  CDS Start-End: 71-481
tttcctgctcttgaatatctggttgaactacttaagcttaatttgttaaactccggggctctcaagaacaatggaatatcatcctgatttagaaaatttggatgaagatggatatactcaattacacttcgactctcaaagcaataccaggatagctgttgtttcagagaaaggatcgtgtgctgcatctcctccttggcgcctcattgctgtaattttgggaatcctatgcttggtaatactggtgatagctgtggtcctgggtaccatgggtgagtatttggtggaggagattaacaacagacaatttagtaagcaattattatgtgccaggcactcttttaagggcttgacatgcataatctactttaatttgtatataatctggttttatctgtattgggttggtgctgttaatgcccatttcacttataaagggtgtgagagactgagaggttattttacctttccagggttataagctagttagtggtgggaccatgattagaaatttgggtgatctgtctaaaaaactcatactcttaactacattgctctcctacctcccttaca

SEQ ID NO: 123111 - DNA, 881 bp, Homo sapiens
  Payload ID: 4176
  Gene Symbol: CLEC7A
  Gene Name: C-type lectin domain family 7, member A
  Uniprot ID: Q9BXN2
  ENST ID: ENST00000465100
  CDS Start-End: 1-351
atggaatatcatcctgatttagaaaatttggatgaagatggatatactcaattacacttcgactctcaaagcaataccaggatagctgttgtttcagagaaaggatcgtgtgctgcatctcctccttggcgcctcattgctgtaattttgggaatcctatgcttggtaatactggtgatagctgtggtcctgggtaccatgggtactgggcagtttctcaaggatctctcatttttaaataacagaagaaagctatttggagatccaattcaggaagcaacacattggagaatggctactttctatcaagaaataaagagaaccacagtcaacccacacaatcatctttagaagacagtgtgactcctaccaaagctgtcaaaaccacaggggttctttccagcccttgtcctcctaattggattatatatgagaagagctgttatctattcagcatgtcactaaattcctgggatggaagtaaaagacaatgctggcaactgggctctaatctcctaaagatagacagctcaaatgaattgagtctcactctgttgcccaagctagagtgcagtgaagccgcgacatcccaggctcaagtgatcctcccacctcagcttcctgagtagggatttatagtaaaacaagtgtcttcccaacctgataattcattttggataggcctttctcggccccagactgaggtaccatggctctgggaggatggatcaacattctcttctaacttatttcagatcagaaccacagctacccaagaaaacccatctccaaattgtgtatggattcacgtgtcagtcatttatgaccaactgtgtagtgtgccctcatatagtatttgtgagaagaagttttcaatgtaa

SEQ ID NO: 123112 - DNA, 1734 bp, Homo sapiens
  Payload ID: 4177
  Gene Symbol: CLEC9A
  Gene Name: C-type lectin domain family 9, member A
  Uniprot ID: Q6UXN8
  ENST ID: ENST00000355819
  CDS Start-End: 614-1339
cgtttgtacccggctgtggcaatctgtggtgaagttgaaatgcttttctgctagactggcaacatgttttgattcttctcaaataactcgcaagctcttgtgaagcacaacggcctaccttgtcctgaagaaaacatactctaaggcccacagatgattaaacccagccatttatgtgacaatagcatttttatttttcttatcaagatctgggtatttgatccacacaatggtaaagattcccatgttagccaagatctaaatgattcaaactgatgatactctctgcagaagaggtgactataaacgcagcccctgtgatgccaactggacatattatggagatagctgctatgggttcttcaaacacaacttgacatggaaagagagtgagcagtactgcactgacatgaaggctactctcctgaagactgacaaccagaacattctgtggatagaagtcaagggctccaatgtctcccaagacgaaagaatcccaagtctcatttggaggaatgctatcactaactaggattcctggagctaaaacattataggagttacttgttccagcctcctgtgtggactgctttcctatcaaagcaccttagacatgcacgaggaagaaatatacacctctcttcagtgggatagcccagcaccagacacttaccagaaatgtctgtcttccaacaaatgttcaggagcatgctgtcttgtgatggtgatttcatgtgttttctgcatgggattattaacagcatccattttcttgggcgtcaagttgttgcaggtgtccaccattgcgatgcagcagcaagaaaaactcatccaacaagagagggcactgctaaactttacagaatggaagagaagctgtgcccttcagatgaaatattgccaagccttcatgcaaaactcattaagttcagcccataacagcagtccttgtccaaacaattggattcagaacagagaaagttgttactatgtctctgaaatttggagcatttggcacaccagtcaagagaattgtttaaaggaaggttccacgctgctacaaatagagagcaaagaagaaatggattttatcactggcagcttgaggaagattaaaggaagctatgattactgggtggggttgtctcaggatggacacagcggacgctggctttggcaagatggctcctctccttctcctggcctgttgccagcagagagatcccagtcagctaaccaagtctgtggatacgtgaaaagcaattcccttctttcgtctaactgcagcacgtggaagtattttatctgtgagaagtatgcgttgagatcctctgtctgaaagaaattgtgttcaaagtgttctattacactgttatttggagcatgccattggaaaacccacccccaccccccctcaaaaaaacagaacagtaaaccaaaatgtgggccatgaaattagcaacctgggactcaataatacacttgggaatattcttccacaccgtccagatttcatttgatgttgttcacattgcaagagtaaaacttatttagagctacagaagacaaaaccctgaagagttaagaacaaacgcaaggaaataatttttattgtttaaagcccggaatgactgtaactttcacacaaggtacgcatctatgtttttgggggaggtgatgtagttacagctgactaatatttttaaaataaataaataaatttggcctttaaaa

SEQ ID NO: 123113 - DNA, 670 bp, Homo sapiens
  Payload ID: 4178
  Gene Symbol: CLECL1
  Gene Name: C-type lectin-like 1
  Uniprot ID: Q8IZS7
  ENST ID: ENST00000327839
  CDS Start-End: 36-539
ggcagaaaactaactgaaaaacgagaacctactgtatggttagtaatttcttccatgtcatacaagtattcgagaaatctgctaccttgattagtaagactgaacacattggttttgtcatttattcatggaggaagtccaccacccacttggggagcagaaggaaatttgccatctcaatttacttatcagaagtttctttgcagaaatatgattgtcccttcagtgggacatcatttgtggtcttctctctctttttgatctgtgcaatggctggagatgtagtctacgctgacatcaaaactgttcggacttccccgttagaactcgcgtttccacttcagagatctgtttctttcaacttttctactgtccataaatcatgtcctgccaaagactggaaggtgcataagggaaaatgttactggattgctgaaactaagaaatcttggaacaaaagtcaaaatgactgtgccataaacaattcatatctcatggtgattcaagacattactgctatggtgagatttaacatttagaggtgacagcatcccccacactggcagtgaattttttgtgctacaaacttggcaaaagtctgtgaaaagaagtttcaacttcatgtgttattaactatacaaatattagttgaatgaattgttgaattaca

SEQ ID NO: 123114 - DNA, 557 bp, Homo sapiens
  Payload ID: 4178
  Gene Symbol: CLECL1
  Gene Name: C-type lectin-like 1
  ENST ID: ENST00000542530
  CDS Start-End: 1-359
tttacttatcagaagtttctttgcagaaatatgattgtcccttcagtgggacatcatttgtggtcttctctctctttttgatctgtgcaatggctggagatgtagtctacgctgacatcaaaactgttcggacttccccgttagaactcgcgtttccacttcagagatctgtttctttcaacttttctactgtccataaatcatgtcctgccaaagactggaaggtgcataagggaaaatgttactggattgctgaaactaagaaatcttggaacaaaagtcaaaatgactgtgccataaacaattcatatctcatggtgattcaagacattactgctatgaaatccaatcttttttgacatatgcatatagaagttcctagacttcagtgctgaggagacagaggctacaggcatccatatgtctgtctctggggtcttcttaggaagaggcctctgatgaagagaacaaagctcttgtttgatatcccagcttgagcaagaggaatgggacaagttcgtggcagccaccagccgccaggagatggctgaagtaga

SEQ ID NO: 123115 - DNA, 1069 bp, Homo sapiens
  Payload ID: 4178
  Gene Symbol: CLECL1
  Gene Name: C-type lectin-like 1
  ENST ID: ENST00000540988
  CDS Start-End: 1-108
caagacattactgctatgctgatcacctttttgctgtaccttcaaatggcatttcttcaatgtgtgtacatctctgatgtctctgtgtatccaaatttcttcttgtaaggacattatcagattggattagggcccaccgcaatggcctcactaaatccaatcttttttgacatatgcatatagaagttcctagacttcagtgctgaggagacagaggctacaggcatccatatgtctgtctctggggtcttcttaggaagaggcctctgatgaagagaacaaagctcttgtttgatatcccagcttgagcaagaggaatgggacaagttcgtggcagccaccagccgccaggagatggctgaagtagacaatcaatttccaggttattgggaaattcaagaccaatcaatagaattatctggagataaactctctgggacagtgttcatcaagttgcagtgccctgtttgagtccgagttagtgttagtcggagatacagtgaagtctaaggaggatgaggaagagtgattggtgatagcagataaaagaaaaatgaatcagtgggataaatggagatgaccaagtttggcgagaagacaatactatgagagaaggtgtccagagacagagtgagacacagatataggaacaggatcctgggccttcctgctccaggaaaagcatggaaaaggcaagttgtgagggcagaagacagtcccacaagaacatgaaattcagtcatgcaaagggctgggaaggcagaaacacagtggtgagagtgagccagaaaggagatgtggggagcaaggactcatggcagagaaggccctggtaaccaagataagaaagtcaactgtgaaggtgaactaagaacacatgatggatgagtggaaaccaggggccagaaagtctttgaaggcagaagatacaaggcaatttgtgggcaggagggaaaaaagtagtgaaaatgtgcaggccaatgtgagaggggcctgtgatggcagagaggaggccaatgatgtgagtaaaaggagcactgcaggaaccggacccagtgtgacgttatga

SEQ ID NO: 123116 - DNA, 611 bp, Homo sapiens
  Payload ID: 4178
  Gene Symbol: CLECL1
  Gene Name: C-type lectin-like 1
  ENST ID: ENST00000621400
  CDS Start-End: 36-611
ggcagaaaactaactgaaaaacgagaacctactgtatggttagtaatttcttccatgtcatacaagtattcgagaaatctgctaccttgattagtaagactgaacacattggttttgtcatttattcatggaggaagtccaccacccacttggggagcagaaggaaatttgccatctcaatttacttatcagaagtttctttgcagaaatatgattgtcccttcagtgggacatcatttgtggtcttctctctctttttgatctgtgcaatggctggagatgtagtctacgctgacatcaaaactgttcggacttccccgttagaactcgcgtttccacttcagagatctgtttctttcaacttttctactgtccataaatcatgtcctgccaaagactggaaggtgcataagggaaaatgttactggattgctgaaactaagaaatcttggaacaaaagtcaaaatgactgtgccataaacaattcatatctcatggtgattcaagacattactgctatgctgatcacctttttgctgtaccttcaaatggcatttcttcaatgtgtgtacatctctgatgtctctgtgtatccaaatttcttcttgtaa

SEQ ID NO: 123117 - DNA, 54 bp, Homo sapiens
  Payload ID: 4179
  Gene Symbol:
  Gene Name: CU104787.1
  ENST ID: ENST00000623473
  CDS Start-End: 1-54
gctgcaggcagtgttcttctgtgtctgctcaccgagctgctccgagcccggctt

SEQ ID NO: 123118 - DNA, 12134 bp, Homo sapiens
  Payload ID: 4180
  Gene Symbol: CSMD1
  Gene Name: CUB and Sushi multiple domains 1
  ENST ID: ENST00000335551
  CDS Start-End: 1-8902
agaaattgaaaagggagggtgtggggatcctggaatccccgcctatgggaagcggacgggcagcagtttcctccatggagatacactcacctttgaatgcccggcggcctttgagctggtgggggagagagttatcacctgtcagcagaacaatcagtggtctggcaacaagcccagctgtgtattttcatgtttcttcaactttacggcatcatctgggattattctgtcaccaaattatccagaggaatatgggaacaacatgaactgtgtctggttgattatctcggagccaggaagtcgaattcacctaatctttaatgattttgatgttgagcctcagtttgactttctcgcggtcaaggatgatggcatttctgacataactgtcctgggtactttttctggcaatgaagtgccttcccagctggccagcagtgggcatatagttcgcttggaatttcagtctgaccattccactactggcagagggttcaacatcacttacaccacatttggtcagaatgagtgccatgatcctggcattcctataaacggacgacgttttggtgacaggtttctactcgggagctcggtttctttccactgtgatgatggctttgtcaagacccagggatccgagtccattacctgcatactgcaagacgggaacgtggtctggagctccaccgtgccccgctgtgaagctccatgtggtggacatctgacagcgtccagcggagtcattttgcctcctggatggccaggatattataaggattctttacattgtgaatggataattgaagcaaaaccaggccactctatcaaaataacttttgacagatttcagacagaggtcaattatgacaccttggaggtcagagatgggccagccagttcgtccccactgatcggcgagtaccacggcacccaggcaccccagttcctcatcagcaccgggaacttcatgtacctgctgttcaccactgacaacagccgctccagcatcggcttcctcatccactatgagagtgtgacgcttgagtcggattcctgcctggacccgggcatccctgtgaacggccatcgccacggtggagactttggcatcaggtccacagtgactttcagctgtgacccggggtacacactaagtgacgacgagcccctcgtctgtgagaggaaccaccagtggaaccacgccttgcccagctgcgacgctctatgtggaggctacatccaagggaagagtggaacagtcctttctcctgggtttccagatttttatccaaactctctaaactgcacgtggaccattgaagtgtctcatgggaaaggagttcaaatgatctttcacacctttcatcttgagagttcccacgactatttactgatcacagaggatggaagtttttccgagcccgttgccaggctcaccgggtcggtgttgcctcatacgatcaaggcaggcctgtttggaaacttcactgcccagcttcggtttatatcagacttctcaatttcgtacgagggcttcaatatcacattttcagaatatgacctggagccatgtgatgatcctggagtccctgccttcagccgaagaattggttttcactttggtgtgggagactctctgacgttttcctgcttcctgggatatcgtttagaaggtgccaccaagcttacctgcctgggtgggggccgccgtgtgtggagtgcacctctgccaaggtgtgtggccgaatgtggagcaagtgtcaaaggaaatgaaggaacattactgtctccaaattttccatccaattatgataataaccatgagtgtatctataaaatagaaacagaagccggcaagggcatccaccttagaacacgaagcttccagctgtttgaaggagatactctaaaggtatatgatggaaaagacagttcctcacgtccactgggcacgttcactaaaaatgaacttctggggctgatcctaaacagcacatccaatcacctgtggctagagttcaacaccaatggatctgacaccgaccaaggttttcaactcacctataccagttttgatctggtaaaatgtgaggatccgggcatccctaactacggctataggatccgtgatgaaggccactttaccgacactgtagttctgtacagttgcaacccggggtacgccatgcatggcagcaacaccctgacctgtttgagtggagacaggagagtgtgggacaaaccactaccttcgtgcatagcggaatgtggtggtcagatccatgcagccacatcaggacgaatattgtcccctggctatccagctccgtatgacaacaacctccactgcacctggattatagaggcagacccaggaaagaccattagcctccatttcattgttttcgacacggagatggctcacgacatcctcaaggtctgggacgggccggtggacagtgacatcctgctgaaggagtggagtggctccgcccttccggaggacatccacagcaccttcaactcactcaccctgcagttcgacagcgacttcttcatcagcaagtctggcttctccatccagttctccacctcaattgcagccacctgtaacgatccaggtatgccccaaaatggcacccgctatggagacagcagagaggctggagacaccgtcacattccagtgtgaccctggctatcagctccaaggacaagccaaaatcacctgtgtgcagctgaataaccggttcttttggcaaccagaccctcctacatgcatagctgcttgtggagggaatctgacgggcccagcaggtgttattttgtcacccaactacccacagccgtatcctcctgggaaggaatgtgactggagagtaaaagtgaacccggactttgtcatcgccttgatattcaaaagtttcaacatggagcccagctatgacttcctacacatctatgaaggggaagattccaacagccccctcattgggagttaccagggctctcaggccccagaaagaatagagagtagcggaaacagcctgtttctggcatttcggagtgatgcctccgtgggcctttcagggttcgccattgaatttaaagagaaaccacgggaagcttgttttgacccaggaaatataatgaatgggacaagagttggaacagacttcaagcttggctccaccatcacctaccagtgtgactctggctataagattcttgacccctcatccatcacctgtgtgattggggctgatgggaaaccctcctgggaccaagtgctgccctcctgcaatgctccctgtggaggccagtacacgggatcagaaggggtagttttatcaccaaactacccccataattacacagctggtcaaatatgcctctattccatcacggtaccaaaggaattcgtggtctttggacagtttgcctatttccagacagccctgaatgatttggcagaattatttgatggaacccatgcacaggccagacttctcagctcactctcggggtctcactcaggggaaacattgcccttggctacgtcaaatcaaattctgctccgattcagtgcaaagagcggtgcctctgcccgcggcttccacttcgtgtatcaagctgttcctcgtaccagtgacacccaatgcagctctgtccccgagcccagatacggaaggagaattggttctgagttttctgccggctccatcgtccgattcgagtgcaacccgggatacctgcttcagggttccacggcgctccactgccagtccgtgcccaacgccttggcacagtggaacgacacgatccccagctgtgtggtaccctgcagtggcaatttcactcaacgaagaggtacaatcctgtcccccggctaccctgagccatacggaaacaacttgaactgtatatggaagatcatagttacggagggctcgggaattcagatccaagtgatcagttttgccacggagcagaactgggactcccttgagatccacgatggtggggatgtgaccgcacccagactgggaagcttctcaggcaccacagtaccggcactgctgaacagtacttccaaccaactctacctgcatttccagtctgacattagtgtggcagctgctggtttccacctggaatacaaaactgtaggtcttgctgcatgccaagaaccagccctccccagcaacagcatcaaaatcggagatcggtacatggtgaacgacgtgctctccttccagtgcgagcccgggtacaccctgcagggccgttcccacatttcctgtatgccagggaccgttcgccgttggaactatccgtctcccctgtgcattgcaacctgtggagggacgctgagcaccttgggtggtgtgatcctgagccccggcttcccaggttcttaccccaacaacttagactgcacctggaggatctcattacccatcggctatggtgcacatattcagtttctgaatttttctaccgaagctaatcatgacttccttgaaattcaaaatggaccttaccacaccagccccatgattggacaatttagcggcacggatctccccgcggccctgctgagcacaacgcatgaaaccctcatccacttttatagtgaccattcgcaaaaccggcaaggatttaaacttgcttaccaagcctatgaattacagaactgtccagatccacccccatttcagaatgggtacatgatcaactcggattacagcgtggggcaatcagtatctttcgagtgttatcctgggtacattctaataggccatcctgtcctcacttgtcagcatgggatcaacagaaactggaactacccttttccaagatgtgatgccccttgtgggtacaacgtaacttctcagaacggcaccatctactcccctggctttcctgatgagtatccgatcctgaaggactgcatttggctcatcacggtgcctccagggcacggagtttacatcaacttcaccctgttacagacggaagctgtcaacgattacattgctgtttgggacggtcccgatcagaactcaccccagctgggagttttcagtggcaacacagccctcgaaacggcgtatagctccaccaaccaagtcctgctcaagttccacagcgacttttcaaatggaggcttctttgtcctcaatttccacgcatttcagctcaagaaatgtcaacctcccccagcggttccacaggcagaaatgcttactgaggatgatgatttcgaaataggagattttgtgaagtaccagtgccaccccgggtacaccttggtggggaccgacattctgacttgcaagctcagttcccagttgcagtttgagggttctctcccaacatgtgaaggttcttctgggcaaagtcctctgctagtagtcttaagtgggaatcatactgaacaatcaaattttacaagcaggagtaatcagttatatctccgctggtccactgaccatgccaccagtaagaaaggattcaagattcgctatgcagcaccttactgcagtttgacccaccccctgaagaatgggggtattctaaacaggactgcaggagcggttggaagcaaagtgcattatttttgcaagcctggataccgaatggtcggccacagcaatgcaacctgtagacgaaacccacttggcatgtaccagtgggactccctcacgccactctgccaggctgtgtcctgtggaatcccagaatccccaggaaacggttcatttaccgggaacgagttcactttggacagtaaagtggtctatgaatgtcatgagggcttcaagcttgaatccagccagcaagcaacagccgtgtgtcaagaagatgggttgtggagtaacaaggggaagccgcccacgtgtaagccggtcgcttgccccagcattgaagctcagctctcagaacatgtcatctggaggctggtttcaggatccttgaatgagtacggtgctcaagtattgctgagctgcagtcctggttactacttagaaggctggaggctcctgcggtgccaggccaatgggacgtggaacataggagatgagaggccaagctgtcgagttatctcgtgtggaagcctttcctttcccccaaatggcaacaagattggaacgttgacagtttatggggccacagctatatttacgtgcaacaccggctacacgcttgtggggtctcatgtcagagagtgcttggcaaatgggctctggagcggcagcgaaactcgatgtctggctggccactgcggttccccagacccgattgtgaacggtcacattagtggagatggcttcagttacagagacacggtggtttaccagtgcaatcctggtttccggcttgtgggaacttccgtgaggatatgcctgcaagaccacaagtggtctggacaaacgcctgtctgtgtccccatcacatgtggtcaccctggaaaccctgcccacggattcactaatggcagtgagttcaacctgaatgatgtcgtgaatttcacctgcaacacgggctatttgctgcagggcgtgtctcgagcccagtgtcggagcaacggccagtggagtagccctctgcccacgtgtcgagtggtgaactgttctgatccaggctttgtggaaaatgccattcgtcacgggcaacagaacttccctgagagttttgagtatggaatgagtatcctgtaccattgcaagaagggattttacttgctgggatcttcagccttgacctgtatggcaaatggcttatgggaccgatccctgcccaagtgtttggctatatcgtgtggacacccaggggtccctgccaacgccgtcctcactggagagctgtttacctatggcgccgtcgtgcactactcctgcagagggagcgagagcctcataggcaacgacacgagagtgtgccaggaagacagtcactggagcggggcactgccccactgcacaggaaataatcctggattctgtggtgatccggggaccccagcacatgggtctcggcttggtgatgactttaagacaaagagtcttctccgcttctcctgtgaaatggggcaccagctgaggggctcccctgaacgcacgtgtttgctcaatgggtcatggtcaggactgcagccggtgtgtgaggccgtgtcctgtggcaaccctggcacacccaccaacggaatgattgtcagtagtgatggcattctgttctccagctcggtcatctatgcctgctgggaaggctacaagacctcagggctcatgacacggcattgcacagccaatgggacctggacaggcactgctcccgactgcacaattataagttgtggggatccaggcacactagcaaatggcatccagtttgggaccgacttcaccttcaacaagactgtgagctatcagtgtaacccaggctatgtcatggaagcagtcacatccgccactattcgctgtaccaaagacggcaggtggaatccgagcaaacctgtctgcaaagccgtgctgtgtcctcagccgccgccggtgcagaatggaacagtggagggaagtgatttccgctggggctccagcataagttacagctgcatggacggttaccagctctctcactccgccatcctctcctgtgaaggtcgcggggtgtggaaaggagagatcccccagtgtctccctgtgttctgcggagaccctggcatccccgcagaagggcgacttagtgggaaaagtttcacctataagtccgaagtcttcttccagtgcaaatctccatttatactcgtgggatcctccagaagagtctgccaagctgacggcacgtggagcggcatacaacccacctgcattgatcctgctcataacacctgcccagaccctggtacgccacactttggaatacagaatagctccagaggctatgaggttggaagcacggtttttttcaggtgcagaaaaggctaccatattcaaggttccacgactcgcacctgccttgccaatttaacatggagtgggatacagaccgaatgtatacctcatgcctgcagacagccagaaaccccggcacacgcggatgtgagagccatcgatcttcctactttcggctacaccttagtgtacacctgccatccaggctttttcctcgcagggggatctgagcacagaacatgtaaagcagacatgaaatggacaggaaagtcgcctgtgtgtaaaattccttcagatgtctttttcgtcaattcactgtggaaggggtattatgaatatttagggaaaagacaacccgccactctaactgttgactggttcaatgcaacaagcagtaaggtgaatgccaccttcagcgaagcctcgccagtggagctgaagttgacaggcatttacaagaaggaggaggcccacttactcctgaaagcttttcaaattaaaggccaggcagatatttttgtaagcaagttcgaaaatgacaactggggactagatggttatgtgtcatctggacttgaaagaggaggatttacttttcaaggtgacattcatggaaaagactttggaaaatttaagctagaaaggcaagatcctttaaacccagatcaagactcttccagtcattaccacggcaccagcagtggctctgtggcggctgccattctggttcctttctttgctctaattttatcagggtttgcattttacctctacaaacacagaacgagaccaaaagttcaatacaatggctatgctgggcatgaaaacagcaatggacaagcatcgtttgaaaaccccatgtatgatacaaacttaaaacccacagaagccaaggctgtgaggtttgacacaactctgaacacagtctgtacagtggtatagccctcagtgccccaacaggactgattcatagccatacctctgatggacaagcagtgattcctttggtgccatataccactctcccttccactctggctttactgcagcgatcttcaaccttgtctactggcataagtgcagcggggatctctactcaaatgtgtcagggtcttctacggatcaaactacacatgcgttttcattccaaaagtgggttctaaatgcctggctgcatctgtatgaaatcaaggcacactccaggaagactgccacgtcgcgccaacacgtcatactcaatgcctcagactttcatatttctgtgttgctgagatgcctttcaatgcaatcgtctgggctcgtggatatgtccctcaggtgcggtgacagaatggtggcaccacgatatgtgttctcttgtgttgtttttcctttttaaacccccatgaacacgaatactctgaaaaaaataaaaagctttctggaagaagacacctttctgatagaggctcacacctacaaatgcttcactctgtccttccgagacctgacaagctttgaggacctcacagctcccctgtgtgttcatctctagggatgtttgcaatttcccagtcagctgttctgtcgcagaatgtttaatgcacaattttttgcactagtgtgttatgaatgactaagattctgataaaaaaaataaattatttacacagggtttatacacactatccattgtatataagcattatttcatattatcaagctaaacattcccccatcagcttagttggagtgttagggaaaagtattcctagatatggcacagattttaaaaggaaatacagtattgaagagatttattttattattgcttcaattagctccatttacgtgttgaattcattgaagaggtccaatgagaaaaaaacagaagcctccttatttcacacgttttcctcctttagtaccatcctcatccaattactgtctctctgatactacttaatagcagggggtttgcagaaatttctgtttgccatgtaaaactgtgaatagtaatttattttagatagtcgatgaacttgtgggttttagctcacaatgcagccttcccttttgcagtgttttttttttgtttttttttttttttgtcttttactgtgccatcgatctttgatattgcattgaaagacaatataccacagtagcaccttgaactcagtgaaaattgttcaggatcaaaataccaagtgttcttttagagggaaggaaaaagtacacacactctcctctcacaatgatatattttatacattcatttgttatttgtttcatgctttatgattccagatggaaaggtaatttcagtgacttttcaagtttaaattccattataggtaaatgataagttatgatgcaaataaaatctataagatccccagggcaaataaaaatcaaaacatgaagtagaagatgtggccgtgaggtagtttatgtaacaaattcaaagtgaaaatcatgtttacttttacttatacttatttgataaaaatatttttgaaacgatagtacttattttattatttgatatttcagttcctattcaattgtggcagattttctctgtttcacattttagattggcgttggtaatagaaatgtcagaatgttcaaattggccttcacgttgtcggagtgaacacattgacacctagctttaagactgatttatctgttggtgtactgaaggtttccatgtaggacttcaaatgtggaaaaggaaaagcagtcaggaaaatggggcattctttggagagtcacgcgttttgattcggacatttccgtagagctcggctcccagtgttgtgttcctcggtcgaaagggtctctgctgtttggggactcactggcctctcctagggactcctttgtcttgtgaaccccacgctgttggattctgtatcattatgctgaattctctgcacagttttccctggccaacctgcccacatccttggagatttgctttgccagtgggaatccttacattgctgtttcacagtagacgggacgaggtcagcgggagtcgtgctcctaacacacacattgaacgaaacagaagatgattgaaagtgtgaggaggctcgtgtgcaagggagaacagggttactatacatattagtgtatatatatacatacatatatatatatatatattgtacatatctaagtttgagtcattcaaactaggtgcaaaatgctgacttcagagtctgaattaacatctctgttcccatatccctgacctgctccctggtcaacgatgctatgaaatcctgaaatgacaggacatacatacatacaagaaaccacatatcaaattagatatgattttcctttgtgtgcaaagtcaaactgtcctagggttgccagtttgaagcatgttatttaaatgaaaaaaaaaatcagtgaaattctcgtgtgagaattctgcctagtttcttcctaaggttgtgtgcagtgttgaacggcgtctccgcaaggtgttggaggatctcattttagggcagtcaggagctgtgcttgctgagttaggtctagaagactcttccctgaaggcaacgggaacacgcgtgagggacgcgaccacacactaacagaggacacgtgcttcagagctgtttaaaactgctgcttgttttacacacacatcttgccttttttcaggctagctgcaataatttttttcttctgtaaaatattttgtaaacaacaacaaaaagctattataaaaagggggtaaaaaaaagaacgctggcattatgatcaggaaaacccattgtcatcgccgaccctccctcccgtcccaccacacgctgctgtcacgacgtaggtgcgaaagacctttttgtacagagatatattttttatgaagaatttgtaaaattattaaatatgctgtaattttttgattaatgtaggtacattgttaaaaaataaatgtttttacaatacagaactgtaattttcccaataatgtaaaatgtaccatctctagctgattttcagttccaatcctattacacatgtattaatattaaagtggcctgttaaaatgaacagtatcttttttttgtcaaaaaaattataaagagggtgtaatatagcctgtgcaatgccaccaatctttaaagcaaatcagagttctaattaaatatttaattttagatttcta

SEQ ID NO: 123119 - DNA, 10938 bp, Homo sapiens
  Payload ID: 4180
  Gene Symbol: CSMD1
  Gene Name: CUB and Sushi multiple domains 1
  ENST ID: ENST00000400186
  CDS Start-End: 286-10452
ccttcctgcccggctcggccggcgctcgtccccggccccggccccgccagcccgggtctccgcgctcggagcagctcagccctgcagtggctcgggacccgatgctatgagagggaagcgagccgggcgcccagaccttcaggaggcgtcggatgcgcggcgggtcttgggaccgggctctctctccggctcgccttgccctcgggtgattatttggctccgctcatagccctgccttcctcggaggagccatcggtgtcgcgtgcgtgtggagtatctgcagacatgactgcgtggaggagattccagtcgctgctcctgcttctcgggctgctggtgctgtgcgcgaggctcctcactgcagcgaagggtcagaactgtggaggcttagtccagggtcccaatggcactattgagagcccagggtttcctcacgggtatccgaactatgccaactgcacctggatcatcatcacgggcgagcgcaataggatacagttgtccttccatacctttgctcttgaagaagattttgatattttatcagtttacgatggacagcctcaacaagggaatttaaaagtgagattatcgggatttcagctgccctcctctatagtgagtacaggatctatcctcactctgtggttcacgacagacttcgctgtgagtgcccaaggtttcaaagcattatatgaagttttacctagccacacttgtggaaatcctggagaaatcctgaaaggagttctgcatggaacgagattcaacataggagacaaaatccggtacagctgcctccctggctacatcttggaaggccacgccatcctgacctgcatcgtcagcccaggaaatggtgcatcgtgggacttcccagctcccttttgcagagctgagggagcctgcggaggaaccttacgcgggaccagcagctccatctccagcccgcacttcccttcagagtacgagaacaacgcggactgcacctggaccattctggctgagcccggggacaccattgcgctggtcttcactgactttcagctagaagaaggatatgatttcttagagatcagtggcacggaagctccatccatatggctaactggcatgaacctcccctctccagttatcagtagcaagaattggctacgactccatttcacctctgacagcaaccaccgacgcaaaggatttaacgctcagttccaagtgaaaaaggcgattgagttgaagtcaagaggagtcaagatgctgcccagcaaggatggaagccataaaaactctgtcttgagccaaggaggtgttgcattggtctctgacatgtgtccagatcctgggattccagaaaatggtagaagagcaggttccgacttcagtagggttggtgcaaatgtacagttttcatgtgaggacaattacgtgctccagggatctaaaagcatcacctgtcagagagttacagagacgctcgctgcttggagtgaccacaggcccatctgccgagcgagaacatgtggatccaatctgcgtgggcccagcggcgtcattacctcccctaattatccggttcagtatgaagataatgcacactgtgtgtgggtcatcaccaccaccgacccggacaaggtcatcaagcttgcctttgaagagtttgagctggagcgaggctatgacaccctgacggttggtgatgctgggaaggtgggagacaccagatcggtcttgtacgtgctcacgggatccagtgttcctgacctcattgtgagcatgagcaaccagatgtggctacatctgcagtcggatgatagcattggctcacctgggtttaaagctgtttaccaagaaattgaaaagggagggtgtggggatcctggaatccccgcctatgggaagcggacgggcagcagtttcctccatggagatacactcacctttgaatgcccggcggcctttgagctggtgggggagagagttatcacctgtcagcagaacaatcagtggtctggcaacaagcccagctgtgtattttcatgtttcttcaactttacggcatcatctgggattattctgtcaccaaattatccagaggaatatgggaacaacatgaactgtgtctggttgattatctcggagccaggaagtcgaattcacctaatctttaatgattttgatgttgagcctcagtttgactttctcgcggtcaaggatgatggcatttctgacataactgtcctgggtactttttctggcaatgaagtgccttcccagctggccagcagtgggcatatagttcgcttggaatttcagtctgaccattccactactggcagagggttcaacatcacttacaccacatttggtcagaatgagtgccatgatcctggcattcctataaacggacgacgttttggtgacaggtttctactcgggagctcggtttctttccactgtgatgatggctttgtcaagacccagggatccgagtccattacctgcatactgcaagacgggaacgtggtctggagctccaccgtgccccgctgtgaagctccatgtggtggacatctgacagcgtccagcggagtcattttgcctcctggatggccaggatattataaggattctttacattgtgaatggataattgaagcaaaaccaggccactctatcaaaataacttttgacagatttcagacagaggtcaattatgacaccttggaggtcagagatgggccagccagttcgtccccactgatcggcgagtaccacggcacccaggcaccccagttcctcatcagcaccgggaacttcatgtacctgctgttcaccactgacaacagccgctccagcatcggcttcctcatccactatgagagtgtgacgcttgagtcggattcctgcctggacccgggcatccctgtgaacggccatcgccacggtggagactttggcatcaggtccacagtgactttcagctgtgacccggggtacacactaagtgacgacgagcccctcgtctgtgagaggaaccaccagtggaaccacgccttgcccagctgcgacgctctatgtggaggctacatccaagggaagagtggaacagtcctttctcctgggtttccagatttttatccaaactctctaaactgcacgtggaccattgaagtgtctcatgggaaaggagttcaaatgatctttcacacctttcatcttgagagttcccacgactatttactgatcacagaggatggaagtttttccgagcccgttgccaggctcaccgggtcggtgttgcctcatacgatcaaggcaggcctgtttggaaacttcactgcccagcttcggtttatatcagacttctcaatttcgtacgagggcttcaatatcacattttcagaatatgacctggagccatgtgatgatcctggagtccctgccttcagccgaagaattggttttcactttggtgtgggagactctctgacgttttcctgcttcctgggatatcgtttagaaggtgccaccaagcttacctgcctgggtgggggccgccgtgtgtggagtgcacctctgccaaggtgtgtggccgaatgtggagcaagtgtcaaaggaaatgaaggaacattactgtctccaaattttccatccaattatgataataaccatgagtgtatctataaaatagaaacagaagccggcaagggcatccaccttagaacacgaagcttccagctgtttgaaggagatactctaaaggtatatgatggaaaagacagttcctcacgtccactgggcacgttcactaaaaatgaacttctggggctgatcctaaacagcacatccaatcacctgtggctagagttcaacaccaatggatctgacaccgaccaaggttttcaactcacctataccagttttgatctggtaaaatgtgaggatccgggcatccctaactacggctataggatccgtgatgaaggccactttaccgacactgtagttctgtacagttgcaacccggggtacgccatgcatggcagcaacaccctgacctgtttgagtggagacaggagagtgtgggacaaaccactaccttcgtgcatagcggaatgtggtggtcagatccatgcagccacatcaggacgaatattgtcccctggctatccagctccgtatgacaacaacctccactgcacctggattatagaggcagacccaggaaagaccattagcctccatttcattgttttcgacacggagatggctcacgacatcctcaaggtctgggacgggccggtggacagtgacatcctgctgaaggagtggagtggctccgcccttccggaggacatccacagcaccttcaactcactcaccctgcagttcgacagcgacttcttcatcagcaagtctggcttctccatccagttctccacctcaattgcagccacctgtaacgatccaggtatgccccaaaatggcacccgctatggagacagcagagaggctggagacaccgtcacattccagtgtgaccctggctatcagctccaaggacaagccaaaatcacctgtgtgcagctgaataaccggttcttttggcaaccagaccctcctacatgcatagctgcttgtggagggaatctgacgggcccagcaggtgttattttgtcacccaactacccacagccgtatcctcctgggaaggaatgtgactggagagtaaaagtgaacccggactttgtcatcgccttgatattcaaaagtttcaacatggagcccagctatgacttcctacacatctatgaaggggaagattccaacagccccctcattgggagttaccagggctctcaggccccagaaagaatagagagtagcggaaacagcctgtttctggcatttcggagtgatgcctccgtgggcctttcagggttcgccattgaatttaaagagaaaccacgggaagcttgttttgacccaggaaatataatgaatgggacaagagttggaacagacttcaagcttggctccaccatcacctaccagtgtgactctggctataagattcttgacccctcatccatcacctgtgtgattggggctgatgggaaaccctcctgggaccaagtgctgccctcctgcaatgctccctgtggaggccagtacacgggatcagaaggggtagttttatcaccaaactacccccataattacacagctggtcaaatatgcctctattccatcacggtaccaaaggaattcgtggtctttggacagtttgcctatttccagacagccctgaatgatttggcagaattatttgatggaacccatgcacaggccagacttctcagctcactctcggggtctcactcaggggaaacattgcccttggctacgtcaaatcaaattctgctccgattcagtgcaaagagcggtgcctctgcccgcggcttccacttcgtgtatcaagctgttcctcgtaccagtgacacccaatgcagctctgtccccgagcccagatacggaaggagaattggttctgagttttctgccggctccatcgtccgattcgagtgcaacccgggatacctgcttcagggttccacggcgctccactgccagtccgtgcccaacgccttggcacagtggaacgacacgatccccagctgtgtggtaccctgcagtggcaatttcactcaacgaagaggtacaatcctgtcccccggctaccctgagccatacggaaacaacttgaactgtatatggaagatcatagttacggagggctcgggaattcagatccaagtgatcagttttgccacggagcagaactgggactcccttgagatccacgatggtggggatgtgaccgcacccagactgggaagcttctcaggcaccacagtaccggcactgctgaacagtacttccaaccaactctacctgcatttccagtctgacattagtgtggcagctgctggtttccacctggaatacaaaactgtaggtcttgctgcatgccaagaaccagccctccccagcaacagcatcaaaatcggagatcggtacatggtgaacgacgtgctctccttccagtgcgagcccgggtacaccctgcagggccgttcccacatttcctgtatgccagggaccgttcgccgttggaactatccgtctcccctgtgcattgcaacctgtggagggacgctgagcaccttgggtggtgtgatcctgagccccggcttcccaggttcttaccccaacaacttagactgcacctggaggatctcattacccatcggctatggtgcacatattcagtttctgaatttttctaccgaagctaatcatgacttccttgaaattcaaaatggaccttaccacaccagccccatgattggacaatttagcggcacggatctccccgcggccctgctgagcacaacgcatgaaaccctcatccacttttatagtgaccattcgcaaaaccggcaaggatttaaacttgcttaccaagcctatgaattacagaactgtccagatccacccccatttcagaatgggtacatgatcaactcggattacagcgtggggcaatcagtatctttcgagtgttatcctgggtacattctaataggccatcctgtcctcacttgtcagcatgggatcaacagaaactggaactacccttttccaagatgtgatgccccttgtgggtacaacgtaacttctcagaacggcaccatctactcccctggctttcctgatgagtatccgatcctgaaggactgcatttggctcatcacggtgcctccagggcacggagtttacatcaacttcaccctgttacagacggaagctgtcaacgattacattgctgtttgggacggtcccgatcagaactcaccccagctgggagttttcagtggcaacacagccctcgaaacggcgtatagctccaccaaccaagtcctgctcaagttccacagcgacttttcaaatggaggcttctttgtcctcaatttccacgcatttcagctcaagaaatgtcaacctcccccagcggttccacaggcagaaatgcttactgaggatgatgatttcgaaataggagattttgtgaagtaccagtgccaccccgggtacaccttggtggggaccgacattctgacttgcaagctcagttcccagttgcagtttgagggttctctcccaacatgtgaagcacaatgcccagcaaatgaagtccggactggatcatcgggagtcattctcagtccagggtatccgggtaattattttaactcccagacttgctcttggagtattaaagtggaaccaaactacaacattaccatctttgtggacacatttcaaagtgaaaagcagtttgatgcactggaagtgtttgatggttcttctgggcaaagtcctctgctagtagtcttaagtgggaatcatactgaacaatcaaattttacaagcaggagtaatcagttatatctccgctggtccactgaccatgccaccagtaagaaaggattcaagattcgctatgcagcaccttactgcagtttgacccaccccctgaagaatgggggtattctaaacaggactgcaggagcggttggaagcaaagtgcattatttttgcaagcctggataccgaatggtcggccacagcaatgcaacctgtagacgaaacccacttggcatgtaccagtgggactccctcacgccactctgccaggctgtgtcctgtggaatcccagaatccccaggaaacggttcatttaccgggaacgagttcactttggacagtaaagtggtctatgaatgtcatgagggcttcaagcttgaatccagccagcaagcaacagccgtgtgtcaagaagatgggttgtggagtaacaaggggaagccgcccacgtgtaagccggtcgcttgccccagcattgaagctcagctctcagaacatgtcatctggaggctggtttcaggatccttgaatgagtacggtgctcaagtattgctgagctgcagtcctggttactacttagaaggctggaggctcctgcggtgccaggccaatgggacgtggaacataggagatgagaggccaagctgtcgagctggccactgcggttccccagacccgattgtgaacggtcacattagtggagatggcttcagttacagagacacggtggtttaccagtgcaatcctggtttccggcttgtgggaacttccgtgaggatatgcctgcaagaccacaagtggtctggacaaacgcctgtctgtgtccccatcacatgtggtcaccctggaaaccctgcccacggattcactaatggcagtgagttcaacctgaatgatgtcgtgaatttcacctgcaacacgggctatttgctgcagggcgtgtctcgagcccagtgtcggagcaacggccagtggagtagccctctgcccacgtgtcgagtggtgaactgttctgatccaggctttgtggaaaatgccattcgtcacgggcaacagaacttccctgagagttttgagtatggaatgagtatcctgtaccattgcaagaagggattttacttgctgggatcttcagccttgacctgtatggcaaatggcttatgggaccgatccctgcccaagtgtttggctatatcgtgtggacacccaggggtccctgccaacgccgtcctcactggagagctgtttacctatggcgccgtcgtgcactactcctgcagagggagcgagagcctcataggcaacgacacgagagtgtgccaggaagacagtcactggagcggggcactgccccactgcacaggaaataatcctggattctgtggtgatccggggaccccagcacatgggtctcggcttggtgatgactttaagacaaagagtcttctccgcttctcctgtgaaatggggcaccagctgaggggctcccctgaacgcacgtgtttgctcaatgggtcatggtcaggactgcagccggtgtgtgaggccgtgctgtgtcctcagccgccgccggtgcagaatggaacagtggagggaagtgatttccgctggggctccagcataagttacagctgcatggacggttaccagctctctcactccgccatcctctcctgtgaaggtcgcggggtgtggaaaggagagatcccccagtgtctccctgtgttctgcggagaccctggcatccccgcagaagggcgacttagtgggaaaagtttcacctataagtccgaagtcttcttccagtgcaaatctccatttatactcgtgggatcctccagaagagtctgccaagctgacggcacgtggagcggcatacaacccacctgcattgatcctgctcataacacctgcccagaccctggtacgccacactttggaatacagaatagctccagaggctatgaggttggaagcacggtttttttcaggtgcagaaaaggctaccatattcaaggttccacgactcgcacctgccttgccaatttaacatggagtgggatacagaccgaatgtatacctcatgcctgcagacagccagaaaccccggcacacgcggatgtgagagccatcgatcttcctactttcggctacaccttagtgtacacctgccatccaggctttttcctcgcagggggatctgagcacagaacatgtaaagcagacatgaaatggacaggaaagtcgcctgtgtgtaaaagtaaaggagtgagagaagttaatgaaacagttactaaaactccagttccttcagatgtctttttcgtcaattcactgtggaaggggtattatgaatatttagggaaaagacaacccgccactctaactgttgactggttcaatgcaacaagcagtaaggtgaatgccaccttcagcgaagcctcgccagtggagctgaagttgacaggcatttacaagaaggaggaggcccacttactcctgaaagcttttcaaattaaaggccaggcagatatttttgtaagcaagttcgaaaatgacaactggggactagatggttatgtgtcatctggacttgaaagaggaggatttacttttcaaggtgacattcatggaaaagactttggaaaatttaagctagaaaggcaagatcctttaaacccagatcaagactcttccagtcattaccacggcaccagcagtggctctgtggcggctgccattctggttcctttctttgctctaattttatcagggtttgcattttacctctacaaacacagaacgagaccaaaagttcaatacaatggctatgctgggcatgaaaacagcaatggacaagcatcgtttgaaaaccccatgtatgatacaaacttaaaacccacagaagccaaggctgtgaggtttgacacaactctgaacacagtctgtacagtggtatagccctcagtgccccaacaggactgattcatagccatacctctgatggacaagcagtgattcctttggtgccatataccactctcccttccactctggctttactgcagcgatcttcaaccttgtctactggcataagtgcagcggggatctctactcaaatgtgtcagggtcttctacggatcaaactacacatgcgttttcattccaaaagtgggttctaaatgcctggctgcatctgtatgaaatcaaggcacactccaggaagactgccacgtcgcgccaacacgtcatactcaatgcctcagactttcatatttctgtgttgctgagatgcctttcaatgcaatcgtctgggctcgtggatatgtccctcaggtgcggtgacagaatggtggcaccacgatatgtgttctcttgtgttgtttttcctttttaaacccccatgaacacgaatactctgaaaaaaataaaaagctttctggaaga

SEQ ID NO: 123120 - DNA, 11740 bp, Homo sapiens
  Payload ID: 4180
  Gene Symbol: CSMD1
  Gene Name: CUB and Sushi multiple domains 1
  ENST ID: ENST00000520002
  CDS Start-End: 557-11254
gactgcgccgtgcccagcctcggtcccctctctgtgggtaaggatggttgagtccagcctccacggcagcggctccttgtgccactagcagcccttcttctgcgctctccgccttttctctctagactggatctctcctcccccccgcgcccccctccccgcatctcccactcgctggctctctctccagctgcctcctctccaggtctctcctggctgcgcgcgctcctctccccgcttctccccctcccgcagcctcgccgccttggtgccttcctgcccggctcggccggcgctcgtccccggccccggccccgccagcccgggtctccgcgctcggagcagctcagccctgcagtggctcgggacccgatgctatgagagggaagcgagccgggcgcccagaccttcaggaggcgtcggatgcgcggcgggtcttgggaccgggctctctctccggctcgccttgccctcgggtgattatttggctccgctcatagccctgccttcctcggaggagccatcggtgtcgcgtgcgtgtggagtatctgcagacatgactgcgtggaggagattccagtcgctgctcctgcttctcgggctgctggtgctgtgcgcgaggctcctcactgcagcgaagggtcagaactgtggaggcttagtccagggtcccaatggcactattgagagcccagggtttcctcacgggtatccgaactatgccaactgcacctggatcatcatcacgggcgagcgcaataggatacagttgtccttccatacctttgctcttgaagaagattttgatattttatcagtttacgatggacagcctcaacaagggaatttaaaagtgagattatcgggatttcagctgccctcctctatagtgagtacaggatctatcctcactctgtggttcacgacagacttcgctgtgagtgcccaaggtttcaaagcattatatgaagttttacctagccacacttgtggaaatcctggagaaatcctgaaaggagttctgcatggaacgagattcaacataggagacaaaatccggtacagctgcctccctggctacatcttggaaggccacgccatcctgacctgcatcgtcagcccaggaaatggtgcatcgtgggacttcccagctcccttttgcagagctgagggagcctgcggaggaaccttacgcgggaccagcagctccatctccagcccgcacttcccttcagagtacgagaacaacgcggactgcacctggaccattctggctgagcccggggacaccattgcgctggtcttcactgactttcagctagaagaaggatatgatttcttagagatcagtggcacggaagctccatccatatggctaactggcatgaacctcccctctccagttatcagtagcaagaattggctacgactccatttcacctctgacagcaaccaccgacgcaaaggatttaacgctcagttccaagtgaaaaaggcgattgagttgaagtcaagaggagtcaagatgctgcccagcaaggatggaagccataaaaactctgtcttgagccaaggaggtgttgcattggtctctgacatgtgtccagatcctgggattccagaaaatggtagaagagcaggttccgacttcagtagggttggtgcaaatgtacagttttcatgtgaggacaattacgtgctccagggatctaaaagcatcacctgtcagagagttacagagacgctcgctgcttggagtgaccacaggcccatctgccgagcgagaacatgtggatccaatctgcgtgggcccagcggcgtcattacctcccctaattatccggttcagtatgaagataatgcacactgtgtgtgggtcatcaccaccaccgacccggacaaggtcatcaagcttgcctttgaagagtttgagctggagcgaggctatgacaccctgacggttggtgatgctgggaaggtgggagacaccagatcggtcttgtacgtgctcacgggatccagtgttcctgacctcattgtgagcatgagcaaccagatgtggctacatctgcagtcggatgatagcattggctcacctgggtttaaagctgtttaccaagaaattgaaaagggagggtgtggggatcctggaatccccgcctatgggaagcggacgggcagcagtttcctccatggagatacactcacctttgaatgcccggcggcctttgagctggtgggggagagagttatcacctgtcagcagaacaatcagtggtctggcaacaagcccagctgtgtattttcatgtttcttcaactttacggcatcatctgggattattctgtcaccaaattatccagaggaatatgggaacaacatgaactgtgtctggttgattatctcggagccaggaagtcgaattcacctaatctttaatgattttgatgttgagcctcagtttgactttctcgcggtcaaggatgatggcatttctgacataactgtcctgggtactttttctggcaatgaagtgccttcccagctggccagcagtgggcatatagttcgcttggaatttcagtctgaccattccactactggcagagggttcaacatcacttacaccacatttggtcagaatgagtgccatgatcctggcattcctataaacggacgacgttttggtgacaggtttctactcgggagctcggtttctttccactgtgatgatggctttgtcaagacccagggatccgagtccattacctgcatactgcaagacgggaacgtggtctggagctccaccgtgccccgctgtgaagctccatgtggtggacatctgacagcgtccagcggagtcattttgcctcctggatggccaggatattataaggattctttacattgtgaatggataattgaagcaaaaccaggccactctatcaaaataacttttgacagatttcagacagaggtcaattatgacaccttggaggtcagagatgggccagccagttcgtccccactgatcggcgagtaccacggcacccaggcaccccagttcctcatcagcaccgggaacttcatgtacctgctgttcaccactgacaacagccgctccagcatcggcttcctcatccactatgagagtgtgacgcttgagtcggattcctgcctggacccgggcatccctgtgaacggccatcgccacggtggagactttggcatcaggtccacagtgactttcagctgtgacccggggtacacactaagtgacgacgagcccctcgtctgtgagaggaaccaccagtggaaccacgccttgcccagctgcgacgctctatgtggaggctacatccaagggaagagtggaacagtcctttctcctgggtttccagatttttatccaaactctctaaactgcacgtggaccattgaagtgtctcatgggaaaggagttcaaatgatctttcacacctttcatcttgagagttcccacgactatttactgatcacagaggatggaagtttttccgagcccgttgccaggctcaccgggtcggtgttgcctcatacgatcaaggcaggcctgtttggaaacttcactgcccagcttcggtttatatcagacttctcaatttcgtacgagggcttcaatatcacattttcagaatatgacctggagccatgtgatgatcctggagtccctgccttcagccgaagaattggttttcactttggtgtgggagactctctgacgttttcctgcttcctgggatatcgtttagaaggtgccaccaagcttacctgcctgggtgggggccgccgtgtgtggagtgcacctctgccaaggtgtgtggccgaatgtggagcaagtgtcaaaggaaatgaaggaacattactgtctccaaattttccatccaattatgataataaccatgagtgtatctataaaatagaaacagaagccggcaagggcatccaccttagaacacgaagcttccagctgtttgaaggagatactctaaaggtatatgatggaaaagacagttcctcacgtccactgggcacgttcactaaaaatgaacttctggggctgatcctaaacagcacatccaatcacctgtggctagagttcaacaccaatggatctgacaccgaccaaggttttcaactcacctataccagttttgatctggtaaaatgtgaggatccgggcatccctaactacggctataggatccgtgatgaaggccactttaccgacactgtagttctgtacagttgcaacccggggtacgccatgcatggcagcaacaccctgacctgtttgagtggagacaggagagtgtgggacaaaccactaccttcgtgcatagcggaatgtggtggtcagatccatgcagccacatcaggacgaatattgtcccctggctatccagctccgtatgacaacaacctccactgcacctggattatagaggcagacccaggaaagaccattagcctccatttcattgttttcgacacggagatggctcacgacatcctcaaggtctgggacgggccggtggacagtgacatcctgctgaaggagtggagtggctccgcccttccggaggacatccacagcaccttcaactcactcaccctgcagttcgacagcgacttcttcatcagcaagtctggcttctccatccagttctccacctcaattgcagccacctgtaacgatccaggtatgccccaaaatggcacccgctatggagacagcagagaggctggagacaccgtcacattccagtgtgaccctggctatcagctccaaggacaagccaaaatcacctgtgtgcagctgaataaccggttcttttggcaaccagaccctcctacatgcatagctgcttgtggagggaatctgacgggcccagcaggtgttattttgtcacccaactacccacagccgtatcctcctgggaaggaatgtgactggagagtaaaagtgaacccggactttgtcatcgccttgatattcaaaagtttcaacatggagcccagctatgacttcctacacatctatgaaggggaagattccaacagccccctcattgggagttaccagggctctcaggccccagaaagaatagagagtagcggaaacagcctgtttctggcatttcggagtgatgcctccgtgggcctttcagggttcgccattgaatttaaagagaaaccacgggaagcttgttttgacccaggaaatataatgaatgggacaagagttggaacagacttcaagcttggctccaccatcacctaccagtgtgactctggctataagattcttgacccctcatccatcacctgtgtgattggggctgatgggaaaccctcctgggaccaagtgctgccctcctgcaatgctccctgtggaggccagtacacgggatcagaaggggtagttttatcaccaaactacccccataattacacagctggtcaaatatgcctctattccatcacggtaccaaaggaattcgtggtctttggacagtttgcctatttccagacagccctgaatgatttggcagaattatttgatggaacccatgcacaggccagacttctcagctcactctcggggtctcactcaggggaaacattgcccttggctacgtcaaatcaaattctgctccgattcagtgcaaagagcggtgcctctgcccgcggcttccacttcgtgtatcaagctgttcctcgtaccagtgacacccaatgcagctctgtccccgagcccagatacggaaggagaattggttctgagttttctgccggctccatcgtccgattcgagtgcaacccgggatacctgcttcagggttccacggcgctccactgccagtccgtgcccaacgccttggcacagtggaacgacacgatccccagctgtgtggtaccctgcagtggcaatttcactcaacgaagaggtacaatcctgtcccccggctaccctgagccatacggaaacaacttgaactgtatatggaagatcatagttacggagggctcgggaattcagatccaagtgatcagttttgccacggagcagaactgggactcccttgagatccacgatggtggggatgtgaccgcacccagactgggaagcttctcaggcaccacagtaccggcactgctgaacagtacttccaaccaactctacctgcatttccagtctgacattagtgtggcagctgctggtttccacctggaatacaaaactgtaggtcttgctgcatgccaagaaccagccctccccagcaacagcatcaaaatcggagatcggtacatggtgaacgacgtgctctccttccagtgcgagcccgggtacaccctgcagggccgttcccacatttcctgtatgccagggaccgttcgccgttggaactatccgtctcccctgtgcattgcaacctgtggagggacgctgagcaccttgggtggtgtgatcctgagccccggcttcccaggttcttaccccaacaacttagactgcacctggaggatctcattacccatcggctatggtgcacatattcagtttctgaatttttctaccgaagctaatcatgacttccttgaaattcaaaatggaccttaccacaccagccccatgattggacaatttagcggcacggatctccccgcggccctgctgagcacaacgcatgaaaccctcatccacttttatagtgaccattcgcaaaaccggcaaggatttaaacttgcttaccaagcctatgaattacagaactgtccagatccacccccatttcagaatgggtacatgatcaactcggattacagcgtggggcaatcagtatctttcgagtgttatcctgggtacattctaataggccatcctgtcctcacttgtcagcatgggatcaacagaaactggaactacccttttccaagatgtgatgccccttgtgggtacaacgtaacttctcagaacggcaccatctactcccctggctttcctgatgagtatccgatcctgaaggactgcatttggctcatcacggtgcctccagggcacggagtttacatcaacttcaccctgttacagacggaagctgtcaacgattacattgctgtttgggacggtcccgatcagaactcaccccagctgggagttttcagtggcaacacagccctcgaaacggcgtatagctccaccaaccaagtcctgctcaagttccacagcgacttttcaaatggaggcttctttgtcctcaatttccacgcatttcagctcaagaaatgtcaacctcccccagcggttccacaggcagaaatgcttactgaggatgatgatttcgaaataggagattttgtgaagtaccagtgccaccccgggtacaccttggtggggaccgacattctgacttgcaagctcagttcccagttgcagtttgagggttctctcccaacatgtgaagcacaatgcccagcaaatgaagtccggactggatcatcgggagtcattctcagtccagggtatccgggtaattattttaactcccagacttgctcttggagtattaaagtggaaccaaactacaacattaccatctttgtggacacatttcaaagtgaaaagcagtttgatgcactggaagtgtttgatggttcttctgggcaaagtcctctgctagtagtcttaagtgggaatcatactgaacaatcaaattttacaagcaggagtaatcagttatatctccgctggtccactgaccatgccaccagtaagaaaggattcaagattcgctatgcagcaccttactgcagtttgacccaccccctgaagaatgggggtattctaaacaggactgcaggagcggttggaagcaaagtgcattatttttgcaagcctggataccgaatggtcggccacagcaatgcaacctgtagacgaaacccacttggcatgtaccagtgggactccctcacgccactctgccaggctgtgtcctgtggaatcccagaatccccaggaaacggttcatttaccgggaacgagttcactttggacagtaaagtggtctatgaatgtcatgagggcttcaagcttgaatccagccagcaagcaacagccgtgtgtcaagaagatgggttgtggagtaacaaggggaagccgcccacgtgtaagccggtcgcttgccccagcattgaagctcagctctcagaacatgtcatctggaggctggtttcaggatccttgaatgagtacggtgctcaagtattgctgagctgcagtcctggttactacttagaaggctggaggctcctgcggtgccaggccaatgggacgtggaacataggagatgagaggccaagctgtcgagttatctcgtgtggaagcctttcctttcccccaaatggcaacaagattggaacgttgacagtttatggggccacagctatatttacgtgcaacaccggctacacgcttgtggggtctcatgtcagagagtgcttggcaaatgggctctggagcggcagcgaaactcgatgtctggctggccactgcggttccccagacccgattgtgaacggtcacattagtggagatggcttcagttacagagacacggtggtttaccagtgcaatcctggtttccggcttgtgggaacttccgtgaggatatgcctgcaagaccacaagtggtctggacaaacgcctgtctgtgtccccatcacatgtggtcaccctggaaaccctgcccacggattcactaatggcagtgagttcaacctgaatgatgtcgtgaatttcacctgcaacacgggctatttgctgcagggcgtgtctcgagcccagtgtcggagcaacggccagtggagtagccctctgcccacgtgtcgagtggtgaactgttctgatccaggctttgtggaaaatgccattcgtcacgggcaacagaacttccctgagagttttgagtatggaatgagtatcctgtaccattgcaagaagggattttacttgctgggatcttcagccttgacctgtatggcaaatggcttatgggaccgatccctgcccaagtgtttggctatatcgtgtggacacccaggggtccctgccaacgccgtcctcactggagagctgtttacctatggcgccgtcgtgcactactcctgcagagggagcgagagcctcataggcaacgacacgagagtgtgccaggaagacagtcactggagcggggcactgccccactgcacaggaaataatcctggattctgtggtgatccggggaccccagcacatgggtctcggcttggtgatgactttaagacaaagagtcttctccgcttctcctgtgaaatggggcaccagctgaggggctcccctgaacgcacgtgtttgctcaatgggtcatggtcaggactgcagccggtgtgtgaggccgtgtcctgtggcaaccctggcacacccaccaacggaatgattgtcagtagtgatggcattctgttctccagctcggtcatctatgcctgctgggaaggctacaagacctcagggctcatgacacggcattgcacagccaatgggacctggacaggcactgctcccgactgcacaattataagttgtggggatccaggcacactagcaaatggcatccagtttgggaccgacttcaccttcaacaagactgtgagctatcagtgtaacccaggctatgtcatggaagcagtcacatccgccactattcgctgtaccaaagacggcaggtggaatccgagcaaacctgtctgcaaagccgtgctgtgtcctcagccgccgccggtgcagaatggaacagtggagggaagtgatttccgctggggctccagcataagttacagctgcatggacggttaccagctctctcactccgccatcctctcctgtgaaggtcgcggggtgtggaaaggagagatcccccagtgtctccctgtgttctgcggagaccctggcatccccgcagaagggcgacttagtgggaaaagtttcacctataagtccgaagtcttcttccagtgcaaatctccatttatactcgtgggatcctccagaagagtctgccaagctgacggcacgtggagcggcatacaacccacctgcattgatcctgctcataacacctgcccagaccctggtacgccacactttggaatacagaatagctccagaggctatgaggttggaagcacggtttttttcaggtgcagaaaaggctaccatattcaaggttccacgactcgcacctgccttgccaatttaacatggagtgggatacagaccgaatgtatacctcatgcctgcagacagccagaaaccccggcacacgcggatgtgagagccatcgatcttcctactttcggctacaccttagtgtacacctgccatccaggctttttcctcgcagggggatctgagcacagaacatgtaaagcagacatgaaatggacaggaaagtcgcctgtgtgtaaaagtaaaggagtgagagaagttaatgaaacagttactaaaactccagttccttcagatgtctttttcgtcaattcactgtggaaggggtattatgaatatttagggaaaagacaacccgccactctaactgttgactggttcaatgcaacaagcagtaaggtgaatgccaccttcagcgaagcctcgccagtggagctgaagttgacaggcatttacaagaaggaggaggcccacttactcctgaaagcttttcaaattaaaggccaggcagatatttttgtaagcaagttcgaaaatgacaactggggactagatggttatgtgtcatctggacttgaaagaggaggatttacttttcaaggtgacattcatggaaaagactttggaaaatttaagctagaaaggcaagatcctttaaacccagatcaagactcttccagtcattaccacggcaccagcagtggctctgtggcggctgccattctggttcctttctttgctctaattttatcagggtttgcattttacctctacaaacacagaacgagaccaaaagttcaatacaatggctatgctgggcatgaaaacagcaatggacaagcatcgtttgaaaaccccatgtatgatacaaacttaaaacccacagaagccaaggctgtgaggtttgacacaactctgaacacagtctgtacagtggtatagccctcagtgccccaacaggactgattcatagccatacctctgatggacaagcagtgattcctttggtgccatataccactctcccttccactctggctttactgcagcgatcttcaaccttgtctactggcataagtgcagcggggatctctactcaaatgtgtcagggtcttctacggatcaaactacacatgcgttttcattccaaaagtgggttctaaatgcctggctgcatctgtatgaaatcaaggcacactccaggaagactgccacgtcgcgccaacacgtcatactcaatgcctcagactttcatatttctgtgttgctgagatgcctttcaatgcaatcgtctgggctcgtggatatgtccctcaggtgcggtgacagaatggtggcaccacgatatgtgttctcttgtgttgtttttcctttttaaacccccatgaacacgaatactctgaaaaaaataaaaagctttctggaaga

SEQ ID NO: 123121 - DNA, 13512 bp, Homo sapiens
  Payload ID: 4180
  Gene Symbol: CSMD1
  Gene Name: CUB and Sushi multiple domains 1
  ENST ID: ENST00000537824
  CDS Start-End: 1-10281
gttttacctagccacacttgtggaaatcctggagaaatcctgaaaggagttctgcatggaacgagattcaacataggagacaaaatccggtacagctgcctccctggctacatcttggaaggccacgccatcctgacctgcatcgtcagcccaggaaatggtgcatcgtgggacttcccagctcccttttgcagagctgagggagcctgcggaggaaccttacgcgggaccagcagctccatctccagcccgcacttcccttcagagtacgagaacaacgcggactgcacctggaccattctggctgagcccggggacaccattgcgctggtcttcactgactttcagctagaagaaggatatgatttcttagagatcagtggcacggaagctccatccatatggctgactggcatgaacctcccctctccagttatcagtagcaagaattggctacgactccatttcacctctgacagcaaccaccgacgcaaaggatttaacgctcagttccaagtgaaaaaggcgattgagttgaagtcaagaggagtcaagatgctgcccagcaaggatggaagccataaaaactctgtcttgagccaaggaggtgttgcattggtctctgacatgtgtccagatcctgggattccagaaaatggtagaagagcaggttccgacttcagggttggtgcaaatgtacagttttcatgtgaggacaattacgtgctccagggatctaaaagcatcacctgtcagagagttacagagacgctcgctgcttggagtgaccacaggcccatctgccgagcgagaacatgtggatccaatctgcgtgggcccagcggcgtcattacctcccctaattatccggttcagtatgaagataatgcacactgtgtgtgggtcatcaccaccaccgacccggacaaggtcatcaagcttgcctttgaagagtttgagctggagcgaggctatgacaccctgacggttggtgatgctgggaaggtgggagacaccagatcggtcttgtacgtgctcacgggatccagtgttcctgacctcattgtgagcatgagcaaccagatgtggctacatctgcagtcggatgatagcattggctcacctgggtttaaagctgtttaccaagaaattgaaaagggagggtgtggggatcctggaatccccgcctatgggaagcggacgggcagcagtttcctccatggagatacactcacctttgaatgcccggcggcctttgagctggtgggggagagagttatcacctgtcagcagaacaatcagtggtctggcaacaagcccagctgtgtattttcatgtttcttcaactttacggcatcatctgggattattctgtcaccaaattatccagaggaatatgggaacaacatgaactgtgtctggttgattatctcggagccaggaagtcgaattcacctaatctttaatgattttgatgttgagcctcagtttgactttctcgcggtcaaggatgatggcatttctgacataactgtcctgggtactttttctggcaatgaagtgccttcccagctggccagcagtgggcatatagttcgcttggaatttcagtctgaccattccactactggcagagggttcaacatcacttacaccacatttggtcagaatgagtgccatgatcctggcattcctataaacggacgacgttttggtgacaggtttctactcgggagctcggtttctttccactgtgatgatggctttgtcaagacccagggatccgagtccattacctgcatactgcaagacgggaacgtggtctggagctccaccgtgccccgctgtgaagctccatgtggtggacatctgacagcgtccagcggagtcattttgcctcctggatggccaggatattataaggattctttacattgtgaatggataattgaagcaaaaccaggccactctatcaaaataacttttgacagatttcagacagaggtcaattatgacaccttggaggtcagagatgggccagccagttcgtccccactgatcggcgagtaccacggcacccaggcaccccagttcctcatcagcaccgggaacttcatgtacctgctgttcaccactgacaacagccgctccagcatcggcttcctcatccactatgagagtgtgacgcttgagtcggattcctgcctggacccgggcatccctgtgaacggccatcgccacggtggagactttggcatcaggtccacagtgactttcagctgtgacccggggtacacactaagtgacgacgagcccctcgtctgtgagaggaaccaccagtggaaccacgccttgcccagctgcgacgctctatgtggaggctacatccaagggaagagtggaacagtcctttctcctgggtttccagatttttatccaaactctctaaactgcacgtggaccattgaagtgtctcatgggaaaggagttcaaatgatctttcacacctttcatcttgagagttcccacgactatttactgatcacagaggatggaagtttttccgagcccgttgccaggctcaccgggtcggtgttgcctcatacgatcaaggcaggcctgtttggaaacttcactgcccagcttcggtttatatcagacttctcaatttcgtacgagggcttcaatatcacattttcagaatatgacctggagccatgtgatgatcctggagtccctgccttcagccgaagaattggttttcactttggtgtgggagactctctgacgttttcctgcttcctgggatatcgtttagaaggtgccaccaagcttacctgcctgggtgggggccgccgtgtgtggagtgcacctctgccaaggtgtgtggccgaatgtggagcaagtgtcaaaggaaatgaaggaacattactgtctccaaattttccatccaattatgataataaccatgagtgtatctataaaatagaaacagaagccggcaagggcatccaccttagaacacgaagcttccagctgtttgaaggagatactctaaaggtatatgatggaaaagacagttcctcacgtccactgggcacgttcactaaaaatgaacttctggggctgatcctaaacagcacatccaatcacctgtggctagagttcaacaccaatggatctgacaccgaccaaggttttcaactcacctataccagttttgatctggtaaaatgtgaggatccgggcatccctaactacggctataggatccgtgatgaaggccactttaccgacactgtagttctgtacagttgcaacccggggtacgccatgcatggcagcaacaccctgacctgtttgagtggagacaggagagtgtgggacaaaccactaccttcgtgcatagcggaatgtggtggtcagatccatgcagccacatcaggacgaatattgtcccctggctatccagctccgtatgacaacaacctccactgcacctggattatagaggcagacccaggaaagaccattagcctccatttcattgttttcgacacggagatggctcacgacatcctcaaggtctgggacgggccggtggacagtgacatcctgctgaaggagtggagtggctccgcccttccggaggacatccacagcaccttcaactcactcaccctgcagttcgacagcgacttcttcatcagcaagtctggcttctccatccagttctccacctcaattgcagccacctgtaacgatccaggtatgccccaaaatggcacccgctatggagacagcagagaggctggagacaccgtcacattccagtgtgaccctggctatcagctccaaggacaagccaaaatcacctgtgtgcagctgaataaccggttcttttggcaaccagaccctcctacatgcatagctgcttgtggagggaatctgacgggcccagcaggtgttattttgtcacccaactacccacagccgtatcctcctgggaaggaatgtgactggagagtaaaagtgaacccggactttgtcatcgccttgatattcaaaagtttcaacatggagcccagctatgacttcctacacatctatgaaggggaagattccaacagccccctcattgggagttaccagggctctcaggccccagaaagaatagagagtagcggaaacagcctgtttctggcatttcggagtgatgcctccgtgggcctttcagggttcgccattgaatttaaagagaaaccacgggaagcttgttttgacccaggaaatataatgaatgggacaagagttggaacagacttcaagcttggctccaccatcacctaccagtgtgactctggctataagattcttgacccctcatccatcacctgtgtgattggggctgatgggaaaccctcctgggaccaagtgctgccctcctgcaatgctccctgtggaggccagtacacgggatcagaaggggtagttttatcaccaaactacccccataattacacagctggtcaaatatgcctctattccatcacggtaccaaaggaattcgtggtctttggacagtttgcctatttccagacagccctgaatgatttggcagaattatttgatggaacccatgcacaggccagacttctcagctcactctcggggtctcactcaggggaaacattgcccttggctacgtcaaatcaaattctgctccgattcagtgcaaagagcggtgcctctgcccgcggcttccacttcgtgtatcaagctgttcctcgtaccagtgacacccaatgcagctctgtccccgagcccagatacggaaggagaattggttctgagttttctgccggctccatcgtccgattcgagtgcaacccgggatacctgcttcagggttccacggcgctccactgccagtccgtgcccaacgccttggcacagtggaacgacacgatccccagctgtgtggtaccctgcagtggcaatttcactcaacgaagaggtacaatcctgtcccccggctaccctgagccatacggaaacaacttgaactgtatatggaagatcatagttacggagggctcgggaattcagatccaagtgatcagttttgccacggagcagaactgggactcccttgagatccacgatggtggggatgtgaccgcacccagactgggaagcttctcaggcaccacagtaccggcactgctgaacagtacttccaaccaactctacctgcatttccagtctgacattagtgtggcagctgctggtttccacctggaatacaaaactgtaggtcttgctgcatgccaagaaccagccctccccagcaacagcatcaaaatcggagatcggtacatggtgaacgacgtgctctccttccagtgcgagcccgggtacaccctgcagggccgttcccacatttcctgtatgccagggaccgttcgccgttggaactatccgtctcccctgtgcattgcaacctgtggagggacgctgagcaccttgggtggtgtgatcctgagccccggcttcccaggttcttaccccaacaacttagactgcacctggaggatctcattacccatcggctatggtgcacatattcagtttctgaatttttctaccgaagctaatcatgacttccttgaaattcaaaatggaccttaccacaccagccccatgattggacaatttagcggcacggatctccccgcggccctgctgagcacaacgcatgaaaccctcatccacttttatagtgaccattcgcaaaaccggcaaggatttaaacttgcttaccaagcctatgaattacagaactgtccagatccacccccatttcagaatgggtacatgatcaactcggattacagcgtggggcaatcagtatctttcgagtgttatcctgggtacattctaataggccatcctgtcctcacttgtcagcatgggatcaacagaaactggaactacccttttccaagatgtgatgccccttgtgggtacaacgtaacttctcagaacggcaccatctactcccctggctttcctgatgagtatccgatcctgaaggactgcatttggctcatcacggtgcctccagggcacggagtttacatcaacttcaccctgttacagacggaagctgtcaacgattacattgctgtttgggacggtcccgatcagaactcaccccagctgggagttttcagtggcaacacagccctcgaaacggcgtatagctccaccaaccaagtcctgctcaagttccacagcgacttttcaaatggaggcttctttgtcctcaatttccacgcatttcagctcaagaaatgtcaacctcccccagcggttccacaggcagaaatgcttactgaggatgatgatttcgaaataggagattttgtgaagtaccagtgccaccccgggtacaccttggtggggaccgacattctgacttgcaagctcagttcccagttgcagtttgagggttctctcccaacatgtgaagcacaatgcccagcaaatgaagtccggactggatcatcgggagtcattctcagtccagggtatccgggtaattattttaactcccagacttgctcttggagtattaaagtggaaccaaactacaacattaccatctttgtggacacatttcaaagtgaaaagcagtttgatgcactggaagtgtttgatggttcttctgggcaaagtcctctgctagtagtcttaagtgggaatcatactgaacaatcaaattttacaagcaggagtaatcagttatatctccgctggtccactgaccatgccaccagtaagaaaggattcaagattcgctatgcagcaccttactgcagtttgacccaccccctgaagaatgggggtattctaaacaggactgcaggagcggttggaagcaaagtgcattatttttgcaagcctggataccgaatggtcggccacagcaatgcaacctgtagacgaaacccacttggcatgtaccagtgggactccctcacgccactctgccaggctgtgtcctgtggaatcccagaatccccaggaaacggttcatttaccgggaacgagttcactttggacagtaaagtggtctatgaatgtcatgagggcttcaagcttgaatccagccagcaagcaacagccgtgtgtcaagaagatgggttgtggagtaacaaggggaagccgcccacgtgtaagccggtcgcttgccccagcattgaagctcagctctcagaacatgtcatctggaggctggtttcaggatccttgaatgagtacggtgctcaagtattgctgagctgcagtcctggttactacttagaaggctggaggctcctgcggtgccaggccaatgggacgtggaacataggagatgagaggccaagctgtcgagttatctcgtgtggaagcctttcctttcccccaaatggcaacaagattggaacgttgacagtttatggggccacagctatatttacgtgcaacaccggctacacgcttgtggggtctcatgtcagagagtgcttggcaaatgggctctggagcggcagcgaaactcgatgtctggctggccactgcggttccccagacccgattgtgaacggtcacattagtggagatggcttcagttacagagacacggtggtttaccagtgcaatcctggtttccggcttgtgggaacttccgtgaggatatgcctgcaagaccacaagtggtctggacaaacgcctgtctgtgtccccatcacatgtggtcaccctggaaaccctgcccacggattcactaatggcagtgagttcaacctgaatgatgtcgtgaatttcacctgcaacacgggctatttgctgcagggcgtgtctcgagcccagtgtcggagcaacggccagtggagtagccctctgcccacgtgtcgagtggtgaactgttctgatccaggctttgtggaaaatgccattcgtcacgggcaacagaacttccctgagagttttgagtatggaatgagtatcctgtaccattgcaagaagggattttacttgctgggatcttcagccttgacctgtatggcaaatggcttatgggaccgatccctgcccaagtgtttggctatatcgtgtggacacccaggggtccctgccaacgccgtcctcactggagagctgtttacctatggcgccgtcgtgcactactcctgcagagggagcgagagcctcataggcaacgacacgagagtgtgccaggaagacagtcactggagcggggcactgccccactgcacaggaaataatcctggattctgtggtgatccggggaccccagcacatgggtctcggcttggtgatgactttaagacaaagagtcttctccgcttctcctgtgaaatggggcaccagctgaggggctcccctgaacgcacgtgtttgctcaatgggtcatggtcaggactgcagccggtgtgtgaggccgtgtcctgtggcaaccctggcacacccaccaacggaatgattgtcagtagtgatggcattctgttctccagctcggtcatctatgcctgctgggaaggctacaagacctcagggctcatgacacggcattgcacagccaatgggacctggacaggcactgctcccgactgcacaattataagttgtggggatccaggcacactagcaaatggcatccagtttgggaccgacttcaccttcaacaagactgtgagctatcagtgtaacccaggctatgtcatggaagcagtcacatccgccactattcgctgtaccaaagacggcaggtggaatccgagcaaacctgtctgcaaagccgtgctgtgtcctcagccgccgccggtgcagaatggaacagtggagggaagtgatttccgctggggctccagcataagttacagctgcatggacggttaccagctctctcactccgccatcctctcctgtgaaggtcgcggggtgtggaaaggagagatcccccagtgtctccctgtgttctgcggagaccctggcatccccgcagaagggcgacttagtgggaaaagtttcacctataagtccgaagtcttcttccagtgcaaatctccatttatactcgtgggatcctccagaagagtctgccaagctgacggcacgtggagcggcatacaacccacctgcattgatcctgctcataacacctgcccagaccctggtacgccacactttggaatacagaatagctccagaggctatgaggttggaagcacggtttttttcaggtgcagaaaaggctaccatattcaaggttccacgactcgcacctgccttgccaatttaacatggagtgggatacagaccgaatgtatacctcatgcctgcagacagccagaaaccccggcacacgcggatgtgagagccatcgatcttcctactttcggctacaccttagtgtacacctgccatccaggctttttcctcgcagggggatctgagcacagaacatgtaaagcagacatgaaatggacaggaaagtcgcctgtgtgtaaaagtaaaggagtgagagaagttaatgaaacagttactaaaactccagttccttcagatgtctttttcgtcaattcactgtggaaggggtattatgaatatttagggaaaagacaacccgccactctaactgttgactggttcaatgcaacaagcagtaaggtgaatgccaccttcagcgaagcctcgccagtggagctgaagttgacaggcatttacaagaaggaggaggcccacttactcctgaaagcttttcaaattaaaggccaggcagatatttttgtaagcaagttcgaaaatgacaactggggactagatggttatgtgtcatctggacttgaaagaggaggatttacttttcaaggtgacattcatggaaaagactttggaaaatttaagctagaaaggcaagatcctttaaacccagatcaagactcttccagtcattaccacggcaccagcagtggctctgtggcggctgccattctggttcctttctttgctctaattttatcagggtttgcattttacctctacaaacacagaacgagaccaaaagttcaatacaatggctatgctgggcatgaaaacagcaatggacaagcatcgtttgaaaaccccatgtatgatacaaacttaaaacccacagaagccaaggctgtgaggtttgacacaactctgaacacagtctgtacagtggtatagccctcagtgccccaacaggactgattcatagccatacctctgatggacaagcagtgattcctttggtgccatataccactctcccttccactctggctttactgcagcgatcttcaaccttgtctactggcataagtgcagcggggatctctactcaaatgtgtcagggtcttctacggatcaaactacacatgcgttttcattccaaaagtgggttctaaatgcctggctgcatctgtatgaaatcaaggcacactccaggaagactgccacgtcgcgccaacacgtcatactcaatgcctcagactttcatatttctgtgttgctgagatgcctttcaatgcaatcgtctgggctcgtggatatgtccctcaggtgcggtgacagaatggtggcaccacgatatgtgttctcttgtgttgtttttcctttttaaacccccatgaacacgaatactctgaaaaaaataaaaagctttctggaagaagacacctttctgatagaggctcacacctacaaatgcttcactctgtccttccgagacctgacaagctttgaggacctcacagctcccctgtgtgttcatctctagggatgtttgcaatttcccagtcagctgttctgtcgcagaatgtttaatgcacaattttttgcactagtgtgttatgaatgactaagattctgataaaaaaaataaattatttacacagggtttatacacactatccattgtatataagcattatttcatattatcaagctaaacattcccccatcagcttagttggagtgttagggaaaagtattcctagatatggcacagattttaaaaggaaatacagtattgaagagatttattttattattgcttcaattagctccatttacgtgttgaattcattgaagaggtccaatgagaaaaaaacagaagcctccttatttcacacgttttcctcctttagtaccatcctcatccaattactgtctctctgatactacttaatagcagggggtttgcagaaatttctgtttgccatgtaaaactgtgaatagtaatttattttagatagtcgatgaacttgtgggttttagctcacaatgcagccttcccttttgcagtgttttttttttgtttttttttttttttgtcttttactgtgccatcgatctttgatattgcattgaaagacaatataccacagtagcaccttgaactcagtgaaaattgttcaggatcaaaataccaagtgttcttttagagggaaggaaaaagtacacacactctcctctcacaatgatatattttatacattcatttgttatttgtttcatgctttatgattccagatggaaaggtaatttcagtgacttttcaagtttaaattccattataggtaaatgataagttatgatgcaaataaaatctataagatccccagggcaaataaaaatcaaaacatgaagtagaagatgtggccgtgaggtagtttatgtaacaaattcaaagtgaaaatcatgtttacttttacttatacttatttgataaaaatatttttgaaacgatagtacttattttattatttgatatttcagttcctattcaattgtggcagattttctctgtttcacattttagattggcgttggtaatagaaatgtcagaatgttcaaattggccttcacgttgtcggagtgaacacattgacacctagctttaagactgatttatctgttggtgtactgaaggtttccatgtaggacttcaaatgtggaaaaggaaaagcagtcaggaaaatggggcattctttggagagtcacgcgttttgattcggacatttccgtagagctcggctcccagtgttgtgttcctcggtcgaaagggtctctgctgtttggggactcactggcctctcctagggactcctttgtcttgtgaaccccacgctgttggattctgtatcattatgctgaattctctgcacagttttccctggccaacctgcccacatccttggagatttgctttgccagtgggaatccttacattgctgtttcacagtagacgggacgaggtcagcgggagtcgtgctcctaacacacacattgaacgaaacagaagatgattgaaagtgtgaggaggctcgtgtgcaagggagaacagggttactatacatattagtgtatatatatacatacatatatatatatatatattgtacatatctaagtttgagtcattcaaactaggtgcaaaatgctgacttcagagtctgaattaacatctctgttcccatatccctgacctgctccctggtcaacgatgctatgaaatcctgaaatgacaggacatacatacatacaagaaaccacatatcaaattagatatgattttcctttgtgtgcaaagtcaaactgtcctagggttgccagtttgaagcatgttatttaaatgaaaaaaaaaatcagtgaaattctcgtgtgagaattctgcctagtttcttcctaaggttgtgtgcagtgttgaacggcgtctccgcaaggtgttggaggatctcattttagggcagtcaggagctgtgcttgctgagttaggtctagaagactcttccctgaaggcaacgggaacacgcgtgagggacgcgaccacacactaacagaggacacgtgcttcagagctgtttaaaactgctgcttgttttacacacacatcttgccttttttcaggctagctgcaataatttttttcttctgtaaaatattttgtaaacaacaacaaaaagctattataaaaagggggtaaaaaaaagaacgctggcattatgatcaggaaaacccattgtcatcgccgaccctccctcccgtcccaccacacgctgctgtcacgacgtaggtgcgaaagacctttttgtacagagatatattttttatgaagaatttgtaaaattattaaatatgctgtaattttttgattaatgtaggtacattgttaaaaaataaatgtttttacaatacagaactgtaattttcccaataatgtaaaatgtaccatctctagctgattttcagttccaatcctattacacatgtattaatattaaagtggcctgttaaaatgaacagtatcttttttttgtcaaaaaaattataaagagggtgtaatatagcctgtgcaatgccaccaatctttaaagcaaatcagagttctaattaaatatttaattttagatttct

SEQ ID NO: 123122 - DNA, 11740 bp, Homo sapiens; identical to SEQ ID NO: 123120
  Payload ID: 4180
  Gene Symbol: CSMD1
  Gene Name: CUB and Sushi multiple domains 1
  ENST ID: ENST00000602557
  CDS Start-End: 557-11254

SEQ ID NO: 123123 - DNA, 10938 bp, Homo sapiens; identical to SEQ ID NO: 123119
  Payload ID: 4180
  Gene Symbol: CSMD1
  Gene Name: CUB and Sushi multiple domains 1
  ENST ID: ENST00000602723
  CDS Start-End: 286-10452

SEQ ID NO: 123124 - DNA, 11737 bp, Homo sapiens
  Payload ID: 4180
  Gene Symbol: CSMD1
  Gene Name: CUB and Sushi multiple domains 1
  ENST ID: ENST00000635120
  CDS Start-End: 557-11251
gactgcgccgtgcccagcctcggtcccctctctgtgggtaaggatggttgagtccagcctccacggcagcggctccttgtgccactagcagcccttcttctgcgctctccgccttttctctctagactggatctctcctcccccccgcgcccccctccccgcatctcccactcgctggctctctctccagctgcctcctctccaggtctctcctggctgcgcgcgctcctctccccgcttctccccctcccgcagcctcgccgccttggtgccttcctgcccggctcggccggcgctcgtccccggccccggccccgccagcccgggtctccgcgctcggagcagctcagccctgcagtggctcgggacccgatgctatgagagggaagcgagccgggcgcccagaccttcaggaggcgtcggatgcgcggcgggtcttgggaccgggctctctctccggctcgccttgccctcgggtgattatttggctccgctcatagccctgccttcctcggaggagccatcggtgtcgcgtgcgtgtggagtatctgcagacatgactgcgtggaggagattccagtcgctgctcctgcttctcgggctgctggtgctgtgcgcgaggctcctcactgcagcgaagggtcagaactgtggaggcttagtccagggtcccaatggcactattgagagcccagggtttcctcacgggtatccgaactatgccaactgcacctggatcatcatcacgggcgagcgcaataggatacagttgtccttccatacctttgctcttgaagaagattttgatattttatcagtttacgatggacagcctcaacaagggaatttaaaagtgagattatcgggatttcagctgccctcctctatagtgagtacaggatctatcctcactctgtggttcacgacagacttcgctgtgagtgcccaaggtttcaaagcattatatgaagttttacctagccacacttgtggaaatcctggagaaatcctgaaaggagttctgcatggaacgagattcaacataggagacaaaatccggtacagctgcctccctggctacatcttggaaggccacgccatcctgacctgcatcgtcagcccaggaaatggtgcatcgtgggacttcccagctcccttttgcagagctgagggagcctgcggaggaaccttacgcgggaccagcagctccatctccagcccgcacttcccttcagagtacgagaacaacgcggactgcacctggaccattctggctgagcccggggacaccattgcgctggtcttcactgactttcagctagaagaaggatatgatttcttagagatcagtggcacggaagctccatccatatggctaactggcatgaacctcccctctccagttatcagtagcaagaattggctacgactccatttcacctctgacagcaaccaccgacgcaaaggatttaacgctcagttccaagtgaaaaaggcgattgagttgaagtcaagaggagtcaagatgctgcccagcaaggatggaagccataaaaactctgtcttgagccaaggaggtgttgcattggtctctgacatgtgtccagatcctgggattccagaaaatggtagaagagcaggttccgacttcagggttggtgcaaatgtacagttttcatgtgaggacaattacgtgctccagggatctaaaagcatcacctgtcagagagttacagagacgctcgctgcttggagtgaccacaggcccatctgccgagcgagaacatgtggatccaatctgcgtgggcccagcggcgtcattacctcccctaattatccggttcagtatgaagataatgcacactgtgtgtgggtcatcaccaccaccgacccggacaaggtcatcaagcttgcctttgaagagtttgagctggagcgaggctatgacaccctgacggttggtgatgctgggaaggtgggagacaccagatcggtcttgtacgtgctcacgggatccagtgttcctgacctcattgtgagcatgagcaaccagatgtggctacatctgcagtcggatgatagcattggctcacctgggtttaaagctgtttaccaagaaattgaaaagggagggtgtggggatcctggaatccccgcctatgggaagcggacgggcagcagtttcctccatggagatacactcacctttgaatgcccggcggcctttgagctggtgggggagagagttatcacctgtcagcagaacaatcagtggtctggcaacaagcccagctgtgtattttcatgtttcttcaactttacggcatcatctgggattattctgtcaccaaattatccagaggaatatgggaacaacatgaactgtgtctggttgattatctcggagccaggaagtcgaattcacctaatctttaatgattttgatgttgagcctcagtttgactttctcgcggtcaaggatgatggcatttctgacataactgtcctgggtactttttctggcaatgaagtgccttcccagctggccagcagtgggcatatagttcgcttggaatttcagtctgaccattccactactggcagagggttcaacatcacttacaccacatttggtcagaatgagtgccatgatcctggcattcctataaacggacgacgttttggtgacaggtttctactcgggagctcggtttctttccactgtgatgatggctttgtcaagacccagggatccgagtccattacctgcatactgcaagacgggaacgtggtctggagctccaccgtgccccgctgtgaagctccatgtggtggacatctgacagcgtccagcggagtcattttgcctcctggatggccaggatattataaggattctttacattgtgaatggataattgaagcaaaaccaggccactctatcaaaataacttttgacagatttcagacagaggtcaattatgacaccttggaggtcagagatgggccagccagttcgtccccactgatcggcgagtaccacggcacccaggcaccccagttcctcatcagcaccgggaacttcatgtacctgctgttcaccactgacaacagccgctccagcatcggcttcctcatccactatgagagtgtgacgcttgagtcggattcctgcctggacccgggcatccctgtgaacggccatcgccacggtggagactttggcatcaggtccacagtgactttcagctgtgacccggggtacacactaagtgacgacgagcccctcgtctgtgagaggaaccaccagtggaaccacgccttgcccagctgcgacgctctatgtggaggctacatccaagggaagagtggaacagtcctttctcctgggtttccagatttttatccaaactctctaaactgcacgtggaccattgaagtgtctcatgggaaaggagttcaaatgatctttcacacctttcatcttgagagttcccacgactatttactgatcacagaggatggaagtttttccgagcccgttgccaggctcaccgggtcggtgttgcctcatacgatcaaggcaggcctgtttggaaacttcactgcccagcttcggtttatatcagacttctcaatttcgtacgagggcttcaatatcacattttcagaatatgacctggagccatgtgatgatcctggagtccctgccttcagccgaagaattggttttcactttggtgtgggagactctctgacgttttcctgcttcctgggatatcgtttagaaggtgccaccaagcttacctgcctgggtgggggccgccgtgtgtggagtgcacctctgccaaggtgtgtggccgaatgtggagcaagtgtcaaaggaaatgaaggaacattactgtctccaaattttccatccaattatgataataaccatgagtgtatctataaaatagaaacagaagccggcaagggcatccaccttagaacacgaagcttccagctgtttgaaggagatactctaaaggtatatgatggaaaagacagttcctcacgtccactgggcacgttcactaaaaatgaacttctggggctgatcctaaacagcacatccaatcacctgtggctagagttcaacaccaatggatctgacaccgaccaaggttttcaactcacctataccagttttgatctggtaaaatgtgaggatccgggcatccctaactacggctataggatccgtgatgaaggccactttaccgacactgtagttctgtacagttgcaacccggggtacgccatgcatggcagcaacaccctgacctgtttgagtggagacaggagagtgtgggacaaaccactaccttcgtgcatagcggaatgtggtggtcagatccatgcagccacatcaggacgaatattgtcccctggctatccagctccgtatgacaacaacctccactgcacctggattatagaggcagacccaggaaagaccattagcctccatttcattgttttcgacacggagatggctcacgacatcctcaaggtctgggacgggccggtggacagtgacatcctgctgaaggagtggagtggctccgcccttccggaggacatccacagcaccttcaactcactcaccctgcagttcgacagcgacttcttcatcagcaagtctggcttctccatccagttctccacctcaattgcagccacctgtaacgatccaggtatgccccaaaatggcacccgctatggagacagcagagaggctggagacaccgtcacattccagtgtgaccctggctatcagctccaaggacaagccaaaatcacctgtgtgcagctgaataaccggttcttttggcaaccagaccctcctacatgcatagctgcttgtggagggaatctgacgggcccagcaggtgttattttgtcacccaactacccacagccgtatcctcctgggaaggaatgtgactggagagtaaaagtgaacccggactttgtcatcgccttgatattcaaaagtttcaacatggagcccagctatgacttcctacacatctatgaaggggaagattccaacagccccctcattgggagttaccagggctctcaggccccagaaagaatagagagtagcggaaacagcctgtttctggcatttcggagtgatgcctccgtgggcctttcagggttcgccattgaatttaaagagaaaccacgggaagcttgttttgacccaggaaatataatgaatgggacaagagttggaacagacttcaagcttggctccaccatcacctaccagtgtgactctggctataagattcttgacccctcatccatcacctgtgtgattggggctgatgggaaaccctcctgggaccaagtgctgccctcctgcaatgctccctgtggaggccagtacacgggatcagaaggggtagttttatcaccaaactacccccataattacacagctggtcaaatatgcctctattccatcacggtaccaaaggaattcgtggtctttggacagtttgcctatttccagacagccctgaatgatttggcagaattatttgatggaacccatgcacaggccagacttctcagctcactctcggggtctcactcaggggaaacattgcccttggctacgtcaaatcaaattctgctccgattcagtgcaaagagcggtgcctctgcccgcggcttccacttcgtgtatcaagctgttcctcgtaccagtgacacccaatgcagctctgtccccgagcccagatacggaaggagaattggttctgagttttctgccggctccatcgtccgattcgagtgcaacccgggatacctgcttcagggttccacggcgctccactgccagtccgtgcccaacgccttggcacagtggaacgacacgatccccagctgtgtggtaccctgcagtggcaatttcactcaacgaagaggtacaatcctgtcccccggctaccctgagccatacggaaacaacttgaactgtatatggaagatcatagttacggagggctcgggaattcagatccaagtgatcagttttgccacggagcagaactgggactcccttgagatccacgatggtggggatgtgaccgcacccagactgggaagcttctcaggcaccacagtaccggcactgctgaacagtacttccaaccaactctacctgcatttccagtctgacattagtgtggcagctgctggtttccacctggaatacaaaactgtaggtcttgctgcatgccaagaaccagccctccccagcaacagcatcaaaatcggagatcggtacatggtgaacgacgtgctctccttccagtgcgagcccgggtacaccctgcagggccgttcccacatttcctgtatgccagggaccgttcgccgttggaactatccgtctcccctgtgcattgcaacctgtggagggacgctgagcaccttgggtggtgtgatcctgagccccggcttcccaggttcttaccccaacaacttagactgcacctggaggatctcattacccatcggctatggtgcacatattcagtttctgaatttttctaccgaagctaatcatgacttccttgaaattcaaaatggaccttaccacaccagccccatgattggacaatttagcggcacggatctccccgcggccctgctgagcacaacgcatgaaaccctcatccacttttatagtgaccattcgcaaaaccggcaaggatttaaacttgcttaccaagcctatgaattacagaactgtccagatccacccccatttcagaatgggtacatgatcaactcggattacagcgtggggcaatcagtatctttcgagtgttatcctgggtacattctaataggccatcctgtcctcacttgtcagcatgggatcaacagaaactggaactacccttttccaagatgtgatgccccttgtgggtacaacgtaacttctcagaacggcaccatctactcccctggctttcctgatgagtatccgatcctgaaggactgcatttggctcatcacggtgcctccagggcacggagtttacatcaacttcaccctgttacagacggaagctgtcaacgattacattgctgtttgggacggtcccgatcagaactcaccccagctgggagttttcagtggcaacacagccctcgaaacggcgtatagctccaccaaccaagtcctgctcaagttccacagcgacttttcaaatggaggcttctttgtcctcaatttccacgcatttcagctcaagaaatgtcaacctcccccagcggttccacaggcagaaatgcttactgaggatgatgatttcgaaataggagattttgtgaagtaccagtgccaccccgggtacaccttggtggggaccgacattctgacttgcaagctcagttcccagttgcagtttgagggttctctcccaacatgtgaagcacaatgcccagcaaatgaagtccggactggatcatcgggagtcattctcagtccagggtatccgggtaattattttaactcccagacttgctcttggagtattaaagtggaaccaaactacaacattaccatctttgtggacacatttcaaagtgaaaagcagtttgatgcactggaagtgtttgatggttcttctgggcaaagtcctctgctagtagtcttaagtgggaatcatactgaacaatcaaattttacaagcaggagtaatcagttatatctccgctggtccactgaccatgccaccagtaagaaaggattcaagattcgctatgcagcaccttactgcagtttgacccaccccctgaagaatgggggtattctaaacaggactgcaggagcggttggaagcaaagtgcattatttttgcaagcctggataccgaatggtcggccacagcaatgcaacctgtagacgaaacccacttggcatgtaccagtgggactccctcacgccactctgccaggctgtgtcctgtggaatcccagaatccccaggaaacggttcatttaccgggaacgagttcactttggacagtaaagtggtctatgaatgtcatgagggcttcaagcttgaatccagccagcaagcaacagccgtgtgtcaagaagatgggttgtggagtaacaaggggaagccgcccacgtgtaagccggtcgcttgccccagcattgaagctcagctctcagaacatgtcatctggaggctggtttcaggatccttgaatgagtacggtgctcaagtattgctgagctgcagtcctggttactacttagaaggctggaggctcctgcggtgccaggccaatgggacgtggaacataggagatgagaggccaagctgtcgagttatctcgtgtggaagcctttcctttcccccaaatggcaacaagattggaacgttgacagtttatggggccacagctatatttacgtgcaacaccggctacacgcttgtggggtctcatgtcagagagtgcttggcaaatgggctctggagcggcagcgaaactcgatgtctggctggccactgcggttccccagacccgattgtgaacggtcacattagtggagatggcttcagttacagagacacggtggtttaccagtgcaatcctggtttccggcttgtgggaacttccgtgaggatatgcctgcaagaccacaagtggtctggacaaacgcctgtctgtgtccccatcacatgtggtcaccctggaaaccctgcccacggattcactaatggcagtgagttcaacctgaatgatgtcgtgaatttcacctgcaacacgggctatttgctgcagggcgtgtctcgagcccagtgtcggagcaacggccagtggagtagccctctgcccacgtgtcgagtggtgaactgttctgatccaggctttgtggaaaatgccattcgtcacgggcaacagaacttccctgagagttttgagtatggaatgagtatcctgtaccattgcaagaagggattttacttgctgggatcttcagccttgacctgtatggcaaatggcttatgggaccgatccctgcccaagtgtttggctatatcgtgtggacacccaggggtccctgccaacgccgtcctcactggagagctgtttacctatggcgccgtcgtgcactactcctgcagagggagcgagagcctcataggcaacgacacgagagtgtgccaggaagacagtcactggagcggggcactgccccactgcacaggaaataatcctggattctgtggtgatccggggaccccagcacatgggtctcggcttggtgatgactttaagacaaagagtcttctccgcttctcctgtgaaatggggcaccagctgaggggctcccctgaacgcacgtgtttgctcaatgggtcatggtcaggactgcagccggtgtgtgaggccgtgtcctgtggcaaccctggcacacccaccaacggaatgattgtcagtagtgatggcattctgttctccagctcggtcatctatgcctgctgggaaggctacaagacctcagggctcatgacacggcattgcacagccaatgggacctggacaggcactgctcccgactgcacaattataagttgtggggatccaggcacactagcaaatggcatccagtttgggaccgacttcaccttcaacaagactgtgagctatcagtgtaacccaggctatgtcatggaagcagtcacatccgccactattcgctgtaccaaagacggcaggtggaatccgagcaaacctgtctgcaaagccgtgctgtgtcctcagccgccgccggtgcagaatggaacagtggagggaagtgatttccgctggggctccagcataagttacagctgcatggacggttaccagctctctcactccgccatcctctcctgtgaaggtcgcggggtgtggaaaggagagatcccccagtgtctccctgtgttctgcggagaccctggcatccccgcagaagggcgacttagtgggaaaagtttcacctataagtccgaagtcttcttccagtgcaaatctccatttatactcgtgggatcctccagaagagtctgccaagctgacggcacgtggagcggcatacaacccacctgcattgatcctgctcataacacctgcccagaccctggtacgccacactttggaatacagaatagctccagaggctatgaggttggaagcacggtttttttcaggtgcagaaaaggctaccatattcaaggttccacgactcgcacctgccttgccaatttaacatggagtgggatacagaccgaatgtatacctcatgcctgcagacagccagaaaccccggcacacgcggatgtgagagccatcgatcttcctactttcggctacaccttagtgtacacctgccatccaggctttttcctcgcagggggatctgagcacagaacatgtaaagcagacatgaaatggacaggaaagtcgcctgtgtgtaaaagtaaaggagtgagagaagttaatgaaacagttactaaaactccagttccttcagatgtctttttcgtcaattcactgtggaaggggtattatgaatatttagggaaaagacaacccgccactctaactgttgactggttcaatgcaacaagcagtaaggtgaatgccaccttcagcgaagcctcgccagtggagctgaagttgacaggcatttacaagaaggaggaggcccacttactcctgaaagcttttcaaattaaaggccaggcagatatttttgtaagcaagttcgaaaatgacaactggggactagatggttatgtgtcatctggacttgaaagaggaggatttacttttcaaggtgacattcatggaaaagactttggaaaatttaagctagaaaggcaagatcctttaaacccagatcaagactcttccagtcattaccacggcaccagcagtggctctgtggcggctgccattctggttcctttctttgctctaattttatcagggtttgcattttacctctacaaacacagaacgagaccaaaagttcaatacaatggctatgctgggcatgaaaacagcaatggacaagcatcgtttgaaaaccccatgtatgatacaaacttaaaacccacagaagccaaggctgtgaggtttgacacaactctgaacacagtctgtacagtggtatagccctcagtgccccaacaggactgattcatagccatacctctgatggacaagcagtgattcctttggtgccatataccactctcccttccactctggctttactgcagcgatcttcaaccttgtctactggcataagtgcagcggggatctctactcaaatgtgtcagggtcttctacggatcaaactacacatgcgttttcattccaaaagtgggttctaaatgcctggctgcatctgtatgaaatcaaggcacactccaggaagactgccacgtcgcgccaacacgtcatactcaatgcctcagactttcatatttctgtgttgctgagatgcctttcaatgcaatcgtctgggctcgtggatatgtccctcaggtgcggtgacagaatggtggcaccacgatatgtgttctcttgtgttgtttttcctttttaaacccccatgaacacgaatactctgaaaaaaataaaaagctttctggaaga

SEQ ID NO: 123125 - DNA, 13108 bp, Homo sapiens
  Payload ID: 4181
  Gene Symbol: CSMD2
  Gene Name: CUB and Sushi multiple domains 2
  Uniprot ID: Q7Z408
  ENST ID: ENST00000241312
  CDS Start-End: 30-10493
tcctgggatggggtaggaggctattgtgaatgaggctcataagcatcgcccccggccctagatggcaagttcaaagccaccacccaagatcagctggccagaactgcacgttccaactgcacggtcccaatgggacagttgagagcccagggttcccatatggctaccccaattacgccaactgcacgtggaccatcaccgcggaagagcagcacagaatccagcttgtgttccagtcctttgccctggaagaggactttgatgtcctgtcggtgtttgatggtccaccccagccagagaatctgcgtacgaggctcacaggctttcagctgccagccaccattgttagtgcagccaccaccctctctctgcgcctcatcagcgactatgcagtcagtgcccaaggcttccacgccacctatgaagttctccccagccacacatgtgggaacccagggaggctgcccaatggcatccagcagggttcaaccttcaacctcggtgacaaggtccgctacagctgcaaccttggcttcttcctggagggccacgccgtgctcacctgccacgctggctctgagaacagcgccacgtgggacttccccctgccttcctgcagagctgatgatgcctgtggtgggaccctgcggggccagagtggcatcatctccagcccccacttcccctcggagtaccataacaatgccgactgcacatggaccatcctggctgagctgggggacaccatcgccctggtgtttattgacttccagctggaggatggttacgactttctggaagtcactgggacagaaggctcctccctctggttcaccggagccagcctcccagcccccgttatcagcagcaagaactggctgcgactgcacttcacatcggatggcaaccaccggcagcgcggattcagtgcccaataccaagtcaagaagcaaattgagttgaagtctcgaggtgtgaagctgatgcccagcaaagacaacagccagaagacgtctgtgttaactcaggttggtgtgtcccaaggacataatatgtgtccagaccctggcatacccgaaaggggcaaaagactaggctcggatttcaggttaggatccagcgtccagttcacctgcaacgagggctatgacctgcaagggtccaagcggatcacctgtatgaaagtgagcgacatgtttgcggcctggagcgaccacaggccagtctgccgagcccgcatgtgtgatgcccaccttcgaggcccctcgggcatcatcacctcccccaatttccccattcagtatgacaacaatgcacactgtgtgtggatcatcacagcactcaacccctccaaggtgatcaagctcgcctttgaggagtttgatttggagaggggctatgacaccctgacggtcggtgatggtggtcaggatggggaccagaagacagttctctacatcctgacaggtacatcggtcccggatctcattgtcagcaccaatcatcaaatgtggctcctcttccagactgatggcagtggcagttccctgggattcaaggcttcttatgaagagatcgagcagggcagttgcggtgaccctggcatacctgcatatggccggagggaaggctcccggtttcaccacggtgacacactcaagtttgagtgccagcccgcctttgagctggtgggacagaaggcaatcacatgccaaaagaataaccaatggtcggctaagaagccaggctgcgtgttctcctgcttcttcaacttcaccagcccgtctggggttgtcctgtctcccaactacccagaggactatggcaaccacctccactgtgtctggctcatcctggccaggcctgagagccgcatccacctggccttcaacgacattgacgtggagcctcagtttgatttcctggtcatcaaggatggggccaccgccgaggcgcccgtcctgggcaccttctcaggaaaccagcttccctcctccatcacaagcagtggccacgtggcccgtctcgagttccagactgaccactccacagggaagaggggcttcaacatcacttttaccaccttccgacacaacgagtgcccggatcctggcgttccagtaaatggcaaacggtttggggacagcctccagctgggcagctccatctccttcctctgtgatgaaggcttccttgggactcagggctcagagaccatcacctgcgtcctgaaggagggcagcgtggtctggaacagcgctgtgctgcggtgtgaagctccctgtggtggtcacctgacttcgcccagcggcaccatcctctctccgggctggcctggcttctacaaggatgccttgagctgtgcctgggtgattgaggcccagccaggctaccccatcaaaatcaccttcgacagattcaaaaccgaggtcaactatgacaccctggaagtacgcgatgggcggacttactcagcgcccttgatcggggtttaccacgggacccaggttccccagttcctcatcagcaccagcaactacctctacctcctcttctctaccgacaagagtcactcggacatcggcttccagctccgctatgagactataacactgcagtcagaccactgtctggatccaggaatcccagtaaatggacagcgtcatgggaatgacttctacgtgggcgcgctggtgaccttcagctgtgactcgggctacacattaagtgacggggagcctctggagtgtgagcccaacttccagtggagccgggccctgcccagttgtgaagctctctgtggtggcttcattcaaggctccagtgggaccatcttgtcgccagggttccctgacttctaccccaacaacttgaactgcacctggattatcgaaacatctcatggcaagggtgtgttcttcactttccacaccttccacctggaaagtggccatgactacctcctcatcactgagaacggcagcttcacccagcccctgaggcagctaactggatctcggctgccagctcccatcagcgctgggctctatggcaacttcactgcccaggtccgcttcatctctgatttctccatgtcatatgaaggattcaacatcaccttctcagagtacgacttggagccctgtgaggagcccgaggtcccagcctacagcatccggaagggcttgcagtttggcgtgggcgacaccttgaccttctcctgcttccccgggtaccgtctggagggcaccgcccgcatcacgtgcctggggggcagacggcgcctgtggagctcgcctctgccaaggtgtgttgctgagtgtgggaattcagtcacaggcactcagggtactttgctgtcccccaactttcctgtgaactacaataacaatcatgaatgcatctactccatccagacccagccagggaagggaattcagctgaaagccagggcattcgaactctccgaaggagatgtcctcaaggtttatgatggcaacaacaactccgcccgtttgctgggagtttttagccattctgagatgatgggggtgactttgaacagcacatccagcagtctgtggcttgatttcatcactgatgctgaaaacaccagcaagggctttgaactgcacttttccagctttgaactcatcaaatgtgaggacccaggaacccccaagtttggctacaaggttcatgatgaaggtcattttgcagggagctccgtgtccttcagctgtgaccctggatacagcctgcggggtagtgaggagctgctgtgtctgagtggagagcgccggacctgggaccggcctctgcccacctgtgtcgccgagtgtggagggacagtgagaggagaggtgtcggggcaggtgctgtcacccgggtatccagctccctatgaacacaatctcaactgcatctggaccatcgaagcagaggccggctgcaccattgggctacacttcctggtgtttgacacagaggaggttcacgacgtgctgcgcatctgggatgggcctgtggagagcggggttctgctgaaggagctgagtggcccggccctgcccaaggacctgcatagcaccttcaactcggtcgtcctgcagttcagcactgacttcttcaccagcaagcagggctttgccattcaattttcagtgtccacagcaacgtcctgcaatgaccctgggatcccgcagaatgggagtcggagtggtgacagttgggaagccggcgactccacagtgttccagtgtgaccctggctacgcgctgcagggaagtgcagagatcagctgtgtgaagatcgagaacaggttcttctggcagcccagcccgccaacatgcatcgctccctgcgggggagacctgacaggaccatctggagtcatcctctcaccaaattacccagaaccctacccgccaggcaaggagtgtgactggaaagtgaccgtctcaccagactacgtcatcgccctggtatttaacatctttaacctggagcctggctatgacttcctccatatctacgacggacgggactctctcagccctctcataggaagcttctatggctcccagctcccaggccgcattgaaagcagcagcaacagcctcttcctcgccttccgcagcgatgcatctgtgagcaatgctggcttcgtcattgactatacagaaaacccgcgggagtcatgttttgatcctggttccatcaagaacggcacacgggtggggtccgacctgaagctgggctcctccgtcacctactactgccacgggggctacgaagttgagggcacctcgaccctgagctgcatcctggggcctgatgggaagcccgtgtggaacaatccccggccagtctgcacagccccctgtgggggacagtatgtgggttcggacggagtggtcttgtcccccaactacccccagaactacaccagtggacagatctgcttgtattttgttactgtgcccaaggactatgtggtgtttggccagttcgccttctttcacacggccctcaacgacgtggtggaggttcacgacggccacagccagcactcgcggctcctcagctccctctcgggctcccatacaggagaatcactgcccttggccacctccaatcaagttctcattaagttcagcgccaaaggcctcgcaccagccagaggcttccactttgtctaccaagcggttcctcgaaccagcgccacgcagtgcagctctgtgccggaaccccgctatggcaagaggctgggcagtgacttctcggtgggggccatcgtccgcttcgaatgcaactccggctatgccctgcaggggtcgccagagatcgagtgcctccctgtgcctggggccttggcccaatggaatgtctcagcgcccacgtgtgtggtgccgtgtggaggcaacctcacagagcgcaggggcaccatcctgtcccctggcttcccagagccgtacctcaacagcctcaactgtgtgtggaagatcgtggtccccgaaggcgctggcatccagatccaagttgtcagttttgtgacagagcagaactgggactcgctggaagtatttgatggtgcagataacactgtaaccatgctggggagtttctcaggaacaaccgtgcctgcccttctgaacagcacctccaaccagctctaccttcatttctactcagatatcagcgtatctgcagctggcttccacttggagtacaaaacggtgggcctgagcagttgtccggaacctgctgtgcccagtaacggggtgaagactggcgagcgctacttggtgaatgatgtggtgtctttccagtgtgagccgggatatgccctccagggccacgcccacatctcctgcatgcccggaacagtgcggcgatggaactaccctcctccactctgtattgcacagtgtgggggaacagtggaggagatggagggggtgatcctgagccccggcttcccaggcaactaccccagtaacatggactgctcctggaaaatagcactgcccgtgggctttggagctcacatccagttcctgaacttctccaccgagcccaaccacgactacatagaaatccggaatggcccctatgagaccagccgcatgatgggaagattcagtggaagcgagcttccaagctccctcctctccacgtcccacgagaccaccgtgtatttccacagcgaccactcccagaatcggccaggattcaagctggagtatcaggatttgacttactcccaccagatttcttccttcctgagaggttttgatctctcggagttggaaagaaccaactcaactcctcccgtcgccgcttcctatgtctgggatcttgatcctggttgtgaagcctatgaacttcaagagtgcccagacccagagccctttgccaatggcattgtgaggggagctggctacaacgtgggacaatcagtgaccttcgagtgcctcccggggtatcaattgactggccaccctgtcctcacgtgtcaacatggcaccaaccggaactgggaccaccccctgcccaagtgtgaagtcccttgtggcgggaacatcacttcttccaacggcactgtgtactccccggggttccctagcccgtactccagctcccaggactgtgtctggctgatcaccgtgcccattggccatggcgtccgcctcaacctcagcctgctgcagacagagccctctggagatttcatcaccatctgggatgggccacagcaaacagcaccacggctcggcgtcttcacccggagcatggccaagaaaacagtgcagagttcatccaaccaggtcctgctcaagttccaccgtgatgcagccacaggggggatcttcgccatagctttctccgcttatccactcaccaaatgccctcctcccaccatcctccccaacgccgaagtcgtcacagagaatgaagaattcaatataggtgacatcgtacgctacagatgcctccctggctttaccttagtggggaatgaaattctgacctgcaaacttggaacctacctgcagtttgaaggaccacccccgatatgtgaagtgcactgtccaacaaatgagcttctgacagactccacaggcgtgatcctgagccagagctaccctggaagctatccccagttccagacctgctcttggctggtgagagtggagcccgactataacatctccctcacagtggagtacttcctcagcgagaagcaatatgatgagtttgagatttttgatggtccatcaggacagagtcctctgctgaaagccctcagtgggaattactcagctcccctgattgtcaccagctcaagcaactctgtgtacctgcgttggtcatctgatcacgcctacaatcggaagggcttcaagatccgctattcagccccttactgcagcctgcccagggctccactccatggcttcatcctaggccagaccagcacccagcccgggggctccatccactttggctgcaacgccggctaccgcctggtgggacacagcatggccatctgtacccggcacccccagggctaccacctgtggagcgaagccatccctctctgtcaagctctttcctgtgggcttcctgaggcccccaagaatggaatggtgtttggcaaggagtacacagtgggaaccaaggccatgtacagctgcagtgaaggctaccacctccaggcaggcgctgaggccactgcagagtgtctggacacaggcctatggagcaaccgcaatgtcccaccacagtgtgtccctgtgacttgtcctgatgtcagtagcatcagcgtggagcatggccgatggaggcttatctttgagacacagtatcagttccaggcccagctgatgctcatctgtgaccctggctactactatactggccaaagggtcatccgctgtcaggccaatggcaaatggagcctcggggactctacgcccacctgccgaatcatctcctgtggagagctcccgattccccccaatggccaccgcatcggaacactgtctgtctacggggcaacagccatcttctcctgcaattccggatacacactggtgggctccagggtgcgtgagtgcatggccaatgggctctggagtggctctgaagtccgctgccttgctggacactgtgggactcctgagcccattgtcaacggacacatcaatggggagaactacagctaccggggcagtgtggtgtaccaatgcaatgctggcttccgcctgatcggcatgtctgtgcgcatctgccagcaggatcatcactggtcgggcaagacccctttctgtgtgctggtgtcctgtggccatccgggctccccgcctcactcccagatgtctggagacagttatactgtgggagcagtggtgcggtacagctgcatcggcaagcgtactctggtgggaaacagcacccgcatgtgtgggctggatggacactggactggctccctccctcactgctcaggaaccagcgtgggagtttgcggtgaccctgggatcccggctcatggcatccgtttgggggacagctttgatccaggcactgtgatgcgcttcagctgtgaagctggccacgtgctccggggatcgtcagagcgcacctgtcaagccaatggctcgtggagcggctcgcagcctgagtgtggagtgatctcttgtgggaaccctgggactccaagtaatgcccgagttgtgttcagtgatggcctggttttctccagctctatcgtctatgagtgccgggaaggatactacgccacaggcctgctcagccgtcactgctcggtcaatggtacctggacaggcagtgaccctgagtgcctcgtcataaactgtggtgaccctgggattccagccaatggccttcggctgggcaatgacttcaggtacaacaaaactgtgacatatcagtgtgtccctggctatatgatggagtcacatagagtatctgtgctgagctgcaccaaggaccggacatggaatggaaccaagcccgtctgcaaagctctcatgtgcaagccacctccgctcatccccaatgggaaggtggtggggtctgacttcatgtggggctcaagtgtgacttatgcctgcctggaggggtaccagctctccctgcccgcggtgttcacctgtgagggaaatgggtcctggaccggagagctgcctcagtgtttccctgtgttctgcggggatcctggtgtcccgtcccgtgggaggagagaggaccgaggcttctcctacaggtcatctgtctccttctcctgccatccccctctggtgctggtgggctctccacgcaggttttgccagtcagatgggacatggagtggcacccagcccagctgcatagatccgaccctgaccacgtgtgcggaccctggtgtgccacagtttgggatacagaacaattctcagggctaccaggttggaagcacagtcctcttccgttgtcaaaaaggctacctgcttcagggctccaccaccaggacctgcctcccaaacctgacctggagtggaaccccacctgactgtgtcccccaccactgcaggcagccagagacgccaacgcatgccaacgtcggggccctggatttgccctccatgggctacacgctcatctactcctgccaggagggcttctccctcaagggtggctccgagcaccgcacctgcaaggcggatggcagctggacaggcaagccgcccatctgcctggaggtccggcccagtgggagacccatcaacactgcccgggagccaccgctcacccaagccttgattcctggggatgtttttgccaagaattccctgtggaaaggggcctatgaataccaggggaagaagcagccagccatgctcagagtgactggcttccaagttgccaacagcaaggtcaatgccaccatgatcgaccacagtggcgtggagctgcacttggctggaacttacaagaaagaagattttcatctcctactccaggtgtaccagattacagggcctgtggagatctttatgaataagttcaaagatgatcactgggctttagatggccatgtctcgtcagagtcctccggagccaccttcatctaccaaggctctgtcaagggccaaggctttgggcagttcggctttcaaagactggacctcaggctgctggagtcagaccccgagtccattggccgccactttgcttccaacagcagctcagtggcagccgcgatcctggtgcctttcatcgccctcattattgcgggcttcgtgctctatctctacaagcacaggagaagacccaaagttcctttcaatggctatgctggccacgagaacaccaatgttcgggccacatttgagaacccaatgtacgaccgcaacatccagcccacagacatcatggccagcgaggcggagttcacagtcagcacagtgtgcacagcagtatagccacccggcctggccgccaccaccgccaccgagagccccgcctccagcagccgttccccagggggcaggaagtaggctcccctgagcacagtgcccagtgcccatcttcgttcgtctccttgcctgtgtctgctactgctgggactcaggccctcgccctgccgccatctatgccagttaccctggagaggactcctgccgtgtcctgaaaaggcagaaaaggaagaggggctgcagacagaggaagaaagtttatggatttaaaatagcaaagcaacttgtggatctgtgtgtgtgtgtgtgtgtatgggcctgatcacacacaaacacacacacctctccttcattcacgtcctatggaagagaccataaaggcttcaaaactagaagtgcgcatgaaggatgcttcatgccctgttccccacacagagaagagatgaagagggggaggtacggtcagctttcaaaacaatatgccccccgcccatcccatgtgtgaggacatggtgactcggtgactgtaacagtaggacacatcccatcatgcggtcagagtgcagaaacccggtcagcgtgcagaaaccagctgtctgctgatgaacggcccatctgcacagcggcagcaaggattaccccaagggcaggaaaaaagtctttggaaatagattgaaaatcagtttctttatttttttcaaacactgttttattgagttctaaacccagtggattaaaaagtcatttgggtcctgggaagcactgggaaagaagggagagccggggaggatagggcaggagtctggccaggagcccaaggtcaagtctggctgtcaactgacaaagagaagagaagacaagtctgtggcccagacaggatgccaagtctgggggcagcagcagggtccttgagagaacaggggagcaagcctgccccagtacccaaaaaacaatggctatcatgtactggggttattctctgtgcctgacactttacctgtagtatttctagtctgcacaataacaccaaaatgtaggatttgttattcccctttgacagatgagaaaacagaagcctgcaaaggtaaagacagagttaggaagtgtggagtcagaatgcaaacccagatcagtctgccccaaagtccactacaccagctgccagaaaccctgttctagaaggggcagctaagaagggaggagccgatgaatctctacagtagcactgtggccaggtctggaaagccaggcaagacacctgtgtgtcctatctgggttctgctgtctccgcgtaggcagcttcggggcaaggattcaactccccaggcctcccacggttggtgctggctccttggctcccagcagccgctgaccatagccagcaaaagacctggcaggtcctgaatcaaaacaacagagtggctgaaagtcacacctctccagctccttgcgagtgggtttgattgattttgacagctatatcatgcttgggtcgttcatgaattccatgagaattgttgggaagttcatgagtttaggaatcaaagtatagcatttagggccactttctctgtcctcgggaaggcccccacaagcttaagcccctgtatacgtgtgacatgctggcctcagagattcatgtcacatattgaaatagcaaatagaaatgtgcaggagcggagggacagcgacacctggttcttaagcaaattctagattggaacaattagaagatctgactgatgttaagagtggccagaggaaagtgagaggcgtccatttccagcagacacaatggaggctgacagaggcaggagcctacccctggccacaccacctctgggacacggcacccccctgggcctggagggagagggccaatccagacacactcacactctcatctctttccttggctggaaacaagtgcaggaagctcccctcccaatttcttatgctcccttcccccttacactcctctccttcgactgctcccttcccccttcttatgcccctctcagaccacccagcggatgcctattcccgccccccacccctcccctgcgtctccttgtaaagttccatgagatgctcgaggagcacctgctggtggggcacccagcactctgctgggcatcaccctccgcacccctgacatttctctccacctccagaggcttggaagggaacagggcagatgaggcccttcacccaccatctacgccatatacccatcaccatcccatgaggaaaaaaaaaaaagtaaaacaaagacaaaaaaaatcttttgtacagagatatatttttattatacaaagtttgtacagtaccaaaaaagaaaaaaaaaaaggtgtaaatttttttttcattattgtaggtaaacggtagtggaagccttttttgtaaatgtaataaaatgtataaatatggttttcagaaaacatcaagtgctgtaaatatgtaatctacacaccttcttggcttgtctgcagtatatacatttaatttatctgtctctgtatatgaggcttccccctggggtcctgcattatggtactttcctgaatttgaaagcaattttaaattttttgaattcaaataaaatataaatttttgcattg

SEQ ID NO: 123126 - DNA, 1544 bp, Homo sapiens
  Payload ID: 4181
  Gene Symbol: CSMD2
  Gene Name: CUB and Sushi multiple domains 2
  ENST ID: ENST00000338325
  CDS Start-End: 414-1091
caactgatgaaaggaggaagaagaaagggacttggaacaagcaagaaaatgagcctaatggtggcccatgtgatcaaatttgcataaggacagaagacaagaccgaaggagctgatgggtagagaggagatattgctgtcaacagagtggaggtctcagtggggaaagatgaactctactggaggttcagaaaacaactgtgaaagaaatacttgaggcatgtttcaacagactgcaaatataccatctaattcttggaaacaagtacaagataaattgattctgaagctgagggctttgggcagcaaaatctgactttccggaagaggtgtaagatggtgctggtggagctttgtaaggattctctgcagggctagagttctgagtccacaggtcctctttgcaaagcccgcatgtgtgatgcccaccttcgaggcccctcgggcatcatcacctcccccaatttccccattcagtatgacaacaatgcacactgtgtgtggatcatcacagcactcaacccctccaaggcgggaggagacccagggaacatacaatgcaacaaggagggtctaagtgtggaaactcaaagtctaagactgaggaatagaagttgtcttctgggaaacagcaaggacaatggatgctgtgtgcctaaccctgttcatggaactggcctacaggtgatcaagctcgcctttgaggagtttgatttggagaggggctatgacaccctgacggtcggtgatggtggtcaggatggggaccagaagacagttctctacatcctgacaggtacatcggtcccggatctcattgtcagcaccaatcatcaaatgtggctcctcttccagactgatggcagtggcagttccctgggattcaaggcttcttatgaagagatcgagcagggcagttgcggtgaccctggcatacctgcatatggccggagggaaggctcccggtttcaccacggtgacacactcaagtttgagtgccagcccgcctttgagctggtgggacagaaggcaatcacatgccaaaagaataaccaatggtcggctaagaagccaggctgcgtgtgtaagtgagcagggaggaggccacgccagggtcttcactgagaggcaggggcccgtttcctagctaatccaggggccccgtccctgggaaccttgcaggttgtaacaacagctgcactctggttggtttattctactcctcggaacgttgctggtggggtccttatttctggcaggaatgtcgactgtagcactgagaacaagtgctcctgacatttggggatgctcttcaacaccgtcttacccttcttggtgatccttaagagcaaggagacaccactgggacaaagcccaccaggctcagacccagacatttcctgctcaccgtcattgccacccctgacaccatctaatccagcagggtggaagggactgtcaagtttgtaaggctgtagacaccaccagcctccagtaactgtgggaaactggccttgccaggatataaacagtttcctaaaattg

SEQ ID NO: 123127 - DNA, 3212 bp, Homo sapiens
  Payload ID: 4181
  Gene Symbol: CSMD2
  Gene Name: CUB and Sushi multiple domains 2
  ENST ID: ENST00000373377
  CDS Start-End: 507-1787
caggagaatcactgcccttggccacctccaatcaagttctcattaagttcagcgccaaaggcctcgcaccagccagaggcttccactttgtctaccaagcggttcctcgaaccagcgccacgcagtgcagctctgtgccggaaccccgctatggcaagaggctgggcagtgacttctcggtgggggccatcgtccgcttcgaatgcaactccggctatgccctgcaggggtcgccagagatcgagtgcctccctgtgcctggggccttggcccaatggaatgtctcagcgcccacgtgtgtggtgccgtgtggaggcaacctcacagagcgcaggggcaccatcctgtcccctggcttcccagagccgtacctcaacagcctcaactgtgtgtggaagatcgtggtccccgaaggcgctggcatccagatccaagttgtcagttttgtgacagagcagaactgggactcgctggaagtatttgatggtgcagataacactgtaaccatgctggggagtttctcaggaacaaccgtgcctgcccttctgaacagcacctccaaccagctctaccttcatttctactcagatatcagcgtatctgcagctggcttccacttggagtacaaaacggtgggcctgagcagttgtccggaacctgctgtgcccagtaacggggtgaagactggcgagcgctacttggtgaatgatgtggtgtctttccagtgtgagccgggatatgccctccagggccacgcccacatctcctgcatgcccggaacagtgcggcgatggaactaccctcctccactctgtattgcacagtgtgggggaacagtggaggagatggagggggtgatcctgagccccggcttcccaggcaactaccccagtaacatggactgctcctggaaaatagcactgcccgtgggctttggagctcacatccagttcctgaacttctccaccgagcccaaccacgactacatagaaatccggaatggcccctatgagaccagccgcatgatgggaagattcagtggaagcgagcttccaagctccctcctctccacgtcccacgagaccaccgtgtatttccacagcgaccactcccagaatcggccaggattcaagctggagtatcaggcctatgaacttcaagagtgcccagacccagagccctttgccaatggcattgtgaggggagctggctacaacgtgggacaatcagtgaccttcgagtgcctcccggggtatcaattgactggccaccctgtcctcacgtgtcaacatggcaccaaccggaactgggaccaccccctgcccaagtgtgaagtcccttgtggcgggaacatcacttcttccaacggcactgtgtactccccggggttccctagcccgtactccagctcccaggactgtgtctggctgatcaccgtgcccattggccatggcgtccgcctcaacctcagcctgctgcagacagagccctctggagatttcatcaccatctgggatgggccacagcaaacagcaccacggctcggcgtcttcacccggagcatggccaagaaaacagtgcagagttcatccaaccaggtcctgctcaagttccaccgtgatgcagccacaggggggatcttcgccatagctttctccgatcactgcagatattttaaccagaaatcaggaaagctggattttactcccagctccaccttgggccagctgtgtaaaaccttgcacaggtcccttccccacttgagacttcagtttcttcacctgtagaattaccggcttggagtttgtgacctgtaagaattctgtgaggtagtaaggcaaatattctaacccccactttacaaatgaagaaatagggcaaaggaaggctcaagtacttgcccaaaaccatgtggatagaactggaaacagaacccagcctccgcagtatctgctgcagtatctgctacagtatctgctctggtgtgactatacagtgttattacatcatgcgtgcacttgcagaaacacactaagactgtgaaagaggtagtgaaagaaacaggaagcaacagagagaaacaaggatgtaaagaacctaagcagctgtgactgccattcccaggagctatcgtccagggtgagtgcaatgtgggaatgagactccgccctctccatctgctcagttcccatgcccctctcattgggcacacctgtcgctccactaatgaaatccaggctttaaggctctgtcattttgacttgtgactttcccatagagtgataagagtatggacttcagagtcacagacgggttcaaaccttggctctgacacatgcaagctatgtaactttgtctgtcatttcacccttctgagcctcaatgttattatgcacaaaataggaatcatataagtacctaacctcctaaagttaaatgaaacaatgcttggaaatccttagctccaggcacagagtataaaaggtgatcaataaattatagttctaatagtcatcattgtcatgattatttttattatatctagatattgacaggcttggtgtaaagttaccttggtggtaggccaggtctcttgttcctgttcctgagccttcacctgtaccagaaccaggcaaaggaggctcagcacagccccaggccatccttatttccaagttcttctcagcaaggtctttcattgagagtgcttgcctaagggcacaatgctccttctgcctctcagatgagacacaaggcccttgctatggtgtaaatgcttaggcccccctagaattcatatgctgacatcctaacccccaaggtgatggtattaggaggtggggccttgggaggcaattaggtcagacaacagagccctcatgaatgggattagtgcctttataaaagagacccacagaatcaccacactgaagccttctcagtggaaagagctaagaagcacaggaaacacagaggccgaggtgggcggatcgcctgaggtgaggagttcaagaccagcctgaccaacatggagaaaccctgtctctactaaaaatacaaaattagatgggcgtggtggcgcatgcctgtaatcccagctactcaggaggctgaggcagaagaatcggttgaacctgggaggcggaggttgcagtgagccaagatcacgccattgcactccagcctgggcaacaagtgtgaaactccatctc

SEQ ID NO: 123128 - DNA, 4379 bp, Homo sapiens
  Payload ID: 4181
  Gene Symbol: CSMD2
  Gene Name: CUB and Sushi multiple domains 2
  Uniprot ID: Q7Z408
  ENST ID: ENST00000373380
  CDS Start-End: 222-3725
gagagacagacaaacagcacaagagacagaaacaaagcaggcagcaccataggtagggaagtattttttttttaagtttgagaggcatttctgtagacagtccaacaactggacagacacgcaggcaccttggcaggtagacaggcaaacgacttgtcatctttgtcaggttcttcagagctgtgagttgctttctggatgcagctgatgggggttaatctatggttattgtgattctctttccagctgagtgtgggaattcagtcacaggcactcagggtactttgctgtcccccaactttcctgtgaactacaataacaatcatgaatgcatctactccatccagacccagccagggaagggaattcagctgaaagccagggcattcgaactctccgaaggagatgtcctcaaggtttatgatggcaacaacaactccgcccgtttgctgggagtttttagccattctgagatgatgggggtgactttgaacagcacatccagcagtctgtggcttgatttcatcactgatgctgaaaacaccagcaagggctttgaactgcacttttccagctttgaactcatcaaatgtgaggacccaggaacccccaagtttggctacaaggttcatgatgaaggtcattttgcagggagctccgtgtccttcagctgtgaccctggatacagcctgcggggtagtgaggagctgctgtgtctgagtggagagcgccggacctgggaccggcctctgcccacctgtgtcgccgagtgtggagggacagtgagaggagaggtgtcggggcaggtgctgtcacccgggtatccagctccctatgaacacaatctcaactgcatctggaccatcgaagcagaggccggctgcaccattgggctacacttcctggtgtttgacacagaggaggttcacgacgtgctgcgcatctgggatgggcctgtggagagcggggttctgctgaaggagctgagtggcccggccctgcccaaggacctgcatagcaccttcaactcggtcgtcctgcagttcagcactgacttcttcaccagcaagcagggctttgccattcaattttcagtgtccacagcaacgtcctgcaatgaccctgggatcccgcagaatgggagtcggagtggtgacagttgggaagccggcgactccacagtgttccagtgtgaccctggctacgcgctgcagggaagtgcagagatcagctgtgtgaagatcgagaacaggttcttctggcagcccagcccgccaacatgcatcgctccctgcgggggagacctgacaggaccatctggagtcatcctctcaccaaattacccagaaccctacccgccaggcaaggagtgtgactggaaagtgaccgtctcaccagactacgtcatcgccctggtatttaacatctttaacctggagcctggctatgacttcctccatatctacgacggacgggactctctcagccctctcataggaagcttctatggctcccagctcccaggccgcattgaaagcagcagcaacagcctcttcctcgccttccgcagcgatgcatctgtgagcaatgctggcttcgtcattgactatacagaaaacccgcgggagtcatgttttgatcctggttccatcaagaacggcacacgggtggggtccgacctgaagctgggctcctccgtcacctactactgccacgggggctacgaagttgagggcacctcgaccctgagctgcatcctggggcctgatgggaagcccgtgtggaacaatccccggccagtctgcacagccccctgtgggggacagtatgtgggttcggacggagtggtcttgtcccccaactacccccagaactacaccagtggacagatctgcttgtattttgttactgtgcccaaggactatgtggtgtttggccagttcgccttctttcacacggccctcaacgacgtggtggaggttcacgacggccacagccagcactcgcggctcctcagctccctctcgggctcccatacaggagaatcactgcccttggccacctccaatcaagttctcattaagttcagcgccaaaggcctcgcaccagccagaggcttccactttgtctaccaagcggttcctcgaaccagcgccacgcagtgcagctctgtgccggaaccccgctatggcaagaggctgggcagtgacttctcggtgggggccatcgtccgcttcgaatgcaactccggctatgccctgcaggggtcgccagagatcgagtgcctccctgtgcctggggccttggcccaatggaatgtctcagcgcccacgtgtgtggtgccgtgtggaggcaacctcacagagcgcaggggcaccatcctgtcccctggcttcccagagccgtacctcaacagcctcaactgtgtgtggaagatcgtggtccccgaaggcgctggcatccagatccaagttgtcagttttgtgacagagcagaactgggactcgctggaagtatttgatggtgcagataacactgtaaccatgctggggagtttctcaggaacaaccgtgcctgcccttctgaacagcacctccaaccagctctaccttcatttctactcagatatcagcgtatctgcagctggcttccacttggagtacaaaacggtgggcctgagcagttgtccggaacctgctgtgcccagtaacggggtgaagactggcgagcgctacttggtgaatgatgtggtgtctttccagtgtgagccgggatatgccctccagggccacgcccacatctcctgcatgcccggaacagtgcggcgatggaactaccctcctccactctgtattgcacagtgtgggggaacagtggaggagatggagggggtgatcctgagccccggcttcccaggcaactaccccagtaacatggactgctcctggaaaatagcactgcccgtgggctttggagctcacatccagttcctgaacttctccaccgagcccaaccacgactacatagaaatccggaatggcccctatgagaccagccgcatgatgggaagattcagtggaagcgagcttccaagctccctcctctccacgtcccacgagaccaccgtgtatttccacagcgaccactcccagaatcggccaggattcaagctggagtatcaggcctatgaacttcaagagtgcccagacccagagccctttgccaatggcattgtgaggggagctggctacaacgtgggacaatcagtgaccttcgagtgcctcccggggtatcaattgactggccaccctgtcctcacgtgtcaacatggcaccaaccggaactgggaccaccccctgcccaagtgtgaagtcccttgtggcgggaacatcacttcttccaacggcactgtgtactccccggggttccctagcccgtactccagctcccaggactgtgtctggctgatcaccgtgcccattggccatggcgtccgcctcaacctcagcctgctgcagacagagccctctggagatttcatcaccatctgggatgggccacagcaaacagcaccacggctcggcgtcttcacccggagcatggccaagaaaacagtgcagagttcatccaaccaggtcctgctcaagttccaccgtgatgcagccacaggggggatcttcgccatagctttctccgggcacttggcagctgtttgtacattgtgacacccctccacgcacacatctgccccccagccacagaagcttggaccagaggtggacacctgagctgactgcagcaggggcaatcagatgttctctcttgggaagttgaaataggacccaagagattctacttttgcctggacccatctcctgaaaagataaaaatccaagtgcaatggattgctgctcttctactttccatgtggaccaaaaagtagaacaatcctatgtgcagaaagagaatgattgagaagtggaaaaatttccttggtttctgatggcccttcagttcctcgtcctctacctttgtgaagtctggctgcaaacccacccttgggttctctcttctctgagaggcttttttgcttattctagcctgaattgatttatttacatccaaaggttcccaaggaatacaacaacctaggacccagcaatcctacttctgggaattatgcaaagatatgtgcatgaagatattgcttgatatgttataacagggaaattagaaataatctaaatgtaaaaatagtaagagattaggtattataaatttaaagtgtatactcagagagagagagatagggaaagatacagtcattacaaatcattcatgtatgaacctgggcaacatagtgagactctgcctctacc

SEQ ID NO: 123129 - DNA, 13698 bp, Homo sapiens
  Payload ID: 4181
  Gene Symbol: CSMD2
  Gene Name: CUB and Sushi multiple domains 2
  Uniprot ID: Q7Z408
  ENST ID: ENST00000373381
  CDS Start-End: 178-11073
gagagcgcagcgcgcctctccccggccgggcggacacttggttcattccagccgcagaagctcagggctcccgcgtaccgggattttttccgagcagaaaaaagctccagagctctcctgacctcctttctcctcggcggcgagcggagcctctccctcggcgctgccggccgcgccatgccgcgctcgcggggacgggagctggggcgctgcggctgccccgcggggagggctcgcggcgaaaccgggatttcggcgcttgtgccgggcgccgggagccgctggggccgcccgccgccgccaacgccgccgcctctgctgctgttgctgggctgtgggttgctcagcgtctcggccgccgcgggccagaactgcacgttccaactgcacggtcccaatgggacagttgagagcccagggttcccatatggctaccccaattacgccaactgcacgtggaccatcaccgcggaagagcagcacagaatccagcttgtgttccagtcctttgccctggaagaggactttgatgtcctgtcggtgtttgatggtccaccccagccagagaatctgcgtacgaggctcacaggctttcagctgccagccaccattgttagtgcagccaccaccctctctctgcgcctcatcagcgactatgcagtcagtgcccaaggcttccacgccacctatgaagttctccccagccacacatgtgggaacccagggaggctgcccaatggcatccagcagggttcaaccttcaacctcggtgacaaggtccgctacagctgcaaccttggcttcttcctggagggccacgccgtgctcacctgccacgctggctctgagaacagcgccacgtgggacttccccctgccttcctgcagagctgatgatgcctgtggtgggaccctgcggggccagagtggcatcatctccagcccccacttcccctcggagtaccataacaatgccgactgcacatggaccatcctggctgagctgggggacaccatcgccctggtgtttattgacttccagctggaggatggttacgactttctggaagtcactgggacagaaggctcctccctctggttcaccggagccagcctcccagcccccgttatcagcagcaagaactggctgcgactgcacttcacatcggatggcaaccaccggcagcgcggattcagtgcccaataccaagtcaagaagcaaattgagttgaagtctcgaggtgtgaagctgatgcccagcaaagacaacagccagaagacgtctgtgttaactcaggttggtgtgtcccaaggacataatatgtgtccagaccctggcatacccgaaaggggcaaaagactaggctcggatttcaggttaggatccagcgtccagttcacctgcaacgagggctatgacctgcaagggtccaagcggatcacctgtatgaaagtgagcgacatgtttgcggcctggagcgaccacaggccagtctgccgagcccgcatgtgtgatgcccaccttcgaggcccctcgggcatcatcacctcccccaatttccccattcagtatgacaacaatgcacactgtgtgtggatcatcacagcactcaacccctccaaggtgatcaagctcgcctttgaggagtttgatttggagaggggctatgacaccctgacggtcggtgatggtggtcaggatggggaccagaagacagttctctacatcctgacaggtacatcggtcccggatctcattgtcagcaccaatcatcaaatgtggctcctcttccagactgatggcagtggcagttccctgggattcaaggcttcttatgaagagatcgagcagggcagttgcggtgaccctggcatacctgcatatggccggagggaaggctcccggtttcaccacggtgacacactcaagtttgagtgccagcccgcctttgagctggtgggacagaaggcaatcacatgccaaaagaataaccaatggtcggctaagaagccaggctgcgtgttctcctgcttcttcaacttcaccagcccgtctggggttgtcctgtctcccaactacccagaggactatggcaaccacctccactgtgtctggctcatcctggccaggcctgagagccgcatccacctggccttcaacgacattgacgtggagcctcagtttgatttcctggtcatcaaggatggggccaccgccgaggcgcccgtcctgggcaccttctcaggaaaccagcttccctcctccatcacaagcagtggccacgtggcccgtctcgagttccagactgaccactccacagggaagaggggcttcaacatcacttttaccaccttccgacacaacgagtgcccggatcctggcgttccagtaaatggcaaacggtttggggacagcctccagctgggcagctccatctccttcctctgtgatgaaggcttccttgggactcagggctcagagaccatcacctgcgtcctgaaggagggcagcgtggtctggaacagcgctgtgctgcggtgtgaagctccctgtggtggtcacctgacttcgcccagcggcaccatcctctctccgggctggcctggcttctacaaggatgccttgagctgtgcctgggtgattgaggcccagccaggctaccccatcaaaatcaccttcgacagattcaaaaccgaggtcaactatgacaccctggaagtacgcgatgggcggacttactcagcgcccttgatcggggtttaccacgggacccaggttccccagttcctcatcagcaccagcaactacctctacctcctcttctctaccgacaagagtcactcggacatcggcttccagctccgctatgagactataacactgcagtcagaccactgtctggatccaggaatcccagtaaatggacagcgtcatgggaatgacttctacgtgggcgcgctggtgaccttcagctgtgactcgggctacacattaagtgacggggagcctctggagtgtgagcccaacttccagtggagccgggccctgcccagttgtgaagctctctgtggtggcttcattcaaggctccagtgggaccatcttgtcgccagggttccctgacttctaccccaacaacttgaactgcacctggattatcgaaacatctcatggcaagggtgtgttcttcactttccacaccttccacctggaaagtggccatgactacctcctcatcactgagaacggcagcttcacccagcccctgaggcagctaactggatctcggctgccagctcccatcagcgctgggctctatggcaacttcactgcccaggtccgcttcatctctgatttctccatgtcatatgaaggattcaacatcaccttctcagagtacgacttggagccctgtgaggagcccgaggtcccagcctacagcatccggaagggcttgcagtttggcgtgggcgacaccttgaccttctcctgcttccccgggtaccgtctggagggcaccgcccgcatcacgtgcctggggggcagacggcgcctgtggagctcgcctctgccaaggtgtgttgctgagtgtgggaattcagtcacaggcactcagggtactttgctgtcccccaactttcctgtgaactacaataacaatcatgaatgcatctactccatccagacccagccagggaagggaattcagctgaaagccagggcattcgaactctccgaaggagatgtcctcaaggtttatgatggcaacaacaactccgcccgtttgctgggagtttttagccattctgagatgatgggggtgactttgaacagcacatccagcagtctgtggcttgatttcatcactgatgctgaaaacaccagcaagggctttgaactgcacttttccagctttgaactcatcaaatgtgaggacccaggaacccccaagtttggctacaaggttcatgatgaaggtcattttgcagggagctccgtgtccttcagctgtgaccctggatacagcctgcggggtagtgaggagctgctgtgtctgagtggagagcgccggacctgggaccggcctctgcccacctgtgtcgccgagtgtggagggacagtgagaggagaggtgtcggggcaggtgctgtcacccgggtatccagctccctatgaacacaatctcaactgcatctggaccatcgaagcagaggccggctgcaccattgggctacacttcctggtgtttgacacagaggaggttcacgacgtgctgcgcatctgggatgggcctgtggagagcggggttctgctgaaggagctgagtggcccggccctgcccaaggacctgcatagcaccttcaactcggtcgtcctgcagttcagcactgacttcttcaccagcaagcagggctttgccattcaattttcagtgtccacagcaacgtcctgcaatgaccctgggatcccgcagaatgggagtcggagtggtgacagttgggaagccggcgactccacagtgttccagtgtgaccctggctacgcgctgcagggaagtgcagagatcagctgtgtgaagatcgagaacaggttcttctggcagcccagcccgccaacatgcatcgctccctgcgggggagacctgacaggaccatctggagtcatcctctcaccaaattacccagaaccctacccgccaggcaaggagtgtgactggaaagtgaccgtctcaccagactacgtcatcgccctggtatttaacatctttaacctggagcctggctatgacttcctccatatctacgacggacgggactctctcagccctctcataggaagcttctatggctcccagctcccaggccgcattgaaagcagcagcaacagcctcttcctcgccttccgcagcgatgcatctgtgagcaatgctggcttcgtcattgactatacagaaaacccgcgggagtcatgttttgatcctggttccatcaagaacggcacacgggtggggtccgacctgaagctgggctcctccgtcacctactactgccacgggggctacgaagttgagggcacctcgaccctgagctgcatcctggggcctgatgggaagcccgtgtggaacaatccccggccagtctgcacagccccctgtgggggacagtatgtgggttcggacggagtggtcttgtcccccaactacccccagaactacaccagtggacagatctgcttgtattttgttactgtgcccaaggactatgtggtgtttggccagttcgccttctttcacacggccctcaacgacgtggtggaggttcacgacggccacagccagcactcgcggctcctcagctccctctcgggctcccatacaggagaatcactgcccttggccacctccaatcaagttctcattaagttcagcgccaaaggcctcgcaccagccagaggcttccactttgtctaccaagcggttcctcgaaccagcgccacgcagtgcagctctgtgccggaaccccgctatggcaagaggctgggcagtgacttctcggtgggggccatcgtccgcttcgaatgcaactccggctatgccctgcaggggtcgccagagatcgagtgcctccctgtgcctggggccttggcccaatggaatgtctcagcgcccacgtgtgtggtgccgtgtggaggcaacctcacagagcgcaggggcaccatcctgtcccctggcttcccagagccgtacctcaacagcctcaactgtgtgtggaagatcgtggtccccgaaggcgctggcatccagatccaagttgtcagttttgtgacagagcagaactgggactcgctggaagtatttgatggtgcagataacactgtaaccatgctggggagtttctcaggaacaaccgtgcctgcccttctgaacagcacctccaaccagctctaccttcatttctactcagatatcagcgtatctgcagctggcttccacttggagtacaaaacggtgggcctgagcagttgtccggaacctgctgtgcccagtaacggggtgaagactggcgagcgctacttggtgaatgatgtggtgtctttccagtgtgagccgggatatgccctccagggccacgcccacatctcctgcatgcccggaacagtgcggcgatggaactaccctcctccactctgtattgcacagtgtgggggaacagtggaggagatggagggggtgatcctgagccccggcttcccaggcaactaccccagtaacatggactgctcctggaaaatagcactgcccgtgggctttggagctcacatccagttcctgaacttctccaccgagcccaaccacgactacatagaaatccggaatggcccctatgagaccagccgcatgatgggaagattcagtggaagcgagcttccaagctccctcctctccacgtcccacgagaccaccgtgtatttccacagcgaccactcccagaatcggccaggattcaagctggagtatcaggcctatgaacttcaagagtgcccagacccagagccctttgccaatggcattgtgaggggagctggctacaacgtgggacaatcagtgaccttcgagtgcctcccggggtatcaattgactggccaccctgtcctcacgtgtcaacatggcaccaaccggaactgggaccaccccctgcccaagtgtgaagtcccttgtggcgggaacatcacttcttccaacggcactgtgtactccccggggttccctagcccgtactccagctcccaggactgtgtctggctgatcaccgtgcccattggccatggcgtccgcctcaacctcagcctgctgcagacagagccctctggagatttcatcaccatctgggatgggccacagcaaacagcaccacggctcggcgtcttcacccggagcatggccaagaaaacagtgcagagttcatccaaccaggtcctgctcaagttccaccgtgatgcagccacaggggggatcttcgccatagctttctccgcttatccactcaccaaatgccctcctcccaccatcctccccaacgccgaagtcgtcacagagaatgaagaattcaatataggtgacatcgtacgctacagatgcctccctggctttaccttagtggggaatgaaattctgacctgcaaacttggaacctacctgcagtttgaaggaccacccccgatatgtgaagtgcactgtccaacaaatgagcttctgacagactccacaggcgtgatcctgagccagagctaccctggaagctatccccagttccagacctgctcttggctggtgagagtggagcccgactataacatctccctcacagtggagtacttcctcagcgagaagcaatatgatgagtttgagatttttgatggtccatcaggacagagtcctctgctgaaagccctcagtgggaattactcagctcccctgattgtcaccagctcaagcaactctgtgtacctgcgttggtcatctgatcacgcctacaatcggaagggcttcaagatccgctattcagccccttactgcagcctgcccagggctccactccatggcttcatcctaggccagaccagcacccagcccgggggctccatccactttggctgcaacgccggctaccgcctggtgggacacagcatggccatctgtacccggcacccccagggctaccacctgtggagcgaagccatccctctctgtcaagctctttcctgtgggcttcctgaggcccccaagaatggaatggtgtttggcaaggagtacacagtgggaaccaaggccatgtacagctgcagtgaaggctaccacctccaggcaggcgctgaggccactgcagagtgtctggacacaggcctatggagcaaccgcaatgtcccaccacagtgtgtccctgtgacttgtcctgatgtcagtagcatcagcgtggagcatggccgatggaggcttatctttgagacacagtatcagttccaggcccagctgatgctcatctgtgaccctggctactactatactggccaaagggtcatccgctgtcaggccaatggcaaatggagcctcggggactctacgcccacctgccgaatcatctcctgtggagagctcccgattccccccaatggccaccgcatcggaacactgtctgtctacggggcaacagccatcttctcctgcaattccggatacacactggtgggctccagggtgcgtgagtgcatggccaatgggctctggagtggctctgaagtccgctgccttgccactcagaccaagctccactccattttctataagctcctcttcgatgtactctcttccccatccctcaccaaagctggacactgtgggactcctgagcccattgtcaacggacacatcaatggggagaactacagctaccggggcagtgtggtgtaccaatgcaatgctggcttccgcctgatcggcatgtctgtgcgcatctgccagcaggatcatcactggtcgggcaagacccctttctgtgtgccaattacctgtggacacccaggcaaccctgtcaacggcctcactcagggtaaccagtttaacctcaacgatgtggtcaagtttgtttgcaaccctgggtatatggctgagggggctgctaggtcccaatgcctggccagcgggcaatggagtgacatgctgcccacctgcagaatcatcaactgtacagatcctggacaccaagaaaatagtgttcgtcaggtccacgccagcggcccgcacaggttcagcttcggcaccactgtgtcttaccggtgcaaccacggcttctacctcctgggcaccccagtgctcagctgccagggagatggcacatgggaccgtccccgcccccagtgtctcttggtgtcctgtggccatccgggctccccgcctcactcccagatgtctggagacagttatactgtgggagcagtggtgcggtacagctgcatcggcaagcgtactctggtgggaaacagcacccgcatgtgtgggctggatggacactggactggctccctccctcactgctcaggaaccagcgtgggagtttgcggtgaccctgggatcccggctcatggcatccgtttgggggacagctttgatccaggcactgtgatgcgcttcagctgtgaagctggccacgtgctccggggatcgtcagagcgcacctgtcaagccaatggctcgtggagcggctcgcagcctgagtgtggagtgatctcttgtgggaaccctgggactccaagtaatgcccgagttgtgttcagtgatggcctggttttctccagctctatcgtctatgagtgccgggaaggatactacgccacaggcctgctcagccgtcactgctcggtcaatggtacctggacaggcagtgaccctgagtgcctcgtcataaactgtggtgaccctgggattccagccaatggccttcggctgggcaatgacttcaggtacaacaaaactgtgacatatcagtgtgtccctggctatatgatggagtcacatagagtatctgtgctgagctgcaccaaggaccggacatggaatggaaccaagcccgtctgcaaagctctcatgtgcaagccacctccgctcatccccaatgggaaggtggtggggtctgacttcatgtggggctcaagtgtgacttatgcctgcctggaggggtaccagctctccctgcccgcggtgttcacctgtgagggaaatgggtcctggaccggagagctgcctcagtgtttccctgtgttctgcggggatcctggtgtcccgtcccgtgggaggagagaggaccgaggcttctcctacaggtcatctgtctccttctcctgccatccccctctggtgctggtgggctctccacgcaggttttgccagtcagatgggacatggagtggcacccagcccagctgcatagatccgaccctgaccacgtgtgcggaccctggtgtgccacagtttgggatacagaacaattctcagggctaccaggttggaagcacagtcctcttccgttgtcaaaaaggctacctgcttcagggctccaccaccaggacctgcctcccaaacctgacctggagtggaaccccacctgactgtgtcccccaccactgcaggcagccagagacgccaacgcatgccaacgtcggggccctggatttgccctccatgggctacacgctcatctactcctgccaggagggcttctccctcaagggtggctccgagcaccgcacctgcaaggcggatggcagctggacaggcaagccgcccatctgcctggaggtccggcccagtgggagacccatcaacactgcccgggagccaccgctcacccaagccttgattcctggggatgtttttgccaagaattccctgtggaaaggggcctatgaataccaggggaagaagcagccagccatgctcagagtgactggcttccaagttgccaacagcaaggtcaatgccaccatgatcgaccacagtggcgtggagctgcacttggctggaacttacaagaaagaagattttcatctcctactccaggtgtaccagattacagggcctgtggagatctttatgaataagttcaaagatgatcactgggctttagatggccatgtctcgtcagagtcctccggagccaccttcatctaccaaggctctgtcaagggccaaggctttgggcagttcggctttcaaagactggacctcaggctgctggagtcagaccccgagtccattggccgccactttgcttccaacagcagctcagtggcagccgcgatcctggtgcctttcatcgccctcattattgcgggcttcgtgctctatctctacaagcacaggagaagacccaaagttcctttcaatggctatgctggccacgagaacaccaatgttcgggccacatttgagaacccaatgtacgaccgcaacatccagcccacagacatcatggccagcgaggcggagttcacagtcagcacagtgtgcacagcagtatagccacccggcctggccgccaccaccgccaccgagagccccgcctccagcagccgttccccagggggcaggaagtaggctcccctgagcacagtgcccagtgcccatcttcgttcgtctccttgcctgtgtctgctactgctgggactcaggccctcgccctgccgccatctatgccagttaccctggagaggactcctgccgtgtcctgaaaaggcagaaaaggaagaggggctgcagacagaggaagaaagtttatggatttaaaatagcaaagcaacttgtggatctgtgtgtgtgtgtgtgtgtatgggcctgatcacacacaaacacacacacctctccttcattcacgtcctatggaagagaccataaaggcttcaaaactagaagtgcgcatgaaggatgcttcatgccctgttccccacacagagaagagatgaagagggggaggtacggtcagctttcaaaacaatatgccccccgcccatcccatgtgtgaggacatggtgactcggtgactgtaacagtaggacacatcccatcatgcggtcagagtgcagaaacccggtcagcgtgcagaaaccagctgtctgctgatgaacggcccatctgcacagcggcagcaaggattaccccaagggcaggaaaaaagtctttggaaatagattgaaaatcagtttctttatttttttcaaacactgttttattgagttctaaacccagtggattaaaaagtcatttgggtcctgggaagcactgggaaagaagggagagccggggaggatagggcaggagtctggccaggagcccaaggtcaagtctggctgtcaactgacaaagagaagagaagacaagtctgtggcccagacaggatgccaagtctgggggcagcagcagggtccttgagagaacaggggagcaagcctgccccagtacccaaaaaacaatggctatcatgtactggggttattctctgtgcctgacactttacctgtagtatttctagtctgcacaataacaccaaaatgtaggatttgttattcccctttgacagatgagaaaacagaagcctgcaaaggtaaagacagagttaggaagtgtggagtcagaatgcaaacccagatcagtctgccccaaagtccactacaccagctgccagaaaccctgttctagaaggggcagctaagaagggaggagccgatgaatctctacagtagcactgtggccaggtctggaaagccaggcaagacacctgtgtgtcctatctgggttctgctgtctccgcgtaggcagcttcggggcaaggattcaactccccaggcctcccacggttggtgctggctccttggctcccagcagccgctgaccatagccagcaaaagacctggcaggtcctgaatcaaaacaacagagtggctgaaagtcacacctctccagctccttgcgagtgggtttgattgattttgacagctatatcatgcttgggtcgttcatgaattccatgagaattgttgggaagttcatgagtttaggaatcaaagtatagcatttagggccactttctctgtcctcgggaaggcccccacaagcttaagcccctgtatacgtgtgacatgctggcctcagagattcatgtcacatattgaaatagcaaatagaaatgtgcaggagcggagggacagcgacacctggttcttaagcaaattctagattggaacaattagaagatctgactgatgttaagagtggccagaggaaagtgagaggcgtccatttccagcagacacaatggaggctgacagaggcaggagcctacccctggccacaccacctctgggacacggcacccccctgggcctggagggagagggccaatccagacacactcacactctcatctctttccttggctggaaacaagtgcaggaagctcccctcccaatttcttatgctcccttcccccttacactcctctccttcgactgctcccttcccccttcttatgcccctctcagaccacccagcggatgcctattcccgccccccacccctcccctgcgtctccttgtaaagttccatgagatgctcgaggagcacctgctggtggggcacccagcactctgctgggcatcaccctccgcacccctgacatttctctccacctccagaggcttggaagggaacagggcagatgaggcccttcacccaccatctacgccatatacccatcaccatcccatgaggaaaaaaaaaaaagtaaaacaaagacaaaaaaaatcttttgtacagagatatatttttattatacaaagtttgtacagtaccaaaaaagaaaaaaaaaaaggtgtaaatttttttttcattattgtaggtaaacggtagtggaagccttttttgtaaatgtaataaaatgtataaatatggttttcagaaaacatcaagtgctgtaaatatgtaatctacacaccttcttggcttgtctgcagtatatacatttaatttatctgtctctgtatatgaggcttccccctggggtcctgcattatggtactttcctgaatttgaaagcaattttaaattttttgaattcaaataaaatataaatttttgcattggttttcttac

SEQ ID NO: 123130 - DNA, 13118 bp, Homo sapiens
  Payload ID: 4181
  Gene Symbol: CSMD2
  Gene Name: CUB and Sushi multiple domains 2
  Uniprot ID: Q7Z408
  ENST ID: ENST00000373388
  CDS Start-End: 30-10493
tcctgggatggggtaggaggctattgtgaatgaggctcataagcatcgcccccggccctagatggcaagttcaaagccaccacccaagatcagctggccagaactgcacgttccaactgcacggtcccaatgggacagttgagagcccagggttcccatatggctaccccaattacgccaactgcacgtggaccatcaccgcggaagagcagcacagaatccagcttgtgttccagtcctttgccctggaagaggactttgatgtcctgtcggtgtttgatggtccaccccagccagagaatctgcgtacgaggctcacaggctttcagctgccagccaccattgttagtgcagccaccaccctctctctgcgcctcatcagcgactatgcagtcagtgcccaaggcttccacgccacctatgaagttctccccagccacacatgtgggaacccagggaggctgcccaatggcatccagcagggttcaaccttcaacctcggtgacaaggtccgctacagctgcaaccttggcttcttcctggagggccacgccgtgctcacctgccacgctggctctgagaacagcgccacgtgggacttccccctgccttcctgcagagctgatgatgcctgtggtgggaccctgcggggccagagtggcatcatctccagcccccacttcccctcggagtaccataacaatgccgactgcacatggaccatcctggctgagctgggggacaccatcgccctggtgtttattgacttccagctggaggatggttacgactttctggaagtcactgggacagaaggctcctccctctggttcaccggagccagcctcccagcccccgttatcagcagcaagaactggctgcgactgcacttcacatcggatggcaaccaccggcagcgcggattcagtgcccaataccaagtcaagaagcaaattgagttgaagtctcgaggtgtgaagctgatgcccagcaaagacaacagccagaagacgtctgtgttaactcaggttggtgtgtcccaaggacataatatgtgtccagaccctggcatacccgaaaggggcaaaagactaggctcggatttcaggttaggatccagcgtccagttcacctgcaacgagggctatgacctgcaagggtccaagcggatcacctgtatgaaagtgagcgacatgtttgcggcctggagcgaccacaggccagtctgccgagcccgcatgtgtgatgcccaccttcgaggcccctcgggcatcatcacctcccccaatttccccattcagtatgacaacaatgcacactgtgtgtggatcatcacagcactcaacccctccaaggtgatcaagctcgcctttgaggagtttgatttggagaggggctatgacaccctgacggtcggtgatggtggtcaggatggggaccagaagacagttctctacatcctgacaggtacatcggtcccggatctcattgtcagcaccaatcatcaaatgtggctcctcttccagactgatggcagtggcagttccctgggattcaaggcttcttatgaagagatcgagcagggcagttgcggtgaccctggcatacctgcatatggccggagggaaggctcccggtttcaccacggtgacacactcaagtttgagtgccagcccgcctttgagctggtgggacagaaggcaatcacatgccaaaagaataaccaatggtcggctaagaagccaggctgcgtgttctcctgcttcttcaacttcaccagcccgtctggggttgtcctgtctcccaactacccagaggactatggcaaccacctccactgtgtctggctcatcctggccaggcctgagagccgcatccacctggccttcaacgacattgacgtggagcctcagtttgatttcctggtcatcaaggatggggccaccgccgaggcgcccgtcctgggcaccttctcaggaaaccagcttccctcctccatcacaagcagtggccacgtggcccgtctcgagttccagactgaccactccacagggaagaggggcttcaacatcacttttaccaccttccgacacaacgagtgcccggatcctggcgttccagtaaatggcaaacggtttggggacagcctccagctgggcagctccatctccttcctctgtgatgaaggcttccttgggactcagggctcagagaccatcacctgcgtcctgaaggagggcagcgtggtctggaacagcgctgtgctgcggtgtgaagctccctgtggtggtcacctgacttcgcccagcggcaccatcctctctccgggctggcctggcttctacaaggatgccttgagctgtgcctgggtgattgaggcccagccaggctaccccatcaaaatcaccttcgacagattcaaaaccgaggtcaactatgacaccctggaagtacgcgatgggcggacttactcagcgcccttgatcggggtttaccacgggacccaggttccccagttcctcatcagcaccagcaactacctctacctcctcttctctaccgacaagagtcactcggacatcggcttccagctccgctatgagactataacactgcagtcagaccactgtctggatccaggaatcccagtaaatggacagcgtcatgggaatgacttctacgtgggcgcgctggtgaccttcagctgtgactcgggctacacattaagtgacggggagcctctggagtgtgagcccaacttccagtggagccgggccctgcccagttgtgaagctctctgtggtggcttcattcaaggctccagtgggaccatcttgtcgccagggttccctgacttctaccccaacaacttgaactgcacctggattatcgaaacatctcatggcaagggtgtgttcttcactttccacaccttccacctggaaagtggccatgactacctcctcatcactgagaacggcagcttcacccagcccctgaggcagctaactggatctcggctgccagctcccatcagcgctgggctctatggcaacttcactgcccaggtccgcttcatctctgatttctccatgtcatatgaaggattcaacatcaccttctcagagtacgacttggagccctgtgaggagcccgaggtcccagcctacagcatccggaagggcttgcagtttggcgtgggcgacaccttgaccttctcctgcttccccgggtaccgtctggagggcaccgcccgcatcacgtgcctggggggcagacggcgcctgtggagctcgcctctgccaaggtgtgttgctgagtgtgggaattcagtcacaggcactcagggtactttgctgtcccccaactttcctgtgaactacaataacaatcatgaatgcatctactccatccagacccagccagggaagggaattcagctgaaagccagggcattcgaactctccgaaggagatgtcctcaaggtttatgatggcaacaacaactccgcccgtttgctgggagtttttagccattctgagatgatgggggtgactttgaacagcacatccagcagtctgtggcttgatttcatcactgatgctgaaaacaccagcaagggctttgaactgcacttttccagctttgaactcatcaaatgtgaggacccaggaacccccaagtttggctacaaggttcatgatgaaggtcattttgcagggagctccgtgtccttcagctgtgaccctggatacagcctgcggggtagtgaggagctgctgtgtctgagtggagagcgccggacctgggaccggcctctgcccacctgtgtcgccgagtgtggagggacagtgagaggagaggtgtcggggcaggtgctgtcacccgggtatccagctccctatgaacacaatctcaactgcatctggaccatcgaagcagaggccggctgcaccattgggctacacttcctggtgtttgacacagaggaggttcacgacgtgctgcgcatctgggatgggcctgtggagagcggggttctgctgaaggagctgagtggcccggccctgcccaaggacctgcatagcaccttcaactcggtcgtcctgcagttcagcactgacttcttcaccagcaagcagggctttgccattcaattttcagtgtccacagcaacgtcctgcaatgaccctgggatcccgcagaatgggagtcggagtggtgacagttgggaagccggcgactccacagtgttccagtgtgaccctggctacgcgctgcagggaagtgcagagatcagctgtgtgaagatcgagaacaggttcttctggcagcccagcccgccaacatgcatcgctccctgcgggggagacctgacaggaccatctggagtcatcctctcaccaaattacccagaaccctacccgccaggcaaggagtgtgactggaaagtgaccgtctcaccagactacgtcatcgccctggtatttaacatctttaacctggagcctggctatgacttcctccatatctacgacggacgggactctctcagccctctcataggaagcttctatggctcccagctcccaggccgcattgaaagcagcagcaacagcctcttcctcgccttccgcagcgatgcatctgtgagcaatgctggcttcgtcattgactatacagaaaacccgcgggagtcatgttttgatcctggttccatcaagaacggcacacgggtggggtccgacctgaagctgggctcctccgtcacctactactgccacgggggctacgaagttgagggcacctcgaccctgagctgcatcctggggcctgatgggaagcccgtgtggaacaatccccggccagtctgcacagccccctgtgggggacagtatgtgggttcggacggagtggtcttgtcccccaactacccccagaactacaccagtggacagatctgcttgtattttgttactgtgcccaaggactatgtggtgtttggccagttcgccttctttcacacggccctcaacgacgtggtggaggttcacgacggccacagccagcactcgcggctcctcagctccctctcgggctcccatacaggagaatcactgcccttggccacctccaatcaagttctcattaagttcagcgccaaaggcctcgcaccagccagaggcttccactttgtctaccaagcggttcctcgaaccagcgccacgcagtgcagctctgtgccggaaccccgctatggcaagaggctgggcagtgacttctcggtgggggccatcgtccgcttcgaatgcaactccggctatgccctgcaggggtcgccagagatcgagtgcctccctgtgcctggggccttggcccaatggaatgtctcagcgcccacgtgtgtggtgccgtgtggaggcaacctcacagagcgcaggggcaccatcctgtcccctggcttcccagagccgtacctcaacagcctcaactgtgtgtggaagatcgtggtccccgaaggcgctggcatccagatccaagttgtcagttttgtgacagagcagaactgggactcgctggaagtatttgatggtgcagataacactgtaaccatgctggggagtttctcaggaacaaccgtgcctgcccttctgaacagcacctccaaccagctctaccttcatttctactcagatatcagcgtatctgcagctggcttccacttggagtacaaaacggtgggcctgagcagttgtccggaacctgctgtgcccagtaacggggtgaagactggcgagcgctacttggtgaatgatgtggtgtctttccagtgtgagccgggatatgccctccagggccacgcccacatctcctgcatgcccggaacagtgcggcgatggaactaccctcctccactctgtattgcacagtgtgggggaacagtggaggagatggagggggtgatcctgagccccggcttcccaggcaactaccccagtaacatggactgctcctggaaaatagcactgcccgtgggctttggagctcacatccagttcctgaacttctccaccgagcccaaccacgactacatagaaatccggaatggcccctatgagaccagccgcatgatgggaagattcagtggaagcgagcttccaagctccctcctctccacgtcccacgagaccaccgtgtatttccacagcgaccactcccagaatcggccaggattcaagctggagtatcaggatttgacttactcccaccagatttcttccttcctgagaggttttgatctctcggagttggaaagaaccaactcaactcctcccgtcgccgcttcctatgtctgggatcttgatcctggttgtgaagcctatgaacttcaagagtgcccagacccagagccctttgccaatggcattgtgaggggagctggctacaacgtgggacaatcagtgaccttcgagtgcctcccggggtatcaattgactggccaccctgtcctcacgtgtcaacatggcaccaaccggaactgggaccaccccctgcccaagtgtgaagtcccttgtggcgggaacatcacttcttccaacggcactgtgtactccccggggttccctagcccgtactccagctcccaggactgtgtctggctgatcaccgtgcccattggccatggcgtccgcctcaacctcagcctgctgcagacagagccctctggagatttcatcaccatctgggatgggccacagcaaacagcaccacggctcggcgtcttcacccggagcatggccaagaaaacagtgcagagttcatccaaccaggtcctgctcaagttccaccgtgatgcagccacaggggggatcttcgccatagctttctccgcttatccactcaccaaatgccctcctcccaccatcctccccaacgccgaagtcgtcacagagaatgaagaattcaatataggtgacatcgtacgctacagatgcctccctggctttaccttagtggggaatgaaattctgacctgcaaacttggaacctacctgcagtttgaaggaccacccccgatatgtgaagtgcactgtccaacaaatgagcttctgacagactccacaggcgtgatcctgagccagagctaccctggaagctatccccagttccagacctgctcttggctggtgagagtggagcccgactataacatctccctcacagtggagtacttcctcagcgagaagcaatatgatgagtttgagatttttgatggtccatcaggacagagtcctctgctgaaagccctcagtgggaattactcagctcccctgattgtcaccagctcaagcaactctgtgtacctgcgttggtcatctgatcacgcctacaatcggaagggcttcaagatccgctattcagccccttactgcagcctgcccagggctccactccatggcttcatcctaggccagaccagcacccagcccgggggctccatccactttggctgcaacgccggctaccgcctggtgggacacagcatggccatctgtacccggcacccccagggctaccacctgtggagcgaagccatccctctctgtcaagctctttcctgtgggcttcctgaggcccccaagaatggaatggtgtttggcaaggagtacacagtgggaaccaaggccatgtacagctgcagtgaaggctaccacctccaggcaggcgctgaggccactgcagagtgtctggacacaggcctatggagcaaccgcaatgtcccaccacagtgtgtccctgtgacttgtcctgatgtcagtagcatcagcgtggagcatggccgatggaggcttatctttgagacacagtatcagttccaggcccagctgatgctcatctgtgaccctggctactactatactggccaaagggtcatccgctgtcaggccaatggcaaatggagcctcggggactctacgcccacctgccgaatcatctcctgtggagagctcccgattccccccaatggccaccgcatcggaacactgtctgtctacggggcaacagccatcttctcctgcaattccggatacacactggtgggctccagggtgcgtgagtgcatggccaatgggctctggagtggctctgaagtccgctgccttgctggacactgtgggactcctgagcccattgtcaacggacacatcaatggggagaactacagctaccggggcagtgtggtgtaccaatgcaatgctggcttccgcctgatcggcatgtctgtgcgcatctgccagcaggatcatcactggtcgggcaagacccctttctgtgtgctggtgtcctgtggccatccgggctccccgcctcactcccagatgtctggagacagttatactgtgggagcagtggtgcggtacagctgcatcggcaagcgtactctggtgggaaacagcacccgcatgtgtgggctggatggacactggactggctccctccctcactgctcaggaaccagcgtgggagtttgcggtgaccctgggatcccggctcatggcatccgtttgggggacagctttgatccaggcactgtgatgcgcttcagctgtgaagctggccacgtgctccggggatcgtcagagcgcacctgtcaagccaatggctcgtggagcggctcgcagcctgagtgtggagtgatctcttgtgggaaccctgggactccaagtaatgcccgagttgtgttcagtgatggcctggttttctccagctctatcgtctatgagtgccgggaaggatactacgccacaggcctgctcagccgtcactgctcggtcaatggtacctggacaggcagtgaccctgagtgcctcgtcataaactgtggtgaccctgggattccagccaatggccttcggctgggcaatgacttcaggtacaacaaaactgtgacatatcagtgtgtccctggctatatgatggagtcacatagagtatctgtgctgagctgcaccaaggaccggacatggaatggaaccaagcccgtctgcaaagctctcatgtgcaagccacctccgctcatccccaatgggaaggtggtggggtctgacttcatgtggggctcaagtgtgacttatgcctgcctggaggggtaccagctctccctgcccgcggtgttcacctgtgagggaaatgggtcctggaccggagagctgcctcagtgtttccctgtgttctgcggggatcctggtgtcccgtcccgtgggaggagagaggaccgaggcttctcctacaggtcatctgtctccttctcctgccatccccctctggtgctggtgggctctccacgcaggttttgccagtcagatgggacatggagtggcacccagcccagctgcatagatccgaccctgaccacgtgtgcggaccctggtgtgccacagtttgggatacagaacaattctcagggctaccaggttggaagcacagtcctcttccgttgtcaaaaaggctacctgcttcagggctccaccaccaggacctgcctcccaaacctgacctggagtggaaccccacctgactgtgtcccccaccactgcaggcagccagagacgccaacgcatgccaacgtcggggccctggatttgccctccatgggctacacgctcatctactcctgccaggagggcttctccctcaagggtggctccgagcaccgcacctgcaaggcggatggcagctggacaggcaagccgcccatctgcctggaggtccggcccagtgggagacccatcaacactgcccgggagccaccgctcacccaagccttgattcctggggatgtttttgccaagaattccctgtggaaaggggcctatgaataccaggggaagaagcagccagccatgctcagagtgactggcttccaagttgccaacagcaaggtcaatgccaccatgatcgaccacagtggcgtggagctgcacttggctggaacttacaagaaagaagattttcatctcctactccaggtgtaccagattacagggcctgtggagatctttatgaataagttcaaagatgatcactgggctttagatggccatgtctcgtcagagtcctccggagccaccttcatctaccaaggctctgtcaagggccaaggctttgggcagttcggctttcaaagactggacctcaggctgctggagtcagaccccgagtccattggccgccactttgcttccaacagcagctcagtggcagccgcgatcctggtgcctttcatcgccctcattattgcgggcttcgtgctctatctctacaagcacaggagaagacccaaagttcctttcaatggctatgctggccacgagaacaccaatgttcgggccacatttgagaacccaatgtacgaccgcaacatccagcccacagacatcatggccagcgaggcggagttcacagtcagcacagtgtgcacagcagtatagccacccggcctggccgccaccaccgccaccgagagccccgcctccagcagccgttccccagggggcaggaagtaggctcccctgagcacagtgcccagtgcccatcttcgttcgtctccttgcctgtgtctgctactgctgggactcaggccctcgccctgccgccatctatgccagttaccctggagaggactcctgccgtgtcctgaaaaggcagaaaaggaagaggggctgcagacagaggaagaaagtttatggatttaaaatagcaaagcaacttgtggatctgtgtgtgtgtgtgtgtgtatgggcctgatcacacacaaacacacacacctctccttcattcacgtcctatggaagagaccataaaggcttcaaaactagaagtgcgcatgaaggatgcttcatgccctgttccccacacagagaagagatgaagagggggaggtacggtcagctttcaaaacaatatgccccccgcccatcccatgtgtgaggacatggtgactcggtgactgtaacagtaggacacatcccatcatgcggtcagagtgcagaaacccggtcagcgtgcagaaaccagctgtctgctgatgaacggcccatctgcacagcggcagcaaggattaccccaagggcaggaaaaaagtctttggaaatagattgaaaatcagtttctttatttttttcaaacactgttttattgagttctaaacccagtggattaaaaagtcatttgggtcctgggaagcactgggaaagaagggagagccggggaggatagggcaggagtctggccaggagcccaaggtcaagtctggctgtcaactgacaaagagaagagaagacaagtctgtggcccagacaggatgccaagtctgggggcagcagcagggtccttgagagaacaggggagcaagcctgccccagtacccaaaaaacaatggctatcatgtactggggttattctctgtgcctgacactttacctgtagtatttctagtctgcacaataacaccaaaatgtaggatttgttattcccctttgacagatgagaaaacagaagcctgcaaaggtaaagacagagttaggaagtgtggagtcagaatgcaaacccagatcagtctgccccaaagtccactacaccagctgccagaaaccctgttctagaaggggcagctaagaagggaggagccgatgaatctctacagtagcactgtggccaggtctggaaagccaggcaagacacctgtgtgtcctatctgggttctgctgtctccgcgtaggcagcttcggggcaaggattcaactccccaggcctcccacggttggtgctggctccttggctcccagcagccgctgaccatagccagcaaaagacctggcaggtcctgaatcaaaacaacagagtggctgaaagtcacacctctccagctccttgcgagtgggtttgattgattttgacagctatatcatgcttgggtcgttcatgaattccatgagaattgttgggaagttcatgagtttaggaatcaaagtatagcatttagggccactttctctgtcctcgggaaggcccccacaagcttaagcccctgtatacgtgtgacatgctggcctcagagattcatgtcacatattgaaatagcaaatagaaatgtgcaggagcggagggacagcgacacctggttcttaagcaaattctagattggaacaattagaagatctgactgatgttaagagtggccagaggaaagtgagaggcgtccatttccagcagacacaatggaggctgacagaggcaggagcctacccctggccacaccacctctgggacacggcacccccctgggcctggagggagagggccaatccagacacactcacactctcatctctttccttggctggaaacaagtgcaggaagctcccctcccaatttcttatgctcccttcccccttacactcctctccttcgactgctcccttcccccttcttatgcccctctcagaccacccagcggatgcctattcccgccccccacccctcccctgcgtctccttgtaaagttccatgagatgctcgaggagcacctgctggtggggcacccagcactctgctgggcatcaccctccgcacccctgacatttctctccacctccagaggcttggaagggaacagggcagatgaggcccttcacccaccatctacgccatatacccatcaccatcccatgaggaaaaaaaaaaaagtaaaacaaagacaaaaaaaatcttttgtacagagatatatttttattatacaaagtttgtacagtaccaaaaaagaaaaaaaaaaaggtgtaaatttttttttcattattgtaggtaaacggtagtggaagccttttttgtaaatgtaataaaatgtataaatatggttttcagaaaacatcaagtgctgtaaatatgtaatctacacaccttcttggcttgtctgcagtatatacatttaatttatctgtctctgtatatgaggcttccccctggggtcctgcattatggtactttcctgaatttgaaagcaattttaaattttttgaattcaaataaaatataaatttttgcattggttttcttac

SEQ ID NO: 123131 - DNA, 13430 bp, Homo sapiens
  Payload ID: 4181
  Gene Symbol: CSMD2
  Gene Name: CUB and Sushi multiple domains 2
  ENST ID: ENST00000619121
  CDS Start-End: 30-10805
tcctgggatggggtaggaggctattgtgaatgaggctcataagcatcgcccccggccctagatggcaagttcaaagccaccacccaagatcagctggccagaactgcacgttccaactgcacggtcccaatgggacagttgagagcccagggttcccatatggctaccccaattacgccaactgcacgtggaccatcaccgcggaagagcagcacagaatccagcttgtgttccagtcctttgccctggaagaggactttgatgtcctgtcggtgtttgatggtccaccccagccagagaatctgcgtacgaggctcacaggctttcagctgccagccaccattgttagtgcagccaccaccctctctctgcgcctcatcagcgactatgcagtcagtgcccaaggcttccacgccacctatgaagttctccccagccacacatgtgggaacccagggaggctgcccaatggcatccagcagggttcaaccttcaacctcggtgacaaggtccgctacagctgcaaccttggcttcttcctggagggccacgccgtgctcacctgccacgctggctctgagaacagcgccacgtgggacttccccctgccttcctgcagagctgatgatgcctgtggtgggaccctgcggggccagagtggcatcatctccagcccccacttcccctcggagtaccataacaatgccgactgcacatggaccatcctggctgagctgggggacaccatcgccctggtgtttattgacttccagctggaggatggttacgactttctggaagtcactgggacagaaggctcctccctctggttcaccggagccagcctcccagcccccgttatcagcagcaagaactggctgcgactgcacttcacatcggatggcaaccaccggcagcgcggattcagtgcccaataccaagtcaagaagcaaattgagttgaagtctcgaggtgtgaagctgatgcccagcaaagacaacagccagaagacgtctgtgttaactcaggttggtgtgtcccaaggacataatatgtgtccagaccctggcatacccgaaaggggcaaaagactaggctcggatttcaggttaggatccagcgtccagttcacctgcaacgagggctatgacctgcaagggtccaagcggatcacctgtatgaaagtgagcgacatgtttgcggcctggagcgaccacaggccagtctgccgagcccgcatgtgtgatgcccaccttcgaggcccctcgggcatcatcacctcccccaatttccccattcagtatgacaacaatgcacactgtgtgtggatcatcacagcactcaacccctccaaggtgatcaagctcgcctttgaggagtttgatttggagaggggctatgacaccctgacggtcggtgatggtggtcaggatggggaccagaagacagttctctacatcctgacaggtacatcggtcccggatctcattgtcagcaccaatcatcaaatgtggctcctcttccagactgatggcagtggcagttccctgggattcaaggcttcttatgaagagatcgagcagggcagttgcggtgaccctggcatacctgcatatggccggagggaaggctcccggtttcaccacggtgacacactcaagtttgagtgccagcccgcctttgagctggtgggacagaaggcaatcacatgccaaaagaataaccaatggtcggctaagaagccaggctgcgtgttctcctgcttcttcaacttcaccagcccgtctggggttgtcctgtctcccaactacccagaggactatggcaaccacctccactgtgtctggctcatcctggccaggcctgagagccgcatccacctggccttcaacgacattgacgtggagcctcagtttgatttcctggtcatcaaggatggggccaccgccgaggcgcccgtcctgggcaccttctcaggaaaccagcttccctcctccatcacaagcagtggccacgtggcccgtctcgagttccagactgaccactccacagggaagaggggcttcaacatcacttttaccaccttccgacacaacgagtgcccggatcctggcgttccagtaaatggcaaacggtttggggacagcctccagctgggcagctccatctccttcctctgtgatgaaggcttccttgggactcagggctcagagaccatcacctgcgtcctgaaggagggcagcgtggtctggaacagcgctgtgctgcggtgtgaagctccctgtggtggtcacctgacttcgcccagcggcaccatcctctctccgggctggcctggcttctacaaggatgccttgagctgtgcctgggtgattgaggcccagccaggctaccccatcaaaatcaccttcgacagattcaaaaccgaggtcaactatgacaccctggaagtacgcgatgggcggacttactcagcgcccttgatcggggtttaccacgggacccaggttccccagttcctcatcagcaccagcaactacctctacctcctcttctctaccgacaagagtcactcggacatcggcttccagctccgctatgagactataacactgcagtcagaccactgtctggatccaggaatcccagtaaatggacagcgtcatgggaatgacttctacgtgggcgcgctggtgaccttcagctgtgactcgggctacacattaagtgacggggagcctctggagtgtgagcccaacttccagtggagccgggccctgcccagttgtgaagctctctgtggtggcttcattcaaggctccagtgggaccatcttgtcgccagggttccctgacttctaccccaacaacttgaactgcacctggattatcgaaacatctcatggcaagggtgtgttcttcactttccacaccttccacctggaaagtggccatgactacctcctcatcactgagaacggcagcttcacccagcccctgaggcagctaactggatctcggctgccagctcccatcagcgctgggctctatggcaacttcactgcccaggtccgcttcatctctgatttctccatgtcatatgaaggattcaacatcaccttctcagagtacgacttggagccctgtgaggagcccgaggtcccagcctacagcatccggaagggcttgcagtttggcgtgggcgacaccttgaccttctcctgcttccccgggtaccgtctggagggcaccgcccgcatcacgtgcctggggggcagacggcgcctgtggagctcgcctctgccaaggtgtgttgctgagtgtgggaattcagtcacaggcactcagggtactttgctgtcccccaactttcctgtgaactacaataacaatcatgaatgcatctactccatccagacccagccagggaagggaattcagctgaaagccagggcattcgaactctccgaaggagatgtcctcaaggtttatgatggcaacaacaactccgcccgtttgctgggagtttttagccattctgagatgatgggggtgactttgaacagcacatccagcagtctgtggcttgatttcatcactgatgctgaaaacaccagcaagggctttgaactgcacttttccagctttgaactcatcaaatgtgaggacccaggaacccccaagtttggctacaaggttcatgatgaaggtcattttgcagggagctccgtgtccttcagctgtgaccctggatacagcctgcggggtagtgaggagctgctgtgtctgagtggagagcgccggacctgggaccggcctctgcccacctgtgtcgccgagtgtggagggacagtgagaggagaggtgtcggggcaggtgctgtcacccgggtatccagctccctatgaacacaatctcaactgcatctggaccatcgaagcagaggccggctgcaccattgggctacacttcctggtgtttgacacagaggaggttcacgacgtgctgcgcatctgggatgggcctgtggagagcggggttctgctgaaggagctgagtggcccggccctgcccaaggacctgcatagcaccttcaactcggtcgtcctgcagttcagcactgacttcttcaccagcaagcagggctttgccattcaattttcagtgtccacagcaacgtcctgcaatgaccctgggatcccgcagaatgggagtcggagtggtgacagttgggaagccggcgactccacagtgttccagtgtgaccctggctacgcgctgcagggaagtgcagagatcagctgtgtgaagatcgagaacaggttcttctggcagcccagcccgccaacatgcatcgctccctgcgggggagacctgacaggaccatctggagtcatcctctcaccaaattacccagaaccctacccgccaggcaaggagtgtgactggaaagtgaccgtctcaccagactacgtcatcgccctggtatttaacatctttaacctggagcctggctatgacttcctccatatctacgacggacgggactctctcagccctctcataggaagcttctatggctcccagctcccaggccgcattgaaagcagcagcaacagcctcttcctcgccttccgcagcgatgcatctgtgagcaatgctggcttcgtcattgactatacagaaaacccgcgggagtcatgttttgatcctggttccatcaagaacggcacacgggtggggtccgacctgaagctgggctcctccgtcacctactactgccacgggggctacgaagttgagggcacctcgaccctgagctgcatcctggggcctgatgggaagcccgtgtggaacaatccccggccagtctgcacagccccctgtgggggacagtatgtgggttcggacggagtggtcttgtcccccaactacccccagaactacaccagtggacagatctgcttgtattttgttactgtgcccaaggactatgtggtgtttggccagttcgccttctttcacacggccctcaacgacgtggtggaggttcacgacggccacagccagcactcgcggctcctcagctccctctcgggctcccatacaggagaatcactgcccttggccacctccaatcaagttctcattaagttcagcgccaaaggcctcgcaccagccagaggcttccactttgtctaccaagcggttcctcgaaccagcgccacgcagtgcagctctgtgccggaaccccgctatggcaagaggctgggcagtgacttctcggtgggggccatcgtccgcttcgaatgcaactccggctatgccctgcaggggtcgccagagatcgagtgcctccctgtgcctggggccttggcccaatggaatgtctcagcgcccacgtgtgtggtgccgtgtggaggcaacctcacagagcgcaggggcaccatcctgtcccctggcttcccagagccgtacctcaacagcctcaactgtgtgtggaagatcgtggtccccgaaggcgctggcatccagatccaagttgtcagttttgtgacagagcagaactgggactcgctggaagtatttgatggtgcagataacactgtaaccatgctggggagtttctcaggaacaaccgtgcctgcccttctgaacagcacctccaaccagctctaccttcatttctactcagatatcagcgtatctgcagctggcttccacttggagtacaaaacggtgggcctgagcagttgtccggaacctgctgtgcccagtaacggggtgaagactggcgagcgctacttggtgaatgatgtggtgtctttccagtgtgagccgggatatgccctccagggccacgcccacatctcctgcatgcccggaacagtgcggcgatggaactaccctcctccactctgtattgcacagtgtgggggaacagtggaggagatggagggggtgatcctgagccccggcttcccaggcaactaccccagtaacatggactgctcctggaaaatagcactgcccgtgggctttggagctcacatccagttcctgaacttctccaccgagcccaaccacgactacatagaaatccggaatggcccctatgagaccagccgcatgatgggaagattcagtggaagcgagcttccaagctccctcctctccacgtcccacgagaccaccgtgtatttccacagcgaccactcccagaatcggccaggattcaagctggagtatcaggcctatgaacttcaagagtgcccagacccagagccctttgccaatggcattgtgaggggagctggctacaacgtgggacaatcagtgaccttcgagtgcctcccggggtatcaattgactggccaccctgtcctcacgtgtcaacatggcaccaaccggaactgggaccaccccctgcccaagtgtgaagtcccttgtggcgggaacatcacttcttccaacggcactgtgtactccccggggttccctagcccgtactccagctcccaggactgtgtctggctgatcaccgtgcccattggccatggcgtccgcctcaacctcagcctgctgcagacagagccctctggagatttcatcaccatctgggatgggccacagcaaacagcaccacggctcggcgtcttcacccggagcatggccaagaaaacagtgcagagttcatccaaccaggtcctgctcaagttccaccgtgatgcagccacaggggggatcttcgccatagctttctccgcttatccactcaccaaatgccctcctcccaccatcctccccaacgccgaagtcgtcacagagaatgaagaattcaatataggtgacatcgtacgctacagatgcctccctggctttaccttagtggggaatgaaattctgacctgcaaacttggaacctacctgcagtttgaaggaccacccccgatatgtgaagtgcactgtccaacaaatgagcttctgacagactccacaggcgtgatcctgagccagagctaccctggaagctatccccagttccagacctgctcttggctggtgagagtggagcccgactataacatctccctcacagtggagtacttcctcagcgagaagcaatatgatgagtttgagatttttgatggtccatcaggacagagtcctctgctgaaagccctcagtgggaattactcagctcccctgattgtcaccagctcaagcaactctgtgtacctgcgttggtcatctgatcacgcctacaatcggaagggcttcaagatccgctattcagccccttactgcagcctgcccagggctccactccatggcttcatcctaggccagaccagcacccagcccgggggctccatccactttggctgcaacgccggctaccgcctggtgggacacagcatggccatctgtacccggcacccccagggctaccacctgtggagcgaagccatccctctctgtcaagctctttcctgtgggcttcctgaggcccccaagaatggaatggtgtttggcaaggagtacacagtgggaaccaaggccatgtacagctgcagtgaaggctaccacctccaggcaggcgctgaggccactgcagagtgtctggacacaggcctatggagcaaccgcaatgtcccaccacagtgtgtccctgtgacttgtcctgatgtcagtagcatcagcgtggagcatggccgatggaggcttatctttgagacacagtatcagttccaggcccagctgatgctcatctgtgaccctggctactactatactggccaaagggtcatccgctgtcaggccaatggcaaatggagcctcggggactctacgcccacctgccgaatcatctcctgtggagagctcccgattccccccaatggccaccgcatcggaacactgtctgtctacggggcaacagccatcttctcctgcaattccggatacacactggtgggctccagggtgcgtgagtgcatggccaatgggctctggagtggctctgaagtccgctgccttgccactcagaccaagctccactccattttctataagctcctcttcgatgtactctcttccccatccctcaccaaagctggacactgtgggactcctgagcccattgtcaacggacacatcaatggggagaactacagctaccggggcagtgtggtgtaccaatgcaatgctggcttccgcctgatcggcatgtctgtgcgcatctgccagcaggatcatcactggtcgggcaagacccctttctgtgtgccaattacctgtggacacccaggcaaccctgtcaacggcctcactcagggtaaccagtttaacctcaacgatgtggtcaagtttgtttgcaaccctgggtatatggctgagggggctgctaggtcccaatgcctggccagcgggcaatggagtgacatgctgcccacctgcagaatcatcaactgtacagatcctggacaccaagaaaatagtgttcgtcaggtccacgccagcggcccgcacaggttcagcttcggcaccactgtgtcttaccggtgcaaccacggcttctacctcctgggcaccccagtgctcagctgccagggagatggcacatgggaccgtccccgcccccagtgtctcttggtgtcctgtggccatccgggctccccgcctcactcccagatgtctggagacagttatactgtgggagcagtggtgcggtacagctgcatcggcaagcgtactctggtgggaaacagcacccgcatgtgtgggctggatggacactggactggctccctccctcactgctcaggaaccagcgtgggagtttgcggtgaccctgggatcccggctcatggcatccgtttgggggacagctttgatccaggcactgtgatgcgcttcagctgtgaagctggccacgtgctccggggatcgtcagagcgcacctgtcaagccaatggctcgtggagcggctcgcagcctgagtgtggagtgatctcttgtgggaaccctgggactccaagtaatgcccgagttgtgttcagtgatggcctggttttctccagctctatcgtctatgagtgccgggaaggatactacgccacaggcctgctcagccgtcactgctcggtcaatggtacctggacaggcagtgaccctgagtgcctcgtcataaactgtggtgaccctgggattccagccaatggccttcggctgggcaatgacttcaggtacaacaaaactgtgacatatcagtgtgtccctggctatatgatggagtcacatagagtatctgtgctgagctgcaccaaggaccggacatggaatggaaccaagcccgtctgcaaagctctcatgtgcaagccacctccgctcatccccaatgggaaggtggtggggtctgacttcatgtggggctcaagtgtgacttatgcctgcctggaggggtaccagctctccctgcccgcggtgttcacctgtgagggaaatgggtcctggaccggagagctgcctcagtgtttccctgtgttctgcggggatcctggtgtcccgtcccgtgggaggagagaggaccgaggcttctcctacaggtcatctgtctccttctcctgccatccccctctggtgctggtgggctctccacgcaggttttgccagtcagatgggacatggagtggcacccagcccagctgcatagatccgaccctgaccacgtgtgcggaccctggtgtgccacagtttgggatacagaacaattctcagggctaccaggttggaagcacagtcctcttccgttgtcaaaaaggctacctgcttcagggctccaccaccaggacctgcctcccaaacctgacctggagtggaaccccacctgactgtgtcccccaccactgcaggcagccagagacgccaacgcatgccaacgtcggggccctggatttgccctccatgggctacacgctcatctactcctgccaggagggcttctccctcaagggtggctccgagcaccgcacctgcaaggcggatggcagctggacaggcaagccgcccatctgcctggaggtccggcccagtgggagacccatcaacactgcccgggagccaccgctcacccaagccttgattcctggggatgtttttgccaagaattccctgtggaaaggggcctatgaataccaggggaagaagcagccagccatgctcagagtgactggcttccaagttgccaacagcaaggtcaatgccaccatgatcgaccacagtggcgtggagctgcacttggctggaacttacaagaaagaagattttcatctcctactccaggtgtaccagattacagggcctgtggagatctttatgaataagttcaaagatgatcactgggctttagatggccatgtctcgtcagagtcctccggagccaccttcatctaccaaggctctgtcaagggccaaggctttgggcagttcggctttcaaagactggacctcaggctgctggagtcagaccccgagtccattggccgccactttgcttccaacagcagctcagtggcagccgcgatcctggtgcctttcatcgccctcattattgcgggcttcgtgctctatctctacaagcacaggagaagacccaaagttcctttcaatggctatgctggccacgagaacaccaatgttcgggccacatttgagaacccaatgtacgaccgcaacatccagcccacagacatcatggccagcgaggcggagttcacagtcagcacagtgtgcacagcagtatagccacccggcctggccgccaccaccgccaccgagagccccgcctccagcagccgttccccagggggcaggaagtaggctcccctgagcacagtgcccagtgcccatcttcgttcgtctccttgcctgtgtctgctactgctgggactcaggccctcgccctgccgccatctatgccagttaccctggagaggactcctgccgtgtcctgaaaaggcagaaaaggaagaggggctgcagacagaggaagaaagtttatggatttaaaatagcaaagcaacttgtggatctgtgtgtgtgtgtgtgtgtatgggcctgatcacacacaaacacacacacctctccttcattcacgtcctatggaagagaccataaaggcttcaaaactagaagtgcgcatgaaggatgcttcatgccctgttccccacacagagaagagatgaagagggggaggtacggtcagctttcaaaacaatatgccccccgcccatcccatgtgtgaggacatggtgactcggtgactgtaacagtaggacacatcccatcatgcggtcagagtgcagaaacccggtcagcgtgcagaaaccagctgtctgctgatgaacggcccatctgcacagcggcagcaaggattaccccaagggcaggaaaaaagtctttggaaatagattgaaaatcagtttctttatttttttcaaacactgttttattgagttctaaacccagtggattaaaaagtcatttgggtcctgggaagcactgggaaagaagggagagccggggaggatagggcaggagtctggccaggagcccaaggtcaagtctggctgtcaactgacaaagagaagagaagacaagtctgtggcccagacaggatgccaagtctgggggcagcagcagggtccttgagagaacaggggagcaagcctgccccagtacccaaaaaacaatggctatcatgtactggggttattctctgtgcctgacactttacctgtagtatttctagtctgcacaataacaccaaaatgtaggatttgttattcccctttgacagatgagaaaacagaagcctgcaaaggtaaagacagagttaggaagtgtggagtcagaatgcaaacccagatcagtctgccccaaagtccactacaccagctgccagaaaccctgttctagaaggggcagctaagaagggaggagccgatgaatctctacagtagcactgtggccaggtctggaaagccaggcaagacacctgtgtgtcctatctgggttctgctgtctccgcgtaggcagcttcggggcaaggattcaactccccaggcctcccacggttggtgctggctccttggctcccagcagccgctgaccatagccagcaaaagacctggcaggtcctgaatcaaaacaacagagtggctgaaagtcacacctctccagctccttgcgagtgggtttgattgattttgacagctatatcatgcttgggtcgttcatgaattccatgagaattgttgggaagttcatgagtttaggaatcaaagtatagcatttagggccactttctctgtcctcgggaaggcccccacaagcttaagcccctgtatacgtgtgacatgctggcctcagagattcatgtcacatattgaaatagcaaatagaaatgtgcaggagcggagggacagcgacacctggttcttaagcaaattctagattggaacaattagaagatctgactgatgttaagagtggccagaggaaagtgagaggcgtccatttccagcagacacaatggaggctgacagaggcaggagcctacccctggccacaccacctctgggacacggcacccccctgggcctggagggagagggccaatccagacacactcacactctcatctctttccttggctggaaacaagtgcaggaagctcccctcccaatttcttatgctcccttcccccttacactcctctccttcgactgctcccttcccccttcttatgcccctctcagaccacccagcggatgcctattcccgccccccacccctcccctgcgtctccttgtaaagttccatgagatgctcgaggagcacctgctggtggggcacccagcactctgctgggcatcaccctccgcacccctgacatttctctccacctccagaggcttggaagggaacagggcagatgaggcccttcacccaccatctacgccatatacccatcaccatcccatgaggaaaaaaaaaaaagtaaaacaaagacaaaaaaaatcttttgtacagagatatatttttattatacaaagtttgtacagtaccaaaaaagaaaaaaaaaaaggtgtaaatttttttttcattattgtaggtaaacggtagtggaagccttttttgtaaatgtaataaaatgtataaatatggttttcagaaaacatcaagtgctgtaaatatgtaatctacacaccttcttggcttgtctgcagtatatacatttaatttatctgtctctgtatatgaggcttccccctggggtcctgcattatggtactttcctgaatttgaaagcaattttaaattttttgaattcaaataaaatataaatttttgcattggttttcttac

SEQ ID NO: 123132 - DNA, 13212 bp, Homo sapiens
  Payload ID: 4182
  Gene Symbol: CSMD3
  Gene Name: CUB and Sushi multiple domains 3
  Uniprot ID: Q7Z407
  ENST ID: ENST00000297405
  CDS Start-End: 246-11369
tggtggttgctataacgagccagaattggggtagattttggtggaggggaaaaaacgcacaagaaaagacagaatccagagtagcggagactttgtgcccccgttggagagatggttgagtcctcgtcaaggttgctgtggtatcccagaaacaccattcactccgagctgtgaccgcgcaccaacaacagcaacaactccactgcgccgggctgaggagcaggaattaggagctcgcgaataatatgaaagggatccgcaaaggggaaagccgagcaaaggaatccaaaccctgggagcctggcaagcgaagatgcgctaaatgtggccgcctagacttcatcctgatgaagaaaatggggattaaaagtggatttacgttttggaacctcgtctttttattgacggtgtcttgtgtgaaaggatttatttatacatgtggtggaactttaaaaggacttaatggcactatagaaagccctggttttccatatggatatccaaatggtgcaaactgcacatgggtaataatagcagaagaacgaaatagaatacaaattgtttttcagtcatttgctctagaagaagaatacgactacttatcattatatgatggacatcctcatcctacaaactttaggacaaggttaacaggattccatctgccacctccagtgacaagtaccaaatctgtgttctcactacgtttgaccagtgattttgcagttagtgctcatggatttaaggtatattacgaagaattgcagagtagctcttgtggaaatcctggtgttccacccaaaggtgtattatatggcacaagattcgacgtcggggacaagatccgctacagctgtgtaactggatacatccttgatggccaccctcagctcacctgcatagccaattcagttaatacagcttcgtgggattttcctgttcctatctgtagagctgaagatgcttgtggaggaacaatgagaggatccagtggcatcatatccagccctagttttcctaatgagtaccataacaatgctgattgcacttggaccattgtagcagagcctggggacacaatttcactcatatttactgattttcaaatggaagagaaatatgattacttagaaatagaaggttctgagccacctaccatatggttatctggaatgaatataccaccaccaattatcagcaacaaaaactggctcagactgcattttgttacagacagcaatcatcgataccgtggatttagtgctccctatcaaggttcttctacattgacccacactacctccactggtgagttagaggagcataacaggactaccactggtgctattgctgttgctagcacacctgcagatgttactgtatccagtgttacagctgtcaccatccatagactttccgaggaacagcgagtgcaagttacgagtctcagaaattcaggtctggaccccaacacgtccaaggacgggctctctcctcatccagcagatacacaaagtaccaggagaagaccaagacatgctgaacagatagaaagaactaaagagcttgcagttgttactcatagagtgaaaaaggccatagattttaaatctagaggatttaaattgtttccagggaaagacaacagcaacaagttttctatcttaaatgagggaggtattaaaacagcttccaatttatgcccagatccaggagaaccagaaaatgggaagagaatcggatcagattttagccttggatcaactgtgcagttctcttgtgatgaagattatgtcctacagggcgcaaagagcatcacctgtcaacggatagctgaagtttttgctgcttggagtgatcacaggcctgtgtgtaaagtgaaaacgtgtggctctaatcttcaaggaccaagtggtacctttacatctcccaactttccgttccagtatgacagcaatgcacaatgtgtctgggtcatcacagcagtgaatacaaataaggttatccagataaattttgaagaatttgatctggagattggctatgataccttgacaattggcgatgggggcgaagttggagatcctaggacagtgctccaagtgctgactggaagctttgtaccagacttgatagtgagcatgagtagccaaatgtggctgcaccttcaaacggacgaaagtgttggatctgttggtttcaaggttaactacaaagaaattgagaaagaaagttgtggtgatcctggtacacccttatatggaattagagaaggcgatggattttctaatcgtgatgttttaaggtttgaatgccagtttgggtttgaattaattggagagaaatccattgtttgtcaagagaataaccaatggtctgcaaacatacccatctgtatctttccctgcctgtctaactttactgcaccaatgggaacagttctttctcctgattacccagaagggtatggaaataatttaaattgcatctggacgataatctctgatccagggagccggatacatctttctttcaatgactttgacctggaatcccagtttgatttccttgctgttaaagatggtgactctccagaatccccaattcttggaacctttactggggctgaggtgccttcccatcttactagtaatagtcacatactgcgattggaatttcaggctgaccactcaatgtcaggacgtggctttaacatcacttacaacacatttggacataatgaatgccctgatcctggaataccaatcaatgcacggcggtttggggacaactttcaattaggaagttcaatttcagttatttgtgaagaaggatttattaaaacccagggaacagaaacaattacatgtattcttatggatggaaaagtaatgtggagtggactgattccaaaatgtggagccccatgtggtggccatttttcagctcccagtggagtgattctctcaccaggatggccaggatactacaaagactctttgaattgtgagtgggtgattgaagctgaacctggacactctatcaaaattacatttgaaagatttcagactgaactgaattatgatgttctggaagttcatgatgggccaaatcttctgtcacccttgcttggatcttacaatggcacccaagtgccccagtttctatttagtagcagtaattttatataccttctatttacaacagacaacagtcgttccaataatggtttcaagattcattatgaaagtgttacagtgaacacgtattcttgtttggaccctggcatacctgtacatggccgtcgctatggtcatgatttctccattggctctactgtttcatttagttgtgattcaggatacaggttgagtcatgaagagccccttctatgcgaaaaaaaccactggtggagtcatccacttccaacctgtgatgcattatgtggaggagatgttagagggcctagtggaacaatcttatcacctggttacccggaattttatccaaattctctgaattgtacatggactgttgatgtaacccatggaaaaggtgtgcagttcaacttccacacttttcatttggaagaccatcatgactacttactgatcacagagaatggcagttttacccaaccactggcacgcctgactggttcagatcttcctccaacaatcaatgctggtctctatggaaatttcagggctcaattgcgtttcatttcagatttttcaatatcatatgaaggatttaacataacattctctgaatataaccttgaaccttgtgaagatcctggcattcctcaatatggtagtcgaatcgggttcaactttgggattggtgacactctgaccttctcatgctcttcgggttatcgactggaaggaacatcagagatcatctgtcttggtggtggccgacgagtgtggagtgcacctctgccaaggtgtgtggctgaatgtggtgcatctgcaacgaataatgaaggaattttgctgtctccaaattatccactcaactatgaaaacaaccatgaatgcatttatagtattcaggttcaagcaggaaagggaatcaatatttcagccagaacatttcatttagcacaaggagatgttcttaagatttatgatggaaaagataaaacgactcatctactaggtgcttttactggtgcatctatgcgcggactgacacttagtagtacttcaaatcaactctggctagaatttaattccgatactgaagggacagatgaaggctttcaacttgtgtataccagttttgaactctcacactgtgaagatcctggcattccacaatttggatacaagatcagtgaccaaggccactttgctggtagcaccatcatttatggatgcaatccaggctacactctccacggaagtagccttctcaagtgcatgacaggggagagaagggcatgggactatcctctgccttcctgtattgctgaatgtggaggtcgttttaaaggagaatcatcaggaagaatcttatctcctggctatccttttccatatgacaataacctgcgttgcatgtggatgattgaggtagatcctggaaatattgtcagcttgcagtttcttgcttttgatacggaagcatcacatgatatactccgagtctgggacggtccaccagaaaatgatatgcttttaaaggaaattagtggatctcttattcctgaaggaattcatagcaccctcaatatagtaaccatccagtttgacacggatttttatattagcaaatctggatttgcaattcagttttcaagttctgttgccactgcgtgtcgtgacccaggggtccccatgaatgggactcgaaatggggatggaagagaacctggggacactgttgtttttcaatgtgacccaggatatgaacttcaaggagaggaaagaataacctgcattcaggtagaaaatcggtacttctggcagcccagcccaccagtctgtatagcaccctgtggaggcaatttaacaggatcttcaggctttattctttcaccaaacttccctcatccatatccgcatagcagagactgtgactggactatcaccgtcaatgcagactatgttatctccttggcgttcatcagttttagcatagaaccaaactatgacttcctctatatctatgatggaccagacagtaatagcccactgattggaagttttcaagacagcaagttaccagagagaatagaaagcagctcaaatacaatgcatttggcttttcggagtgatggatctgttagttacactggatttcatctagaatacaaagcaaaactgcgagagtcctgctttgatccaggcaatataatgaatggcaccagacttggaatggattataaattagggtcaacagtcacctattactgtgatgctggttatgttcttcaaggttattcaacactcacctgtatcatgggagatgatggaagacctggatggaatagagccttgccaagttgtcatgcgccctgtggaagtcgttcaacaggttcagaaggcactgttctatcaccaaactatccaaaaaattacagtgtgggacataattgtgtttattctatagcagttccaaaggagtttgtggtgtttggccagtttgtatttttccagacatcactccacgatgttgttgaggtgtatgatgggccaactcagcaatcttctctgttatcttccctctcaggatcccattcaggagaatcacttccactgagttcaggtaatcagatcacaattcgatttacttcagttggaccaataacagctaagggatttcactttgtttaccaagctgttcctagaacaagttctacacaatgcagttctgtgcctgaaccaagattcggaagaagaattggcaatgaatttgcagtcggttcatcggttctttttgattgtaatccaggatatattctccatggatccatagcaattaggtgtgaaacagtgcccaattctttggcccagtggaatgattccttacctacttgtattgtgccctgtggtggaattttaactaagcgcaaagggactattttgtcacctggataccctgagccttatgacaacaatctgaattgtgtgtggaagatcacagtgccagagggagctggcattcaagtgcaagttgttagctttgctacagaacataattgggattctctggacttttatgatgggggagacaacaatgctccaagacttggaagctattcaggaacaacaataccccatcttttgaatagtacgtctaataatctgtatctaaattttcaatcagacatcagtgtttctgctgcaggatttcatcttgaatacacagcaattggtttggattcctgtcctgaaccacaaactcctagcagtggaattaaaattggagacagatatatggttggagatgtagtatcctttcagtgtgatcaaggatattctcttcagggtcactctcacattacatgtatgccaggacctgtaagaagatggaattatccaatcccaatttgtttagctcagtgtggtggtgctatgtcagacttcagtggtgtgatcctcagtcctgggtttcctggaaactatcccagcagtttagattgcacatggacaataaatctacccataggttttggtgtacatctccagtttgtaaatttttctacagaaaccatacatgattatttggaagtacgaagtggatcctcagaaactagtactgttattggccggcttagtggtcctcaaataccatcttccttattcagcaccacccatgaaaccagcttatattttcacagtgactattcacaaaacaaacaagggtttcatattgtataccaagcctatcagttgcaaagctgtcctgatccacgcccgtttcgaaatggttttgtaattggtaatgattttactgtgggtcaaaccatttcatttgaatgtttcccaggatacacattaattggaaattcagctctcacatgccttcacggagtcagtcgtaattggaatcatccacttccaaggtgtgaagctctttgtggtgggaatataactgcaatgaatggcaccatttattctcctgggtatcctgatgaatatccaaactttcaagattgtttttggcttgtaagagtaccccctgggaatggcatctacatcaattttactgtccttcaaacagaaccaatatatgatttcattactgtatgggatggaccagaccaaaattcacctcagatcggtcagttcagtggcaataccgctttggaatcagtctacagtacttcaaatcagattctaatcaaattccacagtgatttcacaacaagtggcttttttgtgctcagttatcacgcctatcaactaagggtgtgccaacctccaccacctgtgcccaatgctgaaattttgacggaagatgatgaatttgaaataggtgatattattaggtatcagtgtcttccaggatttactttagttggtaatgcaattctgacgtgcagattaggagaacgactgcagatggatggagcacctccagtttgtcaagtgctctgtcctgccaatgaattacggctagattctactggagtcatattgagccctggatatcctgacagttacccaaatcttcaaatgtgtgcatggagcatttcagtggaaaagggttataatatcaccatgtttgtagaattcttccagacagaaaaggaatttgatgttcttcaggtgtatgatggaccaaatattcaaagtccagtgcttatttccctcagtggggattattcatctgcttttaatataacaagcaatggtcatgaagtatttcttcagtggtcagcagatcatggcaataacaaaaaaggcttccggataagatatatagctttctactgtagtacaccagaatccccacctcatggatatattatcagtcagacaggtgggcagcttaacagtgtggtccgttgggcctgtgatcgaggattccgacttgttggaaaaagcagtgctgtgtgcagaaagtcttcctatgggtatcatgcatgggatgcgccagtccctgcctgtcaagcaatttcctgtgggattcctaaagctccaacaaatggaggaatactaacaacagactatttggtaggaacgcgagttacctatttttgtaatgatggatatcgattgtcatccaaagaactcactacagctgtatgccaatcagatggaacatggagcaatcataacaagacccctcgctgtgttgttgttacatgtccaagcatcaattcctttatcttggaacatggaagatggcgaattgtgaatggctcccattatgaatacaaaaccaaagtagttttcagctgtgaccctggttatcatggactaggtcctgcctccatcgaatgtcttcctaatggtacttggagttggagaaatgaaagaccatattgccaaattatttcctgtggagaactacctacacctccaaatggaaataagattggaactcaaacttcatatggctcaacagctatctttacctgcgacttgggattcatgcttgtgggctctgctgtaagggaatgcctttcctcaggtctttggagtgaatctgaaaccagatgcctagcgggtcattgtggaattccagaactgattgtgaatggtcaagtcattggagaaaattatggatatagagacacagttgtatatcaatgtaatcctggttttcgattgattggttcttcagtgaggatatgtcaacaggatcacaattggtctggtcagctcccatcctgtgtgcctgttagctgtggtcaccctggtagtccaatttatggaagaacaagtggaaatgggttcaactttaatgatgtggtaacattctcatgcaatattgggtatcttatgcaagggccaacaaaggcacagtgccaggccaacagacagtggagccatcctccacctatgtgcaaagtggtcaactgttctgatcctggaattccagccaattctaaaagagaaagtaaaatagaacatggaaattttacttacggcactgtggtattctatgactgcaatcctggatattttttatttggatcttcagttttgatatgtcaaccaaatggacaatgggacaaacctttaccagaatgtatcatgattgactgtggacaccctggcgttcctcctaatgcagtcctgtctggcgagaagtatacttttgggtctactgttcactattcctgcacaggaaagcgttcccttttaggccagtcatcaagaacctgccaattgaatggccattggagtggatcacaacctcattgttcaggtgatgctactgggacatgtggcgatccaggtactcccggccatggctctagacaggaaagcaatttcagaactaaaagtactgtacgttatgcttgtgatactggttacatccttcatggctcagaagaaagaacatgtttagctaatggcagttggaccggaaggcagccagagtgcaaagctgtgcagtgtggtaacccaggaaccacagccaatgggaaagtcttccgaattgatggcacaacattttctagttcagtcatttattcctgcatggagggatacatcctttctggaccttcagttagacagtgcacagccaatggaacatggtctggaactttacctaactgtacaataatcagttgtggagacccaggtataccagccaatggactgagatatggagatgattatgtggttggacaaaatgtttcttacatgtgccagccaggctacacgatggaattgaatggctccagaatcaggacttgtacaattaatggcacatggagtggagtaatgccaacttgtagagctgttacctgcccaactcctccccagatctctaatggaaggctggaaggaacaaatttcgactggggctttagtattagctacatctgttctccaggctatgagctatccttccctgctgttttgacctgtgtagggaatggtacctggagtggtgaagtaccgcagtgcttaccaaagttttgtggtgaccctggtatacctgcccaaggaaaaagagaaggcaaaagctttatataccagtcagaggtttcattcagctgcaattttcctttcatattagtgggatcaagcaccagaatatgtcaagcagatggcacttggagtggttcatcacctcactgcatagagcctacccaaacctcttgtgaaaacccaggtgtgcctcggcatggatctcagaacaatacattcggatttcaagtaggaagtgttgtacagttccattgcaaaaaaggacaccttctccaagggtctacaacacgcacctgcctccctgatcttacgtggagtgggattcagcctgaatgcataccccacagctgtaaacagccagaaactcctgctcatgcaaatgtcgtagggatggaccttccatctcatgggtatacactgatttatacctgtcagcctggcttcttcttagcaggtggaacagaacatagagtgtgtagatccgataacacctggactggaaaagttcccatttgtgaagctggttctaaaatattggtgaaagatcctagacctgcactgggaacacccagcccaaagctaagtgttcctgatgatgtatttgcccaaaattatatatggaaaggctcttacaatttcaaaggaaggaaacaacccatgaccttaacagttactagtttcaatgcttccactgggagagttaacgcaacactgagcaatagcaacatggagctgctactttcaggggtatataaaagccaggaagctcgcctaatgttacgcatatatcttattaaagtacctgctcatgcttctgtgaagaaaatgaaggaagaaaattgggcaatggatggctttgtttctgctgagcctgatggagctacttatgtatttcaaggatttattcaaggcaaagattatggacaatttggcctacaaagactgggactgaatatgtcagaaggttcaaattcttcaaatcaacctcatggtacaaatagtagttctgtagccattgctattcttgtgcctttttttgcacttatatttgcaggatttggattttatctttataaacaaaggactgcacctaaaacacagtatacaggatgttcagttcatgaaaataacaatggccaagcagcttttgaaaatcccatgtatgacaccaacgcaaagtcagtggaagggaaggcggtacgatttgatcccaacttgaacacggtttgcacaatggtataacgaggcaacctttgccttcttcagaagcttggaaatcgacacacaaaacagtgcacatttagttcactgctaaacaaattaaagcacacttttcaggacttgctgggtcaccttttcctgaggaatgatacagaagagtgttttttcataaactggaccataattcttcatgtttaccatggagagttttacagaaatttggctgcactctgagagtgcttactcacagtttatttgctttttttaaaaaggagattattctaaaatataaacttatttgcatatattggaggagcatccactatcagtatttctgtgctttataaactatattagagggactgggtttaaaaaaaaagatatagggtagaaataagagctatacttacaagagtcaatagatcactgacttctctttaactgtcctgagctacatcacgcccacaaatctgtctttcataccactctatctgccattcattcttgttaaatgaggcattgttttctttatttaagattgagttatgactttaaatgtttatgagctagtttatgcctcggaagacataaggtttcccattccaatttgaatctttctatttctttagcatcatattgctcttcttcttttagactggttgtcatagtttctgcaaagggcaagttcattgtgctaccctcccaattcccccattatggagtaaccagtattattcagtgagctatggggtagtgtttcactccttgcttcaatatggttttttcctatttatttttattattttttaatcccaaatgtgatagtagcttcagtatgtttcctcacccaaaaaccatttggctggcagaaattatctagaaaaattattattttgcagttatctgagacaccaaacttaccatcctttattttacaatatttttgatcgaccaaataaaatgtcctaataatctactctatttatatctacatttccttccagctgagtcttcaaatttagcattattttgacacttttaattttcatttaacaatggattagaaaaatattttggtctagccactaaacataatgactgaaaaaaattattattataaatcaccaatataaatttattgcctacaattgtggacttatcatatttttatatatttttaaatttctgtacctttattgttaaacaccaagtttcacatacaagaggtttctttcattgtcaaattaagatatgtatttgtaagttattggtggctcatttaaactgtatcatacagtaatgccagcatttttatttaataggtcatcgtcttccttttatagctgttttacttcattgaatacgatcatgtacccagtgttaactctttgttgttgtccctttcaaatatggataactctgtgaacagtcttgactttttgtatcatgagacagagtgcctaagagaaacccttgcacctgggagcgctgcttggctctatctctacaacatttaatgaatttcttgtaaaccactttgagatacattgttttggaaattcatacaattttctcaacatggtactctactggcaggatgcagttttaaattttatgccatcagttatttattcttgtttattcaaatgactgcaataacaatgattcattcattaatgttaaggctaatacatttaagatcttgtttaaacaatgtttcttctgcaactggctactcctcttatattaatgcatacacttttgtaaagaagtatatttttatgaaaagaaactttgtaaaagtatgatgtaaattttcagtgcaatgtaaacaaaataaaaatggataattgcttttgtaaaa

SEQ ID NO: 123133 - DNA, 10773 bp, Homo sapiens
  Payload ID: 4182
  Gene Symbol: CSMD3
  Gene Name: CUB and Sushi multiple domains 3
  ENST ID: ENST00000339701
  CDS Start-End: 1-8934
aaagaaagttgtggtgatcctggtacacccttatatggaattagagaaggcgatggattttctaatcgtgatgttttaaggtttgaatgccagtttgggtttgaattaattggagagaaatccattgtttgtcaagagaataaccaatggtctgcaaacatacccatctgtatctttccctgcctgtctaactttactgcaccaatgggaacagttctttctcctgattacccagaagggtatggaaataatttaaattgcatctggacgataatctctgatccagggagccggatacatctttctttcaatgactttgacctggaatcccagtttgatttccttgctgttaaagatggtgactctccagaatccccaattcttggaacctttactggggctgaggtgccttcccatcttactagtaatagtcacatactgcgattggaatttcaggctgaccactcaatgtcaggacgtggctttaacatcacttacaacacatttggacataatgaatgccctgatcctggaataccaatcaatgcacggcggtttggggacaactttcaattaggaagttcaatttcagttatttgtgaagaaggatttattaaaacccagggaacagaaacaattacatgtattcttatggatggaaaagtaatgtggagtggactgattccaaaatgtggagccccatgtggtggccatttttcagctcccagtggagtgattctctcaccaggatggccaggatactacaaagactctttgaattgtgagtgggtgattgaagctgaacctggacactctatcaaaattacatttgaaagatttcagactgaactgaattatgatgttctggaagttcatgatgggccaaatcttctgtcacccttgcttggatcttacaatggcacccaagtgccccagtttctatttagtagcagtaattttatataccttctatttacaacagacaacagtcgttccaataatggtttcaagattcattatgaaagtgttacagtgaacacgtattcttgtttggaccctggcatacctgtacatggccgtcgctatggtcatgatttctccattggctctactgtttcatttagttgtgattcaggatacaggttgagtcatgaagagccccttctatgcgaaaaaaaccactggtggagtcatccacttccaacctgtgatgcattatgtggaggagatgttagagggcctagtggaacaatcttatcacctggttacccggaattttatccaaattctctgaattgtacatggactgttgatgtaacccatggaaaaggtgtgcagttcaacttccacacttttcatttggaagaccatcatgactacttactgatcacagagaatggcagttttacccaaccactggcacgcctgactggttcagatcttcctccaacaatcaatgctggtctctatggaaatttcagggctcaattgcgtttcatttcagatttttcaatatcatatgaaggatttaacataacattctctgaatataaccttgaaccttgtgaagatcctggcattcctcaatatggtagtcgaatcgggttcaactttgggattggtgacactctgaccttctcatgctcttcgggttatcgactggaaggaacatcagagatcatctgtcttggtggtggccgacgagtgtggagtgcacctctgccaaggtgtgtggctgaatgtggtgcatctgcaacgaataatgaaggaattttgctgtctccaaattatccactcaactatgaaaacaaccatgaatgcatttatagtattcaggttcaagcaggaaagggaatcaatatttcagccagaacatttcatttagcacaaggagatgttcttaagatttatgatggaaaagataaaacgactcatctactaggtgcttttactggtgcatctatgcgcggactgacacttagtagtacttcaaatcaactctggctagaatttaattccgatactgaagggacagatgaaggctttcaacttgtgtataccagttttgaactctcacactgtgaagatcctggcattccacaatttggatacaagatcagtgaccaaggccactttgctggtagcaccatcatttatggatgcaatccaggctacactctccacggaagtagccttctcaagtgcatgacaggggagagaagggcatgggactatcctctgccttcctgtattgctgaatgtggaggtcgttttaaaggagaatcatcaggaagaatcttatctcctggctatccttttccatatgacaataacctgcgttgcatgtggatgattgaggtagatcctggaaatattgtcagcttgcagtttcttgcttttgatacggaagcatcacatgatatactccgagtctgggacggtccaccagaaaatgatatgcttttaaaggaaattagtggatctcttattcctgaaggaattcatagcaccctcaatatagtaaccatccagtttgacacggatttttatattagcaaatctggatttgcaattcagttttcaagttctgttgccactgcgtgtcgtgacccaggggtccccatgaatgggactcgaaatggggatggaagagaacctggggacactgttgtttttcaatgtgacccaggatatgaacttcaaggagaggaaagaataacctgcattcaggtagaaaatcggtacttctggcagcccagcccaccagtctgtatagcaccctgtggaggcaatttaacaggatcttcaggctttattctttcaccaaacttccctcatccatatccgcatagcagagactgtgactggactatcaccgtcaatgcagactatgttatctccttggcgttcatcagttttagcatagaaccaaactatgacttcctctatatctatgatggaccagacagtaatagcccactgattggaagttttcaagacagcaagttaccagagagaatagaaagcagctcaaatacaatgcatttggcttttcggagtgatggatctgttagttacactggatttcatctagaatacaaagcaaaactgcgagagtcctgctttgatccaggcaatataatgaatggcaccagacttggaatggattataaattagggtcaacagtcacctattactgtgatgctggttatgttcttcaaggttattcaacactcacctgtatcatgggagatgatggaagacctggatggaatagagccttgccaagttgtcatgcgccctgtggaagtcgttcaacaggttcagaaggcactgttctatcaccaaactatccaaaaaattacagtgtgggacataattgtgtttattctatagcagttccaaaggagtttgctgttcctagaacaagttctacacaatgcagttctgtgcctgaaccaagattcggaagaagaattggcaatgaatttgcagtcggttcatcggttctttttgattgtaatccaggatatattctccatggatccatagcaattaggtgtgaaacagtgcccaattctttggcccagtggaatgattccttacctacttgtattgtgccctgtggtggaattttaactaagcgcaaagggactattttgtcacctggataccctgagccttatgacaacaatctgaattgtgtgtggaagatcacagtgccagagggagctggcattcaagtgcaagttgttagctttgctacagaacataattgggattctctggacttttatgatgggggagacaacaatgctccaagacttggaagctattcaggaacaacaataccccatcttttgaatagtacgtctaataatctgtatctaaattttcaatcagacatcagtgtttctgctgcaggatttcatcttgaatacacagcaattggtttggattcctgtcctgaaccacaaactcctagcagtggaattaaaattggagacagatatatggttggagatgtagtatcctttcagtgtgatcaaggatattctcttcagggtcactctcacattacatgtatgccaggacctgtaagaagatggaattatccaatcccaatttgtttagctcagtgtggtggtgctatgtcagacttcagtggtgtgatcctcagtcctgggtttcctggaaactatcccagcagtttagattgcacatggacaataaatctacccataggttttggtgtacatctccagtttgtaaatttttctacagaaaccatacatgattatttggaagtacgaagtggatcctcagaaactagtactgttattggccggcttagtggtcctcaaataccatcttccttattcagcaccacccatgaaaccagcttatattttcacagtgactattcacaaaacaaacaagggtttcatattgtataccaagcctatcagttgcaaagctgtcctgatccacgcccgtttcgaaatggttttgtaattggtaatgattttactgtgggtcaaaccatttcatttgaatgtttcccaggatacacattaattggaaattcagctctcacatgccttcacggagtcagtcgtaattggaatcatccacttccaaggtgtgaagctctttgtggtgggaatataactgcaatgaatggcaccatttattctcctgggtatcctgatgaatatccaaactttcaagattgtttttggcttgtaagagtaccccctgggaatggcatctacatcaattttactgtccttcaaacagaaccaatatatgatttcattactgtatgggatggaccagaccaaaattcacctcagatcggtcagttcagtggcaataccgctttggaatcagtctacagtacttcaaatcagattctaatcaaattccacagtgatttcacaacaagtggcttttttgtgctcagttatcacgcctatcaactaagggtgtgccaacctccaccacctgtgcccaatgctgaaattttgacggaagatgatgaatttgaaataggtgatattattaggtatcagtgtcttccaggatttactttagttggtaatgcaattctgacgtgcagattaggagaacgactgcagatggatggagcacctccagtttgtcaagtgctctgtcctgccaatgaattacggctagattctactggagtcatattgagccctggatatcctgacagttacccaaatcttcaaatgtgtgcatggagcatttcagtggaaaagggttataatatcaccatgtttgtagaattcttccagacagaaaaggaatttgatgttcttcaggtgtatgatggaccaaatattcaaagtccagtgcttatttccctcagtggggattattcatctgcttttaatataacaagcaatggtcatgaagtatttcttcagtggtcagcagatcatggcaataacaaaaaaggcttccggataagatatatagctttctactgtagtacaccagaatccccacctcatggatatattatcagtcagacaggtgggcagcttaacagtgtggtccgttgggcctgtgatcgaggattccgacttgttggaaaaagcagtgctgtgtgcagaaagtcttcctatgggtatcatgcatgggatgcgccagtccctgcctgtcaagcaatttcctgtgggattcctaaagctccaacaaatggaggaatactaacaacagactatttggtaggaacgcgagttacctatttttgtaatgatggatatcgattgtcatccaaagaactcactacagctgtatgccaatcagatggaacatggagcaatcataacaagacccctcgctgtgttgttgttacatgtccaagcatcaattcctttatcttggaacatggaagatggcgaattgtgaatggctcccattatgaatacaaaaccaaagtagttttcagctgtgaccctggttatcatggactaggtcctgcctccatcgaatgtcttcctaatggtacttggagttggagaaatgaaagaccatattgccaaattatttcctgtggagaactacctacacctccaaatggaaataagattggaactcaaacttcatatggctcaacagctatctttacctgcgacttgggattcatgcttgtgggctctgctgtaagggaatgcctttcctcaggtctttggagtgaatctgaaaccagatgcctagcgggtcattgtggaattccagaactgattgtgaatggtcaagtcattggagaaaattatggatatagagacacagttgtatatcaatgtaatcctggttttcgattgattggttcttcagtgaggatatgtcaacaggatcacaattggtctggtcagctcccatcctgtgtgcctgttagctgtggtcaccctggtagtccaatttatggaagaacaagtggaaatgggttcaactttaatgatgtggtaacattctcatgcaatattgggtatcttatgcaagggccaacaaaggcacagtgccaggccaacagacagtggagccatcctccacctatgtgcaaagtggtcaactgttctgatcctggaattccagccaattctaaaagagaaagtaaaatagaacatggaaattttacttacggcactgtggtattctatgactgcaatcctggatattttttatttggatcttcagttttgatatgtcaaccaaatggacaatgggacaaacctttaccagaatgtatcatgattgactgtggacaccctggcgttcctcctaatgcagtcctgtctggcgagaagtatacttttgggtctactgttcactattcctgcacaggaaagcgttcccttttaggccagtcatcaagaacctgccaattgaatggccattggagtggatcacaacctcattgttcaggtgatgctactgggacatgtggcgatccaggtactcccggccatggctctagacaggaaagcaatttcagaactaaaagtactgtacgttatgcttgtgatactggttacatccttcatggctcagaagaaagaacatgtttagctaatggcagttggaccggaaggcagccagagtgcaaagctgtgcagtgtggtaacccaggaaccacagccaatgggaaagtcttccgaattgatggcacaacattttctagttcagtcatttattcctgcatggagggatacatcctttctggaccttcagttagacagtgcacagccaatggaacatggtctggaactttacctaactgtacaataatcagttgtggagacccaggtataccagccaatggactgagatatggagatgattatgtggttggacaaaatgtttcttacatgtgccagccaggctacacgatggaattgaatggctccagaatcaggacttgtacaattaatggcacatggagtggagtaatgccaacttgtagagctgttacctgcccaactcctccccagatctctaatggaaggctggaaggaacaaatttcgactggggctttagtattagctacatctgttctccaggctatgagctatccttccctgctgttttgacctgtgtagggaatggtacctggagtggtgaagtaccgcagtgcttaccaaagttttgtggtgaccctggtatacctgcccaaggaaaaagagaaggcaaaagctttatataccagtcagaggtttcattcagctgcaattttcctttcatattagtgggatcaagcaccagaatatgtcaagcagatggcacttggagtggttcatcacctcactgcatagagcctacccaaacctcttgtgaaaacccaggtgtgcctcggcatggatctcagaacaatacattcggatttcaagtaggaagtgttgtacagttccattgcaaaaaaggacaccttctccaagggtctacaacacgcacctgcctccctgatcttacgtggagtgggattcagcctgaatgcataccccacagctgtaaacagccagaaactcctgctcatgcaaatgtcgtagggatggaccttccatctcatgggtatacactgatttatacctgtcagcctggcttcttcttagcaggtggaacagaacatagagtgtgtagatccgataacacctggactggaaaagttcccatttgtgaagctggttctaaaatattggtgaaagatcctagacctgcactgggaacacccagcccaaagctaagtgttcctgatgatgtatttgcccaaaattatatatggaaaggctcttacaatttcaaaggaaggaaacaacccatgaccttaacagttactagtttcaatgcttccactgggagagttaacgcaacactgagcaatagcaacatggagctgctactttcaggggtatataaaagccaggaagctcgcctaatgttacgcatatatcttattaaagtacctgctcatgcttctgtgaagaaaatgaaggaagaaaattgggcaatggatggctttgtttctgctgagcctgatggagctacttatgtatttcaaggatttattcaaggcaaagattatggacaatttggcctacaaagactgggactgaatatgtcagaaggttcaaattcttcaaatcaacctcatggtacaaatagtagttctgtagccattgctattcttgtgcctttttttgcacttatatttgcaggatttggattttatctttataaacaaaggactgcacctaaaacacagtatacaggatgttcagttcatgaaaataacaatggccaagcagcttttgaaaatcccatgtatgacaccaacgcaaagtcagtggaagggaaggcggtacgatttgatcccaacttgaacacggtttgcacaatggtataacgaggcaacctttgccttcttcagaagcttggaaatcgacacacaaaacagtgcacatttagttcactgctaaacaaattaaagcacacttttcaggacttgctgggtcaccttttcctgaggaatgatacagaagagtgttttttcataaactggaccataattcttcatgtttaccatggagagttttacagaaatttggctgcactctgagagtgcttactcacagtttatttgctttttttaaaaaggagattattctaaaatataaacttatttgcatatattggaggagcatccactatcagtatttctgtgctttataaactatattagagggactgggtttaaaaaaaaagatatagggtagaaataagagctatacttacaagagtcaatagatcactgacttctctttaactgtcctgagctacatcacgcccacaaatctgtctttcataccactctatctgccattcattcttgttaaatgaggcattgttttctttatttaagattgagttatgactttaaatgtttatgagctagtttatgcctcggaagacataaggtttcccattccaatttgaatctttctatttctttagcatcatattgctcttcttcttttagactggttgtcatagtttctgcaaagggcaagttcattgtgctaccctcccaattcccccattatggagtaaccagtattattcagtgagctatggggtagtgtttcactccttgcttcaatatggttttttcctatttatttttattattttttaatcccaaatgtgatagtagcttcagtatgtttcctcacccaaaaaccatttggctggcagaaattatctagaaaaattattattttgcagttatctgagacaccaaacttaccatcctttattttacaatatttttgatcgaccaaataaaatgtcctaataatctactctatttatatctacatttccttccagctgagtcttcaaatttagcattattttgacacttttaattttcatttaacaatggattagaaaaatattttggtctagccactaaacataatgactgaaaaaaattattattataaatcaccaatataaatttattgcctacaattgtggacttatcatatttttatatatttttaaatttctgtacctttattgttaaacaccaagtttcacatacaagaggtttctttcattgtcaaattaagatatgtatttgtaagttattggtggctcatttaaactgtatcatacagtaatgccagcatttttatttaataggtcatcgtcttccttttatagctgttttacttcattgaatacgatcatgtacccagtgttaactctttgttgttgtccctttcaaatatggataactctgtgaacagtcttgactttttgtatcatgagacagagtgcctaagagaaacccttgcacctgggagcgctgcttggctctatctctacaacatttaatgaatttcttgtaaaccactttgagatacattgttttggaaattcatacaattttctcaacatggtactctactggcaggatgcagttttaaattttatgccatcagttatttattcttgtttattcaaatgactgcaataacaatgattcattcattaatgttaaggctaatacatttaagatcttgtttaaacaatgtttcttctgcaactggctactcctcttatattaatgcatacacttttgtaaagaagtatatttttatgaaaagaaactttgtaaaagtatgatgtaaattttcagtgcaatgtaaacaaaataaaaatggataattgcttttgt

SEQ ID NO: 123134 - DNA, 13018 bp, Homo sapiens
  Payload ID: 4182
  Gene Symbol: CSMD3
  Gene Name: CUB and Sushi multiple domains 3
  Uniprot ID: Q7Z407
  ENST ID: ENST00000343508
  CDS Start-End: 172-11175
tacacccctcggccctttggaggaccggagagccggacgacgccgcagcccttgggggagtccagcgccagctggcgaaaagaagcttcatcttccagatcatccgggaaaggggcagaggtggccggttgttgcgactcataaacaacctcttcagcacaacccggttgaatgtggagttggttcctttgctggaaacctgtacagcttgaccgacagacagcctcaggatttatttatacatgtggtggaactttaaaaggacttaatggcactatagaaagccctggttttccatatggatatccaaatggtgcaaactgcacatgggtaataatagcagaagaacgaaatagaatacaaattgtttttcagtcatttgctctagaagaagaatacgactacttatcattatatgatggacatcctcatcctacaaactttaggacaaggttaacaggattccatctgccacctccagtgacaagtaccaaatctgtgttctcactacgtttgaccagtgattttgcagttagtgctcatggatttaaggtatattacgaagaattgcagagtagctcttgtggaaatcctggtgttccacccaaaggtgtattatatggcacaagattcgacgtcggggacaagatccgctacagctgtgtaactggatacatccttgatggccaccctcagctcacctgcatagccaattcagttaatacagcttcgtgggattttcctgttcctatctgtagagctgaagatgcttgtggaggaacaatgagaggatccagtggcatcatatccagccctagttttcctaatgagtaccataacaatgctgattgcacttggaccattgtagcagagcctggggacacaatttcactcatatttactgattttcaaatggaagagaaatatgattacttagaaatagaaggttctgagccacctaccatatggttatctggaatgaatataccaccaccaattatcagcaacaaaaactggctcagactgcattttgttacagacagcaatcatcgataccgtggatttagtgctccctatcaaggttcttctacattgacccacactacctccactggtgagttagaggagcataacaggactaccactggtgctattgctgttgctagcacacctgcagatgttactgtatccagtgttacagctgtcaccatccatagactttccgaggaacagcgagtgcaagttacgagtctcagaaattcaggtctggaccccaacacgtccaaggacgggctctctcctcatccagcagatacacaaagtaccaggagaagaccaagacatgctgaacagatagaaagaactaaagagcttgcagttgttactcatagagtgaaaaaggccatagattttaaatctagaggatttaaattgtttccagggaaagacaacagcaacaagttttctatcttaaatgagggaggtattaaaacagcttccaatttatgcccagatccaggagaaccagaaaatgggaagagaatcggatcagattttagccttggatcaactgtgcagttctcttgtgatgaagattatgtcctacagggcgcaaagagcatcacctgtcaacggatagctgaagtttttgctgcttggagtgatcacaggcctgtgtgtaaagtgaaaacgtgtggctctaatcttcaaggaccaagtggtacctttacatctcccaactttccgttccagtatgacagcaatgcacaatgtgtctgggtcatcacagcagtgaatacaaataaggttatccagataaattttgaagaatttgatctggagattggctatgataccttgacaattggcgatgggggcgaagttggagatcctaggacagtgctccaagtgctgactggaagctttgtaccagacttgatagtgagcatgagtagccaaatgtggctgcaccttcaaacggacgaaagtgttggatctgttggtttcaaggttaactacaaagaaattgagaaagaaagttgtggtgatcctggtacacccttatatggaattagagaaggcgatggattttctaatcgtgatgttttaaggtttgaatgccagtttgggtttgaattaattggagagaaatccattgtttgtcaagagaataaccaatggtctgcaaacatacccatctgtatctttccctgcctgtctaactttactgcaccaatgggaacagttctttctcctgattacccagaagggtatggaaataatttaaattgcatctggacgataatctctgatccagggagccggatacatctttctttcaatgactttgacctggaatcccagtttgatttccttgctgttaaagatggtgactctccagaatccccaattcttggaacctttactggggctgaggtgccttcccatcttactagtaatagtcacatactgcgattggaatttcaggctgaccactcaatgtcaggacgtggctttaacatcacttacaacacatttggacataatgaatgccctgatcctggaataccaatcaatgcacggcggtttggggacaactttcaattaggaagttcaatttcagttatttgtgaagaaggatttattaaaacccagggaacagaaacaattacatgtattcttatggatggaaaagtaatgtggagtggactgattccaaaatgtggagccccatgtggtggccatttttcagctcccagtggagtgattctctcaccaggatggccaggatactacaaagactctttgaattgtgagtgggtgattgaagctgaacctggacactctatcaaaattacatttgaaagatttcagactgaactgaattatgatgttctggaagttcatgatgggccaaatcttctgtcacccttgcttggatcttacaatggcacccaagtgccccagtttctatttagtagcagtaattttatataccttctatttacaacagacaacagtcgttccaataatggtttcaagattcattatgaaagtgttacagtgaacacgtattcttgtttggaccctggcatacctgtacatggccgtcgctatggtcatgatttctccattggctctactgtttcatttagttgtgattcaggatacaggttgagtcatgaagagccccttctatgcgaaaaaaaccactggtggagtcatccacttccaacctgtgatgcattatgtggaggagatgttagagggcctagtggaacaatcttatcacctggttacccggaattttatccaaattctctgaattgtacatggactgttgatgtaacccatggaaaaggtgtgcagttcaacttccacacttttcatttggaagaccatcatgactacttactgatcacagagaatggcagttttacccaaccactggcacgcctgactggttcagatcttcctccaacaatcaatgctggtctctatggaaatttcagggctcaattgcgtttcatttcagatttttcaatatcatatgaaggatttaacataacattctctgaatataaccttgaaccttgtgaagatcctggcattcctcaatatggtagtcgaatcgggttcaactttgggattggtgacactctgaccttctcatgctcttcgggttatcgactggaaggaacatcagagatcatctgtcttggtggtggccgacgagtgtggagtgcacctctgccaaggtgtgtggctgaatgtggtgcatctgcaacgaataatgaaggaattttgctgtctccaaattatccactcaactatgaaaacaaccatgaatgcatttatagtattcaggttcaagcaggaaagggaatcaatatttcagccagaacatttcatttagcacaaggagatgttcttaagatttatgatggaaaagataaaacgactcatctactaggtgcttttactggtgcatctatgcgcggactgacacttagtagtacttcaaatcaactctggctagaatttaattccgatactgaagggacagatgaaggctttcaacttgtgtataccagttttgaactctcacactgtgaagatcctggcattccacaatttggatacaagatcagtgaccaaggccactttgctggtagcaccatcatttatggatgcaatccaggctacactctccacggaagtagccttctcaagtgcatgacaggggagagaagggcatgggactatcctctgccttcctgtattgctgaatgtggaggtcgttttaaaggagaatcatcaggaagaatcttatctcctggctatccttttccatatgacaataacctgcgttgcatgtggatgattgaggtagatcctggaaatattgtcagcttgcagtttcttgcttttgatacggaagcatcacatgatatactccgagtctgggacggtccaccagaaaatgatatgcttttaaaggaaattagtggatctcttattcctgaaggaattcatagcaccctcaatatagtaaccatccagtttgacacggatttttatattagcaaatctggatttgcaattcagttttcaagttctgttgccactgcgtgtcgtgacccaggggtccccatgaatgggactcgaaatggggatggaagagaacctggggacactgttgtttttcaatgtgacccaggatatgaacttcaaggagaggaaagaataacctgcattcaggtagaaaatcggtacttctggcagcccagcccaccagtctgtatagcaccctgtggaggcaatttaacaggatcttcaggctttattctttcaccaaacttccctcatccatatccgcatagcagagactgtgactggactatcaccgtcaatgcagactatgttatctccttggcgttcatcagttttagcatagaaccaaactatgacttcctctatatctatgatggaccagacagtaatagcccactgattggaagttttcaagacagcaagttaccagagagaatagaaagcagctcaaatacaatgcatttggcttttcggagtgatggatctgttagttacactggatttcatctagaatacaaagcaaaactgcgagagtcctgctttgatccaggcaatataatgaatggcaccagacttggaatggattataaattagggtcaacagtcacctattactgtgatgctggttatgttcttcaaggttattcaacactcacctgtatcatgggagatgatggaagacctggatggaatagagccttgccaagttgtcatgcgccctgtggaagtcgttcaacaggttcagaaggcactgttctatcaccaaactatccaaaaaattacagtgtgggacataattgtgtttattctatagcagttccaaaggagtttgtggtgtttggccagtttgtatttttccagacatcactccacgatgttgttgaggtgtatgatgggccaactcagcaatcttctctgttatcttccctctcaggatcccattcaggagaatcacttccactgagttcaggtaatcagatcacaattcgatttacttcagttggaccaataacagctaagggatttcactttgtttaccaagctgttcctagaacaagttctacacaatgcagttctgtgcctgaaccaagattcggaagaagaattggcaatgaatttgcagtcggttcatcggttctttttgattgtaatccaggatatattctccatggatccatagcaattaggtgtgaaacagtgcccaattctttggcccagtggaatgattccttacctacttgtattgtgccctgtggtggaattttaactaagcgcaaagggactattttgtcacctggataccctgagccttatgacaacaatctgaattgtgtgtggaagatcacagtgccagagggagctggcattcaagtgcaagttgttagctttgctacagaacataattgggattctctggacttttatgatgggggagacaacaatgctccaagacttggaagctattcaggaacaacaataccccatcttttgaatagtacgtctaataatctgtatctaaattttcaatcagacatcagtgtttctgctgcaggatttcatcttgaatacacagcaattggtttggattcctgtcctgaaccacaaactcctagcagtggaattaaaattggagacagatatatggttggagatgtagtatcctttcagtgtgatcaaggatattctcttcagggtcactctcacattacatgtatgccaggacctgtaagaagatggaattatccaatcccaatttgtttagctcagtgtggtggtgctatgtcagacttcagtggtgtgatcctcagtcctgggtttcctggaaactatcccagcagtttagattgcacatggacaataaatctacccataggttttggtgtacatctccagtttgtaaatttttctacagaaaccatacatgattatttggaagtacgaagtggatcctcagaaactagtactgttattggccggcttagtggtcctcaaataccatcttccttattcagcaccacccatgaaaccagcttatattttcacagtgactattcacaaaacaaacaagggtttcatattgtataccaagcctatcagttgcaaagctgtcctgatccacgcccgtttcgaaatggttttgtaattggtaatgattttactgtgggtcaaaccatttcatttgaatgtttcccaggatacacattaattggaaattcagctctcacatgccttcacggagtcagtcgtaattggaatcatccacttccaaggtgtgaagctctttgtggtgggaatataactgcaatgaatggcaccatttattctcctgggtatcctgatgaatatccaaactttcaagattgtttttggcttgtaagagtaccccctgggaatggcatctacatcaattttactgtccttcaaacagaaccaatatatgatttcattactgtatgggatggaccagaccaaaattcacctcagatcggtcagttcagtggcaataccgctttggaatcagtctacagtacttcaaatcagattctaatcaaattccacagtgatttcacaacaagtggcttttttgtgctcagttatcacgcctatcaactaagggtgtgccaacctccaccacctgtgcccaatgctgaaattttgacggaagatgatgaatttgaaataggtgatattattaggtatcagtgtcttccaggatttactttagttggtaatgcaattctgacgtgcagattaggagaacgactgcagatggatggagcacctccagtttgtcaagtgctctgtcctgccaatgaattacggctagattctactggagtcatattgagccctggatatcctgacagttacccaaatcttcaaatgtgtgcatggagcatttcagtggaaaagggttataatatcaccatgtttgtagaattcttccagacagaaaaggaatttgatgttcttcaggtgtatgatggaccaaatattcaaagtccagtgcttatttccctcagtggggattattcatctgcttttaatataacaagcaatggtcatgaagtatttcttcagtggtcagcagatcatggcaataacaaaaaaggcttccggataagatatatagctttctactgtagtacaccagaatccccacctcatggatatattatcagtcagacaggtgggcagcttaacagtgtggtccgttgggcctgtgatcgaggattccgacttgttggaaaaagcagtgctgtgtgcagaaagtcttcctatgggtatcatgcatgggatgcgccagtccctgcctgtcaagcaatttcctgtgggattcctaaagctccaacaaatggaggaatactaacaacagactatttggtaggaacgcgagttacctatttttgtaatgatggatatcgattgtcatccaaagaactcactacagctgtatgccaatcagatggaacatggagcaatcataacaagacccctcgctgtgttgttgttacatgtccaagcatcaattcctttatcttggaacatggaagatggcgaattgtgaatggctcccattatgaatacaaaaccaaagtagttttcagctgtgaccctggttatcatggactaggtcctgcctccatcgaatgtcttcctaatggtacttggagttggagaaatgaaagaccatattgccaaattatttcctgtggagaactacctacacctccaaatggaaataagattggaactcaaacttcatatggctcaacagctatctttacctgcgacttgggattcatgcttgtgggctctgctgtaagggaatgcctttcctcaggtctttggagtgaatctgaaaccagatgcctagcgggtcattgtggaattccagaactgattgtgaatggtcaagtcattggagaaaattatggatatagagacacagttgtatatcaatgtaatcctggttttcgattgattggttcttcagtgaggatatgtcaacaggatcacaattggtctggtcagctcccatcctgtgtgcctgttagctgtggtcaccctggtagtccaatttatggaagaacaagtggaaatgggttcaactttaatgatgtggtaacattctcatgcaatattgggtatcttatgcaagggccaacaaaggcacagtgccaggccaacagacagtggagccatcctccacctatgtgcaaagtggtcaactgttctgatcctggaattccagccaattctaaaagagaaagtaaaatagaacatggaaattttacttacggcactgtggtattctatgactgcaatcctggatattttttatttggatcttcagttttgatatgtcaaccaaatggacaatgggacaaacctttaccagaatgtatcatgattgactgtggacaccctggcgttcctcctaatgcagtcctgtctggcgagaagtatacttttgggtctactgttcactattcctgcacaggaaagcgttcccttttaggccagtcatcaagaacctgccaattgaatggccattggagtggatcacaacctcattgttcaggtgatgctactgggacatgtggcgatccaggtactcccggccatggctctagacaggaaagcaatttcagaactaaaagtactgtacgttatgcttgtgatactggttacatccttcatggctcagaagaaagaacatgtttagctaatggcagttggaccggaaggcagccagagtgcaaagctgtgcagtgtggtaacccaggaaccacagccaatgggaaagtcttccgaattgatggcacaacattttctagttcagtcatttattcctgcatggagggatacatcctttctggaccttcagttagacagtgcacagccaatggaacatggtctggaactttacctaactgtacaataatcagttgtggagacccaggtataccagccaatggactgagatatggagatgattatgtggttggacaaaatgtttcttacatgtgccagccaggctacacgatggaattgaatggctccagaatcaggacttgtacaattaatggcacatggagtggagtaatgccaacttgtagagctgttacctgcccaactcctccccagatctctaatggaaggctggaaggaacaaatttcgactggggctttagtattagctacatctgttctccaggctatgagctatccttccctgctgttttgacctgtgtagggaatggtacctggagtggtgaagtaccgcagtgcttaccaaagttttgtggtgaccctggtatacctgcccaaggaaaaagagaaggcaaaagctttatataccagtcagaggtttcattcagctgcaattttcctttcatattagtgggatcaagcaccagaatatgtcaagcagatggcacttggagtggttcatcacctcactgcatagagcctacccaaacctcttgtgaaaacccaggtgtgcctcggcatggatctcagaacaatacattcggatttcaagtaggaagtgttgtacagttccattgcaaaaaaggacaccttctccaagggtctacaacacgcacctgcctccctgatcttacgtggagtgggattcagcctgaatgcataccccacagctgtaaacagccagaaactcctgctcatgcaaatgtcgtagggatggaccttccatctcatgggtatacactgatttatacctgtcagcctggcttcttcttagcaggtggaacagaacatagagtgtgtagatccgataacacctggactggaaaagttcccatttgtgaagctggttctaaaatattggtgaaagatcctagacctgcactgggaacacccagcccaaagctaagtgttcctgatgatgtatttgcccaaaattatatatggaaaggctcttacaatttcaaaggaaggaaacaacccatgaccttaacagttactagtttcaatgcttccactgggagagttaacgcaacactgagcaatagcaacatggagctgctactttcaggggtatataaaagccaggaagctcgcctaatgttacgcatatatcttattaaagtacctgctcatgcttctgtgaagaaaatgaaggaagaaaattgggcaatggatggctttgtttctgctgagcctgatggagctacttatgtatttcaaggatttattcaaggcaaagattatggacaatttggcctacaaagactgggactgaatatgtcagaaggttcaaattcttcaaatcaacctcatggtacaaatagtagttctgtagccattgctattcttgtgcctttttttgcacttatatttgcaggatttggattttatctttataaacaaaggactgcacctaaaacacagtatacaggatgttcagttcatgaaaataacaatggccaagcagcttttgaaaatcccatgtatgacaccaacgcaaagtcagtggaagggaaggcggtacgatttgatcccaacttgaacacggtttgcacaatggtataacgaggcaacctttgccttcttcagaagcttggaaatcgacacacaaaacagtgcacatttagttcactgctaaacaaattaaagcacacttttcaggacttgctgggtcaccttttcctgaggaatgatacagaagagtgttttttcataaactggaccataattcttcatgtttaccatggagagttttacagaaatttggctgcactctgagagtgcttactcacagtttatttgctttttttaaaaaggagattattctaaaatataaacttatttgcatatattggaggagcatccactatcagtatttctgtgctttataaactatattagagggactgggtttaaaaaaaaagatatagggtagaaataagagctatacttacaagagtcaatagatcactgacttctctttaactgtcctgagctacatcacgcccacaaatctgtctttcataccactctatctgccattcattcttgttaaatgaggcattgttttctttatttaagattgagttatgactttaaatgtttatgagctagtttatgcctcggaagacataaggtttcccattccaatttgaatctttctatttctttagcatcatattgctcttcttcttttagactggttgtcatagtttctgcaaagggcaagttcattgtgctaccctcccaattcccccattatggagtaaccagtattattcagtgagctatggggtagtgtttcactccttgcttcaatatggttttttcctatttatttttattattttttaatcccaaatgtgatagtagcttcagtatgtttcctcacccaaaaaccatttggctggcagaaattatctagaaaaattattattttgcagttatctgagacaccaaacttaccatcctttattttacaatatttttgatcgaccaaataaaatgtcctaataatctactctatttatatctacatttccttccagctgagtcttcaaatttagcattattttgacacttttaattttcatttaacaatggattagaaaaatattttggtctagccactaaacataatgactgaaaaaaattattattataaatcaccaatataaatttattgcctacaattgtggacttatcatatttttatatatttttaaatttctgtacctttattgttaaacaccaagtttcacatacaagaggtttctttcattgtcaaattaagatatgtatttgtaagttattggtggctcatttaaactgtatcatacagtaatgccagcatttttatttaataggtcatcgtcttccttttatagctgttttacttcattgaatacgatcatgtacccagtgttaactctttgttgttgtccctttcaaatatggataactctgtgaacagtcttgactttttgtatcatgagacagagtgcctaagagaaacccttgcacctgggagcgctgcttggctctatctctacaacatttaatgaatttcttgtaaaccactttgagatacattgttttggaaattcatacaattttctcaacatggtactctactggcaggatgcagttttaaattttatgccatcagttatttattcttgtttattcaaatgactgcaataacaatgattcattcattaatgttaaggctaatacatttaagatcttgtttaaacaatgtttcttctgcaactggctactcctcttatattaatgcatacacttttgtaaagaagtatatttttatgaaaagaaactttgtaaaagtatgatgtaaattttcagtgcaatgtaaacaaaataaaaatggataattgcttttgtaaaa

SEQ ID NO: 123135 - DNA, 12485 bp, Homo sapiens
  Payload ID: 4182
  Gene Symbol: CSMD3
  Gene Name: CUB and Sushi multiple domains 3
  Uniprot ID: Q7Z407
  ENST ID: ENST00000455883
  CDS Start-End: 30-10646
ggagcaggaattaggagctcgcgaataatatgaaagggatccgcaaaggggaaagccgagcaaaggaatccaaaccctgggagcctggcaagcgaagatgcgctaaatgtggccgcctagacttcatcctgatgaagaaaatggggattaaaagtggatttacgttttggaacctcgtctttttattgacggtgtcttgtgtgaaaggatttatttatacatgtggtggaactttaaaaggacttaatggcactatagaaagccctggttttccatatggatatccaaatggtgcaaactgcacatgggtaataatagcagaagaacgaaatagaatacaaattgtttttcagtcatttgctctagaagaagaatacgactacttatcattatatgatggacatcctcatcctacaaactttaggacaaggttaacaggattccatctgccacctccagtgacaagtaccaaatctgtgttctcactacgtttgaccagtgattttgcagttagtgctcatggatttaaggtatattacgaagaattgcagagtagctcttgtggaaatcctggtgttccacccaaaggtgtattatatggcacaagattcgacgtcggggacaagatccgctacagctgtgtaactggatacatccttgatggccaccctcagctcacctgcatagccaattcagttaatacagcttcgtgggattttcctgttcctatctgtagagctgaagatgcttgtggaggaacaatgagaggatccagtggcatcatatccagccctagttttcctaatgagtaccataacaatgctgattgcacttggaccattgtagcagagcctggggacacaatttcactcatatttactgattttcaaatggaagagaaatatgattacttagaaatagaaggttctgagccacctaccatatggttatctggaatgaatataccaccaccaattatcagcaacaaaaactggctcagactgcattttgttacagacagcaatcatcgataccgtggatttagtgctccctatcaagtgaaaaaggccatagattttaaatctagaggatttaaattgtttccagggaaagacaacagcaacaagttttctatcttaaatgagggaggtattaaaacagcttccaatttatgcccagatccaggagaaccagaaaatgggaagagaatcggatcagattttagccttggatcaactgtgcagttctcttgtgatgaagattatgtcctacagggcgcaaagagcatcacctgtcaacggatagctgaagtttttgctgcttggagtgatcacaggcctgtgtgtaaagtgaaaacgtgtggctctaatcttcaaggaccaagtggtacctttacatctcccaactttccgttccagtatgacagcaatgcacaatgtgtctgggtcatcacagcagtgaatacaaataaggttatccagataaattttgaagaatttgatctggagattggctatgataccttgacaattggcgatgggggcgaagttggagatcctaggacagtgctccaagtgctgactggaagctttgtaccagacttgatagtgagcatgagtagccaaatgtggctgcaccttcaaacggacgaaagtgttggatctgttggtttcaaggttaactacaaagaaattgagaaagaaagttgtggtgatcctggtacacccttatatggaattagagaaggcgatggattttctaatcgtgatgttttaaggtttgaatgccagtttgggtttgaattaattggagagaaatccattgtttgtcaagagaataaccaatggtctgcaaacatacccatctgtatctttccctgcctgtctaactttactgcaccaatgggaacagttctttctcctgattacccagaagggtatggaaataatttaaattgcatctggacgataatctctgatccagggagccggatacatctttctttcaatgactttgacctggaatcccagtttgatttccttgctgttaaagatggtgactctccagaatccccaattcttggaacctttactggggctgaggtgccttcccatcttactagtaatagtcacatactgcgattggaatttcaggctgaccactcaatgtcaggacgtggctttaacatcacttacaacacatttggacataatgaatgccctgatcctggaataccaatcaatgcacggcggtttggggacaactttcaattaggaagttcaatttcagttatttgtgaagaaggatttattaaaacccagggaacagaaacaattacatgtattcttatggatggaaaagtaatgtggagtggactgattccaaaatgtggagccccatgtggtggccatttttcagctcccagtggagtgattctctcaccaggatggccaggatactacaaagactctttgaattgtgagtgggtgattgaagctgaacctggacactctatcaaaattacatttgaaagatttcagactgaactgaattatgatgttctggaagttcatgatgggccaaatcttctgtcacccttgcttggatcttacaatggcacccaagtgccccagtttctatttagtagcagtaattttatataccttctatttacaacagacaacagtcgttccaataatggtttcaagattcattatgaaagtgttacagtgaacacgtattcttgtttggaccctggcatacctgtacatggccgtcgctatggtcatgatttctccattggctctactgtttcatttagttgtgattcaggatacaggttgagtcatgaagagccccttctatgcgaaaaaaaccactggtggagtcatccacttccaacctgtgatgcattatgtggaggagatgttagagggcctagtggaacaatcttatcacctggttacccggaattttatccaaattctctgaattgtacatggactgttgatgtaacccatggaaaaggtgtgcagttcaacttccacacttttcatttggaagaccatcatgactacttactgatcacagagaatggcagttttacccaaccactggcacgcctgactggttcagatcttcctccaacaatcaatgctggtctctatggaaatttcagggctcaattgcgtttcatttcagatttttcaatatcatatgaaggatttaacataacattctctgaatataaccttgaaccttgtgaagatcctggcattcctcaatatggtagtcgaatcgggttcaactttgggattggtgacactctgaccttctcatgctcttcgggttatcgactggaaggaacatcagagatcatctgtcttggtggtggccgacgagtgtggagtgcacctctgccaaggtgtgtggctgaatgtggtgcatctgcaacgaataatgaaggaattttgctgtctccaaattatccactcaactatgaaaacaaccatgaatgcatttatagtattcaggttcaagcaggaaagggaatcaatatttcagccagaacatttcatttagcacaaggagatgttcttaagatttatgatggaaaagataaaacgactcatctactaggtgcttttactggtgcatctatgcgcggactgacacttagtagtacttcaaatcaactctggctagaatttaattccgatactgaagggacagatgaaggctttcaacttgtgtataccagttttgaactctcacactgtgaagatcctggcattccacaatttggatacaagatcagtgaccaaggccactttgctggtagcaccatcatttatggatgcaatccaggctacactctccacggaagtagccttctcaagtgcatgacaggggagagaagggcatgggactatcctctgccttcctgtattgctgaatgtggaggtcgttttaaaggagaatcatcaggaagaatcttatctcctggctatccttttccatatgacaataacctgcgttgcatgtggatgattgaggtagatcctggaaatattgtcagcttgcagtttcttgcttttgatacggaagcatcacatgatatactccgagtctgggacggtccaccagaaaatgatatgcttttaaaggaaattagtggatctcttattcctgaaggaattcatagcaccctcaatatagtaaccatccagtttgacacggatttttatattagcaaatctggatttgcaattcagttttcaagttctgttgccactgcgtgtcgtgacccaggggtccccatgaatgggactcgaaatggggatggaagagaacctggggacactgttgtttttcaatgtgacccaggatatgaacttcaaggagaggaaagaataacctgcattcaggtagaaaatcggtacttctggcagcccagcccaccagtctgtatagcaccctgtggaggcaatttaacaggatcttcaggctttattctttcaccaaacttccctcatccatatccgcatagcagagactgtgactggactatcaccgtcaatgcagactatgttatctccttggcgttcatcagttttagcatagaaccaaactatgacttcctctatatctatgatggaccagacagtaatagcccactgattggaagttttcaagacagcaagttaccagagagaatagaaagcagctcaaatacaatgcatttggcttttcggagtgatggatctgttagttacactggatttcatctagaatacaaagcaaaactgcgagagtcctgctttgatccaggcaatataatgaatggcaccagacttggaatggattataaattagggtcaacagtcacctattactgtgatgctggttatgttcttcaaggttattcaacactcacctgtatcatgggagatgatggaagacctggatggaatagagccttgccaagttgtcatgcgccctgtggaagtcgttcaacaggttcagaaggcactgttctatcaccaaactatccaaaaaattacagtgtgggacataattgtgtttattctatagcagttccaaaggagtttgtggtgtttggccagtttgtatttttccagacatcactccacgatgttgttgaggtgtatgatgggccaactcagcaatcttctctgttatcttccctctcaggatcccattcaggagaatcacttccactgagttcaggtaatcagatcacaattcgatttacttcagttggaccaataacagctaagggatttcactttgtttaccaagctgttcctagaacaagttctacacaatgcagttctgtgcctgaaccaagattcggaagaagaattggcaatgaatttgcagtcggttcatcggttctttttgattgtaatccaggatatattctccatggatccatagcaattaggtgtgaaacagtgcccaattctttggcccagtggaatgattccttacctacttgtattgtgccctgtggtggaattttaactaagcgcaaagggactattttgtcacctggataccctgagccttatgacaacaatctgaattgtgtgtggaagatcacagtgccagagggagctggcattcaagtgcaagttgttagctttgctacagaacataattgggattctctggacttttatgatgggggagacaacaatgctccaagacttggaagctattcaggaacaacaataccccatcttttgaatagtacgtctaataatctgtatctaaattttcaatcagacatcagtgtttctgctgcaggatttcatcttgaatacacagcaattggtttggattcctgtcctgaaccacaaactcctagcagtggaattaaaattggagacagatatatggttggagatgtagtatcctttcagtgtgatcaaggatattctcttcagggtcactctcacattacatgtatgccaggacctgtaagaagatggaattatccaatcccaatttgtttagctcagtgtggtggtgctatgtcagacttcagtggtgtgatcctcagtcctgggtttcctggaaactatcccagcagtttagattgcacatggacaataaatctacccataggttttggtgtacatctccagtttgtaaatttttctacagaaaccatacatgattatttggaagtacgaagtggatcctcagaaactagtactgttattggccggcttagtggtcctcaaataccatcttccttattcagcaccacccatgaaaccagcttatattttcacagtgactattcacaaaacaaacaagggtttcatattgtataccaagcctatcagttgcaaagctgtcctgatccacgcccgtttcgaaatggttttgtaattggtaatgattttactgtgggtcaaaccatttcatttgaatgtttcccaggatacacattaattggaaattcagctctcacatgccttcacggagtcagtcgtaattggaatcatccacttccaaggtgtgaagctctttgtggtgggaatataactgcaatgaatggcaccatttattctcctgggtatcctgatgaatatccaaactttcaagattgtttttggcttgtaagagtaccccctgggaatggcatctacatcaattttactgtccttcaaacagaaccaatatatgatttcattactgtatgggatggaccagaccaaaattcacctcagatcggtcagttcagtggcaataccgctttggaatcagtctacagtacttcaaatcagattctaatcaaattccacagtgatttcacaacaagtggcttttttgtgctcagttatcacgcctatcaactaagggtgtgccaacctccaccacctgtgcccaatgctgaaattttgacggaagatgatgaatttgaaataggtgatattattaggtatcagtgtcttccaggatttactttagttggtaatgcaattctgacgtgcagattaggagaacgactgcagatggatggagcacctccagtttgtcaagtgctctgtcctgccaatgaattacggctagattctactggagtcatattgagccctggatatcctgacagttacccaaatcttcaaatgtgtgcatggagcatttcagtggaaaagggttataatatcaccatgtttgtagaattcttccagacagaaaaggaatttgatgttcttcaggtgtatgatggaccaaatattcaaagtccagtgcttatttccctcagtggggattattcatctgcttttaatataacaagcaatggtcatgaagtatttcttcagtggtcagcagatcatggcaataacaaaaaaggcttccggataagatatatagctttctactgtagtacaccagaatccccacctcatggatatattatcagtcagacaggtgggcagcttaacagtgtggtccgttgggcctgtgatcgaggattccgacttgttggaaaaagcagtgctgtgtgcagaaagtcttcctatgggtatcatgcatgggatgcgccagtccctgcctgtcaagcaatttcctgtgggattcctaaagctccaacaaatggaggaatactaacaacagactatttggtaggaacgcgagttacctatttttgtaatgatggatatcgattgtcatccaaagaactcactacagctgtatgccaatcagatggaacatggagcaatcataacaagacccctcgctgtgttgttatttcctgtggagaactacctacacctccaaatggaaataagattggaactcaaacttcatatggctcaacagctatctttacctgcgacttgggattcatgcttgtgggctctgctgtaagggaatgcctttcctcaggtctttggagtgaatctgaaaccagatgcctagcgggtcattgtggaattccagaactgattgtgaatggtcaagtcattggagaaaattatggatatagagacacagttgtatatcaatgtaatcctggttttcgattgattggttcttcagtgaggatatgtcaacaggatcacaattggtctggtcagctcccatcctgtgtgcctgttagctgtggtcaccctggtagtccaatttatggaagaacaagtggaaatgggttcaactttaatgatgtggtaacattctcatgcaatattgggtatcttatgcaagggccaacaaaggcacagtgccaggccaacagacagtggagccatcctccacctatgtgcaaagtggtcaactgttctgatcctggaattccagccaattctaaaagagaaagtaaaatagaacatggaaattttacttacggcactgtggtattctatgactgcaatcctggatattttttatttggatcttcagttttgatatgtcaaccaaatggacaatgggacaaacctttaccagaatgtatcatgattgactgtggacaccctggcgttcctcctaatgcagtcctgtctggcgagaagtatacttttgggtctactgttcactattcctgcacaggaaagcgttcccttttaggccagtcatcaagaacctgccaattgaatggccattggagtggatcacaacctcattgttcaggtgatgctactgggacatgtggcgatccaggtactcccggccatggctctagacaggaaagcaatttcagaactaaaagtactgtacgttatgcttgtgatactggttacatccttcatggctcagaagaaagaacatgtttagctaatggcagttggaccggaaggcagccagagtgcaaagctgtgcagtgtggtaacccaggaaccacagccaatgggaaagtcttccgaattgatggcacaacattttctagttcagtcatttattcctgcatggagggatacatcctttctggaccttcagttagacagtgcacagccaatggaacatggtctggaactttacctaactgtacaataatcagttgtggagacccaggtataccagccaatggactgagatatggagatgattatgtggttggacaaaatgtttcttacatgtgccagccaggctacacgatggaattgaatggctccagaatcaggacttgtacaattaatggcacatggagtggagtaatgccaacttgtagagctgttacctgcccaactcctccccagatctctaatggaaggctggaaggaacaaatttcgactggggctttagtattagctacatctgttctccaggctatgagctatccttccctgctgttttgacctgtgtagggaatggtacctggagtggtgaagtaccgcagtgcttaccaaagttttgtggtgaccctggtatacctgcccaaggaaaaagagaaggcaaaagctttatataccagtcagaggtttcattcagctgcaattttcctttcatattagtgggatcaagcaccagaatatgtcaagcagatggcacttggagtggttcatcacctcactgcatagagcctacccaaacctcttgtgaaaacccaggtgtgcctcggcatggatctcagaacaatacattcggatttcaagtaggaagtgttgtacagttccattgcaaaaaaggacaccttctccaagggtctacaacacgcacctgcctccctgatcttacgtggagtgggattcagcctgaatgcataccccacagctgtaaacagccagaaactcctgctcatgcaaatgtcgtagggatggaccttccatctcatgggtatacactgatttatacctgtcagcctggcttcttcttagcaggtggaacagaacatagagtgtgtagatccgataacacctggactggaaaagttcccatttgtgaagctggttctaaaatattggtgaaagatcctagacctgcactgggaacacccagcccaaagctaagtgttcctgatgatgtatttgcccaaaattatatatggaaaggctcttacaatttcaaaggaaggaaacaacccatgaccttaacagttactagtttcaatgcttccactgggagagttaacgcaacactgagcaatagcaacatggagctgctactttcaggggtatataaaagccaggaagctcgcctaatgttacgcatatatcttattaaagtacctgctcatgcttctgtgaagaaaatgaaggaagaaaattgggcaatggatggctttgtttctgctgagcctgatggagctacttatgtatttcaaggatttattcaaggcaaagattatggacaatttggcctacaaagactgggactgaatatgtcagaaggttcaaattcttcaaatcaacctcatggtacaaatagtagttctgtagccattgctattcttgtgcctttttttgcacttatatttgcaggatttggattttatctttataaacaaaggactgcacctaaaacacagtatacaggatgttcagttcatgaaaataacaatggccaagcagcttttgaaaatcccatgtatgacaccaacgcaaagtcagtggaagggaaggcggtacgatttgatcccaacttgaacacggtttgcacaatggtataacgaggcaacctttgccttcttcagaagcttggaaatcgacacacaaaacagtgcacatttagttcactgctaaacaaattaaagcacacttttcaggacttgctgggtcaccttttcctgaggaatgatacagaagagtgttttttcataaactggaccataattcttcatgtttaccatggagagttttacagaaatttggctgcactctgagagtgcttactcacagtttatttgctttttttaaaaaggagattattctaaaatataaacttatttgcatatattggaggagcatccactatcagtatttctgtgctttataaactatattagagggactgggtttaaaaaaaaagatatagggtagaaataagagctatacttacaagagtcaatagatcactgacttctctttaactgtcctgagctacatcacgcccacaaatctgtctttcataccactctatctgccattcattcttgttaaatgaggcattgttttctttatttaagattgagttatgactttaaatgtttatgagctagtttatgcctcggaagacataaggtttcccattccaatttgaatctttctatttctttagcatcatattgctcttcttcttttagactggttgtcatagtttctgcaaagggcaagttcattgtgctaccctcccaattcccccattatggagtaaccagtattattcagtgagctatggggtagtgtttcactccttgcttcaatatggttttttcctatttatttttattattttttaatcccaaatgtgatagtagcttcagtatgtttcctcacccaaaaaccatttggctggcagaaattatctagaaaaattattattttgcagttatctgagacaccaaacttaccatcctttattttacaatatttttgatcgaccaaataaaatgtcctaataatctactctatttatatctacatttccttccagctgagtcttcaaatttagcattattttgacacttttaattttcatttaacaatggattagaaaaatattttggtctagccactaaacataatgactgaaaaaaattattattataaatcaccaatataaatttattgcctacaattgtggacttatcatatttttatatatttttaaatttctgtacctttattgttaaacaccaagtttcacatacaagaggtttctttcattgtcaaattaagatatgtatttgtaagttattggtggctcatttaaactgtatcatacagtaatgccagcatttttatttaataggtcatcgtcttccttttatagctgttttacttcattgaatacgatcatgtacccagtgttaactctttgttgttgtccctttcaaatatggataactctgtgaacagtcttgactttttgtatcatgagacagagtgcctaagagaaacccttgcacctgggagcgctgcttggctctatctctacaacatttaatgaatttcttgtaaaccactttgagatacattgttttggaaattcatacaattttctcaacatggtactctactggcaggatgcagttttaaattttatgccatcagttatttattcttgtttattcaaatgactgcaataacaatgattcattcattaatgttaaggctaatacatttaagatcttgtttaaacaatgtttcttctgcaactggctactcctcttatattaatgcatacacttttgtaaagaagtatatttttatgaaaagaaactttgtaaaagtatgatgtaaattttcagtgcaatgtaaacaaaataaaaatggataattgcttttgt

SEQ ID NO: 123136 - DNA, 1368 bp, Homo sapiens
  Payload ID: 4183
  Gene Symbol: CUZD1
  Gene Name: CUB and zona pellucida-like domains 1
  ENST ID: ENST00000338948
  CDS Start-End: 333-476
gaggccacctgtttgtgatgtgcaggcacagaagaaaggcacagctccccatcagtttcatggaaaataactcagtgcctgctgggaaccagctgctggagatccctacagagagcttccactgggggcaacccttccaggaaggagttggggagagagaaccctcactgtggggaatgctgataaaccagtcacacagctgctctattctcacacaaatctaccccttgcgtggctggaactgacgtttccctggaggtgtccagaaagctgatgtaacacagagcctataaaagctgtcggtccttaaggctgcccagcgccttgccaaaatggagcttgtaagaaggctcatgccattgaccctcttaattctctcctgtttggcggagctgacaatggcggaggctgaaggtagaagatcagtcaattacttacaccaatataatcaccttttctgcatcctcaacttctgaagtgatcacccgtcagaaacaactccagattattgtgaagtgtgaaatgggacataattctacagtggagataatatacataacagaagatgatgtaatacaaagtcaaaatgcactgggcaaatataacaccagcatggctctttttgaatccaattcatttgaaaagactatacttgaatcaccatattatgtggatttgaaccaaactctttttgttcaagttagtctgcacacctcagatccaaatttggtggtgtttcttgatacctgtagagcctctcccacctctgactttgcatctccaacctacgacctaatcaagagtggatgtagtcgagatgaaacttgtaaggtgtatcccttatttggacactatgggagattccagtttaatgcctttaaattcttgagaagtatgagctctgtgtatctgcagtgtaaagttttgatatgtgatagcagtgaccaccagtctcgctgcaatcaaggttgtgtctccagaagcaaacgagacatttcttcatataaatggaaaacagattccatcataggacccattcgtctgaaaagggatcgaagtgcaagtggcaattcaggatttcagcatgaaacacatgcggaagaaactccaaaccagcctttcaacagtgtgcatctgttttccttcatggttctagctctgaatgtggtgactgtagcgacaatcacagtgaggcattttgtaaatcaacgggcagactacaaataccagaagctgcagaactattaactaacaggtccaaccctaagtgagacatgtttctccaggatgccaaaggaaatgctacctcgtggctacacatattatgaataaatgaggaagggcctgaaagtgacacacaggcctgca

SEQ ID NO: 123137 - DNA, 1976 bp, Homo sapiens
  Payload ID: 4183
  Gene Symbol: CUZD1
  Gene Name: CUB and zona pellucida-like domains 1
  ENST ID: ENST00000368900
  CDS Start-End: 333-491
gaggccacctgtttgtgatgtgcaggcacagaagaaaggcacagctccccatcagtttcatggaaaataactcagtgcctgctgggaaccagctgctggagatccctacagagagcttccactgggggcaacccttccaggaaggagttggggagagagaaccctcactgtggggaatgctgataaaccagtcacacagctgctctattctcacacaaatctaccccttgcgtggctggaactgacgtttccctggaggtgtccagaaagctgatgtaacacagagcctataaaagctgtcggtccttaaggctgcccagcgccttgccaaaatggagcttgtaagaaggctcatgccattgaccctcttaattctctcctgtttggcggagctgacaatggcggaggctgaaggcttgatccagatggaagctgtgaaagtgaaaacattaaagtctttgacggaacctccagcaatgggcctctgctagggcaagtctgcagtaaaaacgactatgttcctgtatttgaatcatcatccagtacattgacgtttcaaatagttactgactcagcaagaattcaaagaactgtctttgtcttctactacttcttctctcctaacatctctattccaaactgtggcggttacctggataccttggaaggatccttcaccagccccaattacccaaagccgcatcctgagctggcttattgtgtgtggcacatacaagtggagaaagattacaagataaaactaaacttcaaagagattttattatgccaattcttaccggggattttctgcttcctacacctcaatttatgcagaaaacatcaacactacatctttaacttgctcttctgacaggatgagagttattataagcaaatcctacctagaggcttttaactctaatgggaataacttgcaactaaaagacccaacttgcagaccaaaattatcaaatgttgtggaattttctgtccctcttaatggatgtggtacaatcagaaaggtagaagatcagtcaattacttacaccaatataatcaccttttctgcatcctcaacttctgaagtgatcacccgtcagaaacaactccagattattgtgaagtgtgaaatgggacataattctacagtggagataatatacataacagaagatgatgtaatacaaagtcaaaatgcactgggcaaatataacaccagcatggctctttttgaatccaattcatttgaaaagactatacttgaatcaccatattatgtggatttgaaccaaactctttttgttcaagttagtctgcacacctcagatccaaatttggtggtgtttcttgatacctgtagagcctctcccacctctgactttgcatctccaacctacgacctaatcaagagtggatgtagtcgagatgaaacttgtaaggtgtatcccttatttggacactatgggagattccagtttaatgcctttaaattcttgagaagtatgagctctgtgtatctgcagtgtaaagttttgatatgtgatagcagtgaccaccagtctcgctgcaatcaaggttgtgtctccagaagcaaacgagacatttcttcatataaatggaaaacagattccatcataggacccattcgtctgaaaagggatcgaagtgcaagtggcaattcaggatttcagcatgaaacacatgcggaagaaactccaaaccagcctttcaacagtgtgcatctgttttccttcatggttctagctctgaatgtggtgactgtagcgacaatcacagtgaggcattttgtaaatcaacgggcagactacaaataccagaagctgcagaactattaactaacaggtccaaccctaagtgagacatgtttctccaggatgccaaaggaaatgctacctcgtggctacacatattatgaataaatgaggaagggcctgaaagtgacacacaggcctgca

SEQ ID NO: 123138 - DNA, 2125 bp, Homo sapiens
  Payload ID: 4183
  Gene Symbol: CUZD1
  Gene Name: CUB and zona pellucida-like domains 1
  ENST ID: ENST00000368901
  CDS Start-End: 333-491
gaggccacctgtttgtgatgtgcaggcacagaagaaaggcacagctccccatcagtttcatggaaaataactcagtgcctgctgggaaccagctgctggagatccctacagagagcttccactgggggcaacccttccaggaaggagttggggagagagaaccctcactgtggggaatgctgataaaccagtcacacagctgctctattctcacacaaatctaccccttgcgtggctggaactgacgtttccctggaggtgtccagaaagctgatgtaacacagagcctataaaagctgtcggtccttaaggctgcccagcgccttgccaaaatggagcttgtaagaaggctcatgccattgaccctcttaattctctcctgtttggcggagctgacaatggcggaggctgaaggcttgatccagatggaagctgtgaaagtgaaaacattaaagtctttgacggaacctccagcaatgggcctctgctagggcaagtctgcagtaaaaacgactatgttcctgtatttgaatcatcatccagtacattgacgtttcaaatagttactgactcagcaagaattcaaagaactgtctttgtcttctactacttcttctctcctaacatctctattccaaactgtggcggttacctggataccttggaaggatccttcaccagccccaattacccaaagccgcatcctgagctggcttattgtgtgtggcacatacaagtggagaaagattacaagataaaactaaacttcaaagagattttcctagaaatagacaaacagtgcaaatttgattttcttgccatctatgatggcccctccaccaactctggcctgattggacaagtctgtggccgtgtgactcccaccttcgaatcgtcatcaaactctctgactgtcgtgttgtctacagattatgccaattcttaccggggattttctgcttcctacacctcaatttatgcagaaaacatcaacactacatctttaacttgctcttctgacaggatgagagttattataagcaaatcctacctagaggcttttaactctaatgggaataacttgcaactaaaagacccaacttgcagaccaaaattatcaaatgttgtggaattttctgtccctcttaatggatgtggtacaatcagaaaggtagaagatcagtcaattacttacaccaatataatcaccttttctgcatcctcaacttctgaagtgatcacccgtcagaaacaactccagattattgtgaagtgtgaaatgggacataattctacagtggagataatatacataacagaagatgatgtaatacaaagtcaaaatgcactgggcaaatataacaccagcatggctctttttgaatccaattcatttgaaaagactatacttgaatcaccatattatgtggatttgaaccaaactctttttgttcaagttagtctgcacacctcagatccaaatttggtggtgtttcttgatacctgtagagcctctcccacctctgactttgcatctccaacctacgacctaatcaagagtggatgtagtcgagatgaaacttgtaaggtgtatcccttatttggacactatgggagattccagtttaatgcctttaaattcttgagaagtatgagctctgtgtatctgcagtgtaaagttttgatatgtgatagcagtgaccaccagtctcgctgcaatcaaggttgtgtctccagaagcaaacgagacatttcttcatataaatggaaaacagattccatcataggacccattcgtctgaaaagggatcgaagtgcaagtggcaattcaggatttcagcatgaaacacatgcggaagaaactccaaaccagcctttcaacagtgtgcatctgttttccttcatggttctagctctgaatgtggtgactgtagcgacaatcacagtgaggcattttgtaaatcaacgggcagactacaaataccagaagctgcagaactattaactaacaggtccaaccctaagtgagacatgtttctccaggatgccaaaggaaatgctacctcgtggctacacatattatgaataaatgaggaagggcctgaaagtgacacacaggcctgca

SEQ ID NO: 123139 - DNA, 2903 bp, Homo sapiens
  Payload ID: 4183
  Gene Symbol: CUZD1
  Gene Name: CUB and zona pellucida-like domains 1
  Uniprot ID: Q86UP6
  ENST ID: ENST00000368904
  CDS Start-End: 951-2774
ccttctctctggactttgcatttccattccttttcattgacaaactgactttttttatttctttttttccatctctgggccagcttgggatcctaggccgccctgggaagacatttgtgttttacacacataaggatctgtgtttggggtttcttcttcctcccctgacattggcattgcttagtggttgtgtggggagggagaccacgtgggctcagtgcttgcttgcacttatctgcctaggtacatcgaagtcttttgacctccatacagtgattatgcctgtcatcgctggtggtatcctggcggccttgctcctgctgatagttgtcgtgctctgtctttacttcaaaatacacaacgcgctaaaagctgcaaaggaacctgaagctgtggctgtaaaaaatcacaacccagacaaggtgtggtgggccaagaacagccaggccaaaaccattgccacggagtcttgtcctgccctgcagtgctgtgaaggatatagaatgtgtgccagttttgattccctgccaccttgctgttgcgacataaatgagggcctctgagttaggaaaggctcccttctcaaagcagagccctgaagacttcaatgatgtcaatgaggccacctgtttgtgatgtgcaggcacagaagaaaggcacagctccccatcagtttcatggaaaataactcagtgcctgctgggaaccagctgctggagatccctacagagagcttccactgggggcaacccttccaggaaggagttggggagagagaaccctcactgtggggaatgctgataaaccagtcacacagctgctctattctcacacaaatctaccccttgcgtggctggaactgacgtttccctggaggtgtccagaaagctgatgtaacacagagcctataaaagctgtcggtccttaaggctgcccagcgccttgccaaaatggagcttgtaagaaggctcatgccattgaccctcttaattctctcctgtttggcggagctgacaatggcggaggctgaaggcaatgcaagctgcacagtcagtctagggggtgccaatatggcagagacccacaaagccatgatcctgcaactcaatcccagtgagaactgcacctggacaatagaaagaccagaaaacaaaagcatcagaattatcttttcctatgtccagcttgatccagatggaagctgtgaaagtgaaaacattaaagtctttgacggaacctccagcaatgggcctctgctagggcaagtctgcagtaaaaacgactatgttcctgtatttgaatcatcatccagtacattgacgtttcaaatagttactgactcagcaagaattcaaagaactgtctttgtcttctactacttcttctctcctaacatctctattccaaactgtggcggttacctggataccttggaaggatccttcaccagccccaattacccaaagccgcatcctgagctggcttattgtgtgtggcacatacaagtggagaaagattacaagataaaactaaacttcaaagagattttcctagaaatagacaaacagtgcaaatttgattttcttgccatctatgatggcccctccaccaactctggcctgattggacaagtctgtggccgtgtgactcccaccttcgaatcgtcatcaaactctctgactgtcgtgttgtctacagattatgccaattcttaccggggattttctgcttcctacacctcaatttatgcagaaaacatcaacactacatctttaacttgctcttctgacaggatgagagttattataagcaaatcctacctagaggcttttaactctaatgggaataacttgcaactaaaagacccaacttgcagaccaaaattatcaaatgttgtggaattttctgtccctcttaatggatgtggtacaatcagaaaggtagaagatcagtcaattacttacaccaatataatcaccttttctgcatcctcaacttctgaagtgatcacccgtcagaaacaactccagattattgtgaagtgtgaaatgggacataattctacagtggagataatatacataacagaagatgatgtaatacaaagtcaaaatgcactgggcaaatataacaccagcatggctctttttgaatccaattcatttgaaaagactatacttgaatcaccatattatgtggatttgaaccaaactctttttgttcaagttagtctgcacacctcagatccaaatttggtggtgtttcttgatacctgtagagcctctcccacctctgactttgcatctccaacctacgacctaatcaagagtggatgtagtcgagatgaaacttgtaaggtgtatcccttatttggacactatgggagattccagtttaatgcctttaaattcttgagaagtatgagctctgtgtatctgcagtgtaaagttttgatatgtgatagcagtgaccaccagtctcgctgcaatcaaggttgtgtctccagaagcaaacgagacatttcttcatataaatggaaaacagattccatcataggacccattcgtctgaaaagggatcgaagtgcaagtggcaattcaggatttcagcatgaaacacatgcggaagaaactccaaaccagcctttcaacagtgtgcatctgttttccttcatggttctagctctgaatgtggtgactgtagcgacaatcacagtgaggcattttgtaaatcaacgggcagactacaaataccagaagctgcagaactattaactaacaggtccaaccctaagtgagacatgtttctccaggatgccaaaggaaatgctacctcgtggctacacatattatgaataaatgaggaagggcctgaaagtgacacacaggcctgcatgtcactgt

SEQ ID NO: 123140 - DNA, 2279 bp, Homo sapiens
  Payload ID: 4183
  Gene Symbol: CUZD1
  Gene Name: CUB and zona pellucida-like domains 1
  Uniprot ID: Q86UP6
  ENST ID: ENST00000392790
  CDS Start-End: 333-2156
gaggccacctgtttgtgatgtgcaggcacagaagaaaggcacagctccccatcagtttcatggaaaataactcagtgcctgctgggaaccagctgctggagatccctacagagagcttccactgggggcaacccttccaggaaggagttggggagagagaaccctcactgtggggaatgctgataaaccagtcacacagctgctctattctcacacaaatctaccccttgcgtggctggaactgacgtttccctggaggtgtccagaaagctgatgtaacacagagcctataaaagctgtcggtccttaaggctgcccagcgccttgccaaaatggagcttgtaagaaggctcatgccattgaccctcttaattctctcctgtttggcggagctgacaatggcggaggctgaaggcaatgcaagctgcacagtcagtctagggggtgccaatatggcagagacccacaaagccatgatcctgcaactcaatcccagtgagaactgcacctggacaatagaaagaccagaaaacaaaagcatcagaattatcttttcctatgtccagcttgatccagatggaagctgtgaaagtgaaaacattaaagtctttgacggaacctccagcaatgggcctctgctagggcaagtctgcagtaaaaacgactatgttcctgtatttgaatcatcatccagtacattgacgtttcaaatagttactgactcagcaagaattcaaagaactgtctttgtcttctactacttcttctctcctaacatctctattccaaactgtggcggttacctggataccttggaaggatccttcaccagccccaattacccaaagccgcatcctgagctggcttattgtgtgtggcacatacaagtggagaaagattacaagataaaactaaacttcaaagagattttcctagaaatagacaaacagtgcaaatttgattttcttgccatctatgatggcccctccaccaactctggcctgattggacaagtctgtggccgtgtgactcccaccttcgaatcgtcatcaaactctctgactgtcgtgttgtctacagattatgccaattcttaccggggattttctgcttcctacacctcaatttatgcagaaaacatcaacactacatctttaacttgctcttctgacaggatgagagttattataagcaaatcctacctagaggcttttaactctaatgggaataacttgcaactaaaagacccaacttgcagaccaaaattatcaaatgttgtggaattttctgtccctcttaatggatgtggtacaatcagaaaggtagaagatcagtcaattacttacaccaatataatcaccttttctgcatcctcaacttctgaagtgatcacccgtcagaaacaactccagattattgtgaagtgtgaaatgggacataattctacagtggagataatatacataacagaagatgatgtaatacaaagtcaaaatgcactgggcaaatataacaccagcatggctctttttgaatccaattcatttgaaaagactatacttgaatcaccatattatgtggatttgaaccaaactctttttgttcaagttagtctgcacacctcagatccaaatttggtggtgtttcttgatacctgtagagcctctcccacctctgactttgcatctccaacctacgacctaatcaagagtggatgtagtcgagatgaaacttgtaaggtgtatcccttatttggacactatgggagattccagtttaatgcctttaaattcttgagaagtatgagctctgtgtatctgcagtgtaaagttttgatatgtgatagcagtgaccaccagtctcgctgcaatcaaggttgtgtctccagaagcaaacgagacatttcttcatataaatggaaaacagattccatcataggacccattcgtctgaaaagggatcgaagtgcaagtggcaattcaggatttcagcatgaaacacatgcggaagaaactccaaaccagcctttcaacagtgtgcatctgttttccttcatggttctagctctgaatgtggtgactgtagcgacaatcacagtgaggcattttgtaaatcaacgggcagactacaaataccagaagctgcagaactattaactaacaggtccaaccctaagtgagacatgtttctccaggatgccaaaggaaatgctacctcgtggctacacatattatgaataaatgaggaagggcctgaaagtgacacacaggcctgcatgt

SEQ ID NO: 123141 - DNA, 2054 bp, Homo sapiens
  Payload ID: 4183
  Gene Symbol: CUZD1
  Gene Name: CUB and zona pellucida-like domains 1
  ENST ID: ENST00000545804
  CDS Start-End: 865-1935
cttactggggaaaggagagaccaagggctgcttcatgaaggctgtttctgagctgagctttgaacaatagcatgacgagggtaggtggaggtgggagtcagggaagaggactcacctctgctggagctgacagctgaggagtcatgggaagaaagggaggatagaacagaaggccatgaagtagtggcggatgagactggaaagctgagctggtgagagtgaggaagagccttcaagggagggtgtgactttattttctatggcgcaattcaggtaatgggagtctctccagatgcaacacatgttacagcacaactttaatatgattcgtttggcaatagtataaagattccctctctgccctgcaccagtggacagaaatttcaatgataaaaaaggatgaaaacctcaatatgtgacccatgggaaagatagagatggaatcatactcaggagagatgtgttaagctcaatgcacaacacagaaattaaaagcagtctctattttgatgttcattcttgaccaccttcacatccatttcagctattccaaactgtggcggttacctggataccttggaaggatccttcaccagccccaattacccaaagccgcatcctgagctggcttattgtgtgtggcacatacaagtggagaaagattacaagataaaactaaacttcaaagagattttaggccctcattctctagcctagaaatagacaaacagtgcaaatttgattttcttgccatctatgatggcccctccaccaactctggcctgattggacaagtctgtggccgtgtgactcccaccttcgaatcgtcatcaaactctctgactgtcgtgttgtctacagattatgccaattcttaccggggattttgcttcctacacctcaatttatgcagaaaacatcaacactacatctttaacttgctcttctgacaggatgagagttattataagcaaatcctacctagaggcttttaactctaatgggaataacttgcaactaaaagacccaacttgcagaccaaaattatcaaatgttgtggaattttctgtccctcttaatggatgtggtacaatcagaaaggtagaagatcagtcaattacttacaccaatataatcaccttttctgcatcctcaacttctgaagtgatcacccgtcagaaacaactccagattattgtgaagtgtgaaatgggacataattctacagtggagataatatacataacagaagatgatgtaatacaaagtcaaaatgcactgggcaaatataacaccagcatggctctttttgaatccaattcatttgaaaagactatacttgaatcaccatattatgtggatttgaaccaaactctttttgttcaagttagtctgcacacctcagatccaaatttggtggtgtttcttgatacctgtagagcctctcccacctctgactttgcatctccaacctacgacctaatcaagagtggatgtagtcgagatgaaacttgtaaggtgtatcccttatttggacactatgggagattccagtttaatgcctttaaattcttgagaagtatgagctctgtgtatctgcagtgtaaagttttgatatgtgatagcagtgaccaccagtctcgctgcaatcaaggttgtgtctccagaagcaaacgagacatttcttcatataaatggaaaacagattccatcataggacccattcgtctgaaaagggatcgaagtgcaagtggcaattcaggatttcagcatgaaacacatgcggaagaaactccaaaccagcctttcaacagtgtgcatctgttttccttcatggttctagctctgaatgtggtgactgtagcgacaatcacagtgaggcattttgtaaatcaacgggcagactacaaataccagaagctgcagaactattaactaacaggtccaaccctaagtgagacatgtttctccaggatgccaaaggaaatgctacctcgtggctacacatattatgaataaatgaggaagggcctgaaagtgacacacaggcctgc

SEQ ID NO: 123142 - DNA, 6006 bp, Homo sapiens
  Payload ID: 4184
  Gene Symbol: CDCP1
  Gene Name: CUB domain containing protein 1
  Uniprot ID: Q9H5V8
  ENST ID: ENST00000296129
  CDS Start-End: 136-2646
gggcggggctcgggccggtccgcccgcgcgcaggtgagtgagccagggcggagcgcagctgcgccgggcttgggcgcctggggccgccgctccccaccgtcgttttccccaccgaggccgaggcgtcccggagtcatggccggcctgaactgcggggtctctatcgcactgctaggggttctgctgctgggtgcggcgcgcctgccgcgcggggcagaagcttttgagattgctctgccacgagaaagcaacattacagttctcataaagctggggaccccgactctgctggcaaaaccctgttacatcgtcatttctaaaagacatataaccatgttgtccatcaagtctggagaaagaatagtctttacctttagctgccagagtcctgagaatcactttgtcatagagatccagaaaaatattgactgtatgtcaggcccatgtccttttggggaggttcagcttcagccctcgacatcgttgttgcctaccctcaacagaactttcatctgggatgtcaaagctcataagagcatcggtttagagctgcagttttccatccctcgcctgaggcagatcggtccgggtgagagctgcccagacggagtcactcactccatcagcggccgaatcgatgccaccgtggtcaggatcggaaccttctgcagcaatggcactgtgtcccggatcaagatgcaagaaggagtgaaaatggccttacacctcccatggttccaccccagaaatgtctccggcttcagcattgcaaaccgctcatctataaaacgtctgtgcatcatcgagtctgtgtttgagggtgaaggctcagcaaccctgatgtctgccaactacccagaaggcttccctgaggatgagctcatgacgtggcagtttgtcgttcctgcacacctgcgggccagcgtctccttcctcaacttcaacctctccaactgtgagaggaaggaggagcgggttgaatactacatcccgggctccaccaccaaccccgaggtgttcaagctggaggacaagcagcctgggaacatggcggggaacttcaacctctctctgcaaggctgtgaccaagatgcccaaagtccagggatcctccggctgcagttccaagttttggtccaacatccacaaaatgaaagcaataaaatctacgtggttgacttgagtaatgagcgagccatgtcactcaccatcgagccacggcccgtcaaacagagccgcaagtttgtccctggctgtttcgtgtgtctagaatctcggacctgcagtagcaacctcaccctgacatctggctccaaacacaaaatctccttcctttgtgatgatctgacacgtctgtggatgaatgtggaaaaaaccataagctgcacagaccaccggtactgccaaaggaaatcctactcactccaggtgcccagtgacatcctccacctgcctgtggagctgcatgacttctcctggaagctgctggtgcccaaggacaggctcagcctggtgctggtgccagcccagaagctgcagcagcatacacacgagaagccctgcaacaccagcttcagctacctcgtggccagtgccatacccagccaggacctgtacttcggctccttctgcccgggaggctctatcaagcagatccaggtgaagcagaacatctcggtgacccttcgcacctttgcccccagcttccaacaagaggcctccaggcagggtctgacggtgtcctttataccttatttcaaagaggaaggcgttttcacggtgacccctgacacaaaaagcaaggtctacctgaggacccccaactgggaccggggcctgccatccctcacctctgtgtcctggaacatcagcgtgcccagagaccaggtggcctgcctgactttctttaaggagcggagcggcgtggtctgccagacagggcgcgcattcatgatcatccaggagcagcggacccgggctgaggagatcttcagcctggacgaggatgtgctccccaagccaagcttccaccatcacagcttctgggtcaacatctctaactgcagccccacgagcggcaagcagctagacctgctcttctcggtgacacttaccccaaggactgtggacttgactgtcatcctcatcgcagcggtgggaggtggagtcttactgctgtctgccctcgggctcatcatttgctgtgtgaaaaagaagaaaaagaagacaaacaagggccccgctgtgggtatctacaatgacaacatcaatactgagatgccgaggcagccaaaaaagtttcagaaagggcgaaaggacaatgactcccatgtgtatgcagtcatcgaggacaccatggtatatgggcatctgctacaggattccagcggctccttcctgcagccagaggtggacacctaccggccgttccagggcaccatgggggtctgtcctccctccccacccaccatatgctccagggccccaactgcaaagttggccactgaggagccacctcctcgctcccctcctgagtctgagagtgaaccgtacaccttctcccatcccaacaatggggatgtaagcagcaaggacacagacattcccttactgaacactcaggagcccatggagccagcagaataacttgatccattccagacgctttgctgagtttcataaagcagggcactgagacacccgtccgtgttcctaaccagaaatcctaaagaagaggaattatacagaaggaacagcaggaggttttcctggacaccgccaacttcacattgctcagtggactcattctaagggcaagacattgaaaatgatgaattccaatctggatacagtcatgacagctcatgtgctcctcaacttaggctgtgcggttagccagcctgtaatgagaggagagaggcctgagtcacctagcatagggttgcagcaagccctggattcagagtgttaaacagaggcttgccctcttcaggacaacagttccaattccaaggagcctacctgaggtccctactctcactggggtccccaggatgaaaacgacaatgtgcctttttattattatttatttggtggtcctgtgttatttaagagatcaaatgtataaccacctagctcttttcacctgacttagtaataactcatactaactggtttggatgcctgggttgtgacttctactgaccgctagataaacgtgtgcctgtcccccaggtggtgggaataatttacaatctgtccaaccagaaaagaatgtgtgtgtttgagcagcattgacacatatctgctttgataagagacttcctgattctctaggtcggttcgtggttatcccattgtggaaattcatcttgaatcccattgtcctatagtcctagcaataagagaaatttcctcaagtttccatgtgcggttctcctagctgcagcaatactttgacatttaaagagaaatttagagaatattctcatcctctaaaaatgtttaaatatataccaaacagtggccccctgcattagttttctgttgccactgcaacctattacttggtagcttaaaaacaacacattagcttatagtcctggggatcagaattccaaaatggatgtccctgaatgaaaatcaaggtgtcagcagagctgtgctccttctgaaggctctagggagaagccggttccttgccatttcaagcttctagaggctggctgcattcccaggctccagtggctggtcaagcttttctcacatggcatcactgtgacactggccctcccacttccctctttgacttacaaagcccaccaggaagatccaggataatctctccatctaaagttccttcatcatcctggaagagccttttgccatgcaagacaacatagccacaggtggggattaggaccagaacatctttggggtgctgttattctgcctaccacaccttcctgccactgactcccacaggagaggctacaaaatgatctggcgcacagggatgttttgtttagcttgcggactctaacacttaaaaaaaaacccagatcagaagatctggccatgctggggctcacattctcacctagcaacaactggctggagctgggcaccagctctgcctttagaaggggtgtccacttcaccaggtcaccacagcccacactacgccctatcacttcccacaatgaggctgagtgtttgtttctactgatcaatgcccctgcaggttgcatttattgtaatgaaaaagaaagactgggattaatctctaatcaggtgagtagaccatgagaccaatgtgtgctcacattaccctttttcttttttttctttttctttttctttttttttttaatgtgagacaggatctcattctgttgcctaggctggagtgcagtggcgcaatctcggctcactgcaacctctgcctcctgggctcaagcaattctcccacctcagcctcccaaatagctgggatcactggcacaaaccaccatgcccagctaattttgtattttttgtagagacagggtttcaccatgttgcccaggctggtctcaacctcctgggctcaagcaatcctcctgcctcggcctcccaaagtgctgggattacagatgtgagccaccgcatccagccccacaccctcatttataccaattacctgcccagtaactgtggacttttgcttcctcacccctgctctgatctggaaggagagggattatgttatagcttgtcagcacagtcccaagttcaatatttctgcggcaaaaacttccttcaaaaaataaatgtacttcattgtattcaatgaattcaccttggaaatgcaccgcctcaacttgttcacatggcataaatgaaaggaattttatagtctcctaaatggcgtgtactgcaagacctcttgaacactttccagaggataggatatttaagtcatgcccttggcgttgcctatggcacctttcccttctgaaagtctggttcctgcccagtgacccttggccttgtgagccgagatgctgaccctgcataaagggccaaaggagggctgcggcttccttccctcactgaagagcccttatttgaattcactgtgtggagccctagccctccattctcgacattccccaacctcccagccccttccaagcaggactaggtgccctgcattccacccaaggtgggattggccttccttaggctggctacttgtcaccatcaccgacatcactgttgcctgcaaggacaccacgtggccattttccttcaactgagggctcaaaactcctggacaagttgctggctcctgagaccagtatttcctggagctgtgcctcagtgaaggggcccagcctgaggaaccctggctcttttctttaaagcccaggccccacttacgtaaaacatttcagggtcactggaaacagtgaagtgccatttgttgaagcctactgcatgccagcccactgctcatccacgtggtctgccatgcctacgaggaaggccagcgcatgcaggactggtctctaatgctgtggtcattgcacagaagggaaaggtctcaaggaagagtcaactggaacaagcacaagcccaccggacatggccttggtaaaggttagcagactggtgtgtgtggatctgcagtgcttcactggaaataatttattcattgcagatactttttaggtggcattttattcatttcctgtgctttaaataaacaaatgtaccaaaaaacaagtatcaagctgtttaagtgcttcggctacttgtcccctggttcagtagaggccccggtttcccagttgttgactgtgacaggctcagcatgggctcagcagatgctgtcttaatttgtggatgatacagaaagccaggctttgggatacaagttctttcctcttcatttgatgccgtgcactgtgtgaagcagatgtttttgtccggaaataaaaataatagtcttggagtctcgcc

SEQ ID NO: 123143 - DNA, 1416 bp, Homo sapiens
  Payload ID: 4184
  Gene Symbol: CDCP1
  Gene Name: CUB domain containing protein 1
  Uniprot ID: Q9H5V8
  ENST ID: ENST00000425231
  CDS Start-End: 136-1167
gggcggggctcgggccggtccgcccgcgcgcaggtgagtgagccagggcggagcgcagctgcgccgggcttgggcgcctggggccgccgctccccaccgtcgttttccccaccgaggccgaggcgtcccggagtcatggccggcctgaactgcggggtctctatcgcactgctaggggttctgctgctgggtgcggcgcgcctgccgcgcggggcagaagcttttgagattgctctgccacgagaaagcaacattacagttctcataaagctggggaccccgactctgctggcaaaaccctgttacatcgtcatttctaaaagacatataaccatgttgtccatcaagtctggagaaagaatagtctttacctttagctgccagagtcctgagaatcactttgtcatagagatccagaaaaatattgactgtatgtcaggcccatgtccttttggggaggttcagcttcagccctcgacatcgttgttgcctaccctcaacagaactttcatctgggatgtcaaagctcataagagcatcggtttagagctgcagttttccatccctcgcctgaggcagatcggtccgggtgagagctgcccagacggagtcactcactccatcagcggccgaatcgatgccaccgtggtcaggatcggaaccttctgcagcaatggcactgtgtcccggatcaagatgcaagaaggagtgaaaatggccttacacctcccatggttccaccccagaaatgtctccggcttcagcattgcaaaccgctcatctataaaacgtctgtgcatcatcgagtctgtgtttgagggtgaaggctcagcaaccctgatgtctgccaactacccagaaggcttccctgaggatgagctcatgacgtggcagtttgtcgttcctgcacacctgcgggccagcgtctccttcctcaacttcaacctctccaactgtgagaggaaggaggagcgggttgaatactacatcccgggctccaccaccaaccccgaggtgttcaagctggaggacaagcagcctgggaacatggcggggaacttcaacctctctctgcaaggctgtgaccaagatgcccaaagtccagggatcctccggctgcagttccaagttttggtccaacatccacaaaatgaaagcagtgagtgagccccactttcctttttcttcctcctccagcaccttcgttgtttcctgggtagtctgcctgggtgaggctcccttcctgtttctcatctgtggcttctgaaacacttagactctggacccagcaagagtttcaggaagtgggttgctaggcagttagacaggcttgttggtgaacacccggtatgtagttccatttcagcacaataaaaagaaatcttgcattcaagatgctaaattgtttttaacgaa

SEQ ID NO: 123144 - DNA, 2723 bp, Homo sapiens
  Payload ID: 4185
  Gene Symbol: CDCP2
  Gene Name: CUB domain containing protein 2
  Uniprot ID: Q5VXM1
  ENST ID: ENST00000371330
  CDS Start-End: 849-2198
ttcctgttggacacaaagtccccggggcatttctgcagcgccagctccttgtgcggggcctggcacatacgatgttcaagcaaggcttgggatcaataaaggagcgggcattccatattctcggccggaagttacactggctcccagacctattattgcattaagagttgcacaatacgattttccaattctgttattcctgctgcattcttgcgtgaaaaagacttttccctcaactgtctgcagcaacctccttccctcctctgagctaaatccgcatgtctgaaggaagttgtcctgcgtgtcccactaaatacaggctcctttcagctccctcggagtggggatgggaagaacctgtagcgagcacctactctgtgctttagcaagtgagatctcctttcatttgcacaacagcccctgggtcggagctgaacagccccactggatggatgagaagacccagaccaggggagttaaatgacttgtccaaggtgacctggcaagttacaggctgaactgggattgatcccagatctacccggccctaaaagttatgccctttctcctccactcactttccttccaggcctgagttccttcccttcctgatagtgtggtcggtgcagatctcagaacgtgtaaacctggtgacaccagatccgtcactttacagtgagtaaaggaagtacccagggatcggcttactaattctaggggccggtgaattattcatgccaccattaacttggaggccctttcagcctcacctctctttcccttgctccggaccctgagatcctggcctacctgagctcggcagacctgtgggggcccctggtgaggagatgctggcagagtggggggcttgcctgctgctggcagtggcactgctgggcccagggctccaggcccaagccatggaaggtgtcaaatgtgggggtgtgctctcagcaccttctggaaacttctccagccccaacttccctagactgtacccctacaacacagagtgcagctggctgatcgtggtggccgagggatcctcggtgctgctcaccttccatgcctttgacctagagtaccacgacacctgcagcttcgactttctggagatctacaatggggcctcaccagacaagggcaacctgctggggaggttctgcggcaaggtgcccccgccgcccttcacctcctcctggcatgtcatgtctgtcatcttccactcggacaagcatgtggccagccatggcttttctgcgggctaccagaaagatgtgtgtggcggcgtcctgactggcctgtcaggggtcctcaccagtcctgagtatcccaacaactacccgaacagcatggagtgccactgggtgatccgggccgctggccctgcccacgtcaagctggtgttcgtggacttccaggtggagggcaatgaagagtgcacctatgactacgtggctgtgcttggggggcctggccccacccgtgggcaccactactgtggcagcaccaggccccccaccctcgtgtctctgggccacgaactgcaggtggtcttcaagtccgacttcaacatcggaggccgtggcttcaaggcctactacttctcaggagaatgccaggaggtatacatggccatgcggggcaacttctccagcccacagtaccccagctcctaccccaacaacatccgctgccactggaccatccgcctgcccccgggctaccaggtcaaggtgttcttcctggacctggacctggaggagcccaacagcctgaccaagacctgtgactttgaccatctggcggccttcgatggggccagcgaggaggcacccctgctggggaattggtgtggacaccacctgccaccacccgtgacctcaagccacaaccagcttctgcttctgctgcacacagaccgcagcaccacccgcaggggcttctctgtggcctacatcggaggtcagctgggctgtgggagtgggtccactgagggcgaaggggaggctttgcagcctcagtctttgcagtctccttcctccatcccaccagtttgtcctgccccccccatgaatggtcttctccagctccttctccattggctacacccttgcccactctcgggacccctaagactggacggtacggctcccgcttgtttccactattgcagagcctccttccccagcttctaacttcgtgagtcctcacccctccccatctggttccttccccctgggcccctggcccctcttgtgttgttattggtcccctgtatccaggggaaatagacaaaatatggtaatattgtttatggcaaaaaaattggtataactgtggggatgtctaccagccctgcttgtatcattcagaactactcattgaaaacatggtgcttgtttttcctcactcaacaggaagcctggagctaggcagctgctgtattggtccaggggctcaacactgttccaaatgttatctctgggactctctgagcctcacagctgcaagatggctgccatagctccaggcatcgcatccatgttcaagactggaggggacaggggaagtgccagctgcaaatggctctttatcaagaaagcaaaagcatctctagaacctctcataagacttttacaaaatgtcccatcagtttgaactcagtcagatggccatgcctggctgcagaggaagctggggagctggtatttggctttctc

SEQ ID NO: 123145 - DNA, 705 bp, Homo sapiens
  Payload ID: 4186
  Gene Symbol: CUBN
  Gene Name: cubilin (intrinsic factor-cobalamin receptor)
  ENST ID: ENST00000377823
  CDS Start-End: 40-552
tggagtggcctcactcttacctgccaacctgggaggttgatgatgaacatgtctttaccttttctttggagtttgcttaccttattaatatttgctgaagtaaatggcgaagctggagaacttgagctgcagagacaaaaaagaagcatcaatctccaacagcctcgaatggctacagagagaggaaatttggtgtttcttacggggtctgctcaaaacattgagtttagaaccggatccctgggaaaaattaaattaaatgatgaagatctcagtgagtgtttacatcagatccagaaaaacaaagaagatattatagagttaaaagggagtgcaattggtctgcctcaaaatatatctagtcaaatctatcagcttaattccaagctggtggatcttgagagaaaattccaaggcttgcagcagactgttgacaaaaaggtttgcagcagcaatccttgccagaatggtggaacctgcctcaatctgcatgattcctttttttgtatctgtcccccacagtggaaggtgagtcatctactctttggttaagaatgatggcaggtcagcatctgtggtttccttggaatcatcaggcatatttaattctccatctaaagtttctaggattctgtggcctcccaaatcaaattgaaatataccaggtatgctaaaacccaaacagtggtgagtatgattgtataa

SEQ ID NO: 123146 - DNA, 11949 bp, Homo sapiens
  Payload ID: 4186
  Gene Symbol: CUBN
  Gene Name: cubilin (intrinsic factor-cobalamin receptor)
  Uniprot ID: O60494
  ENST ID: ENST00000377833
  CDS Start-End: 67-10938
ttctccaaaatcccatgctcagttggttggagtggcctcactcttacctgccaacctgggaggttgatgatgaacatgtctttaccttttctttggagtttgcttaccttattaatatttgctgaagtaaatggcgaagctggagaacttgagctgcagagacaaaaaagaagcatcaatctccaacagcctcgaatggctacagagagaggaaatttggtgtttcttacggggtctgctcaaaacattgagtttagaaccggatccctgggaaaaattaaattaaatgatgaagatctcagtgagtgtttacatcagatccagaaaaacaaagaagatattatagagttaaaagggagtgcaattggtctgcctcaaaatatatctagtcaaatctatcagcttaattccaagctggtggatcttgagagaaaattccaaggcttgcagcagactgttgacaaaaaggtttgcagcagcaatccttgccagaatggtggaacctgcctcaatctgcatgattcctttttttgtatctgtcccccacagtggaagggtcctctctgctcagctgatgttaacgaatgtgagatttactcaggaacacccttgagctgccagaatggaggcacatgtgttaatacaatgggaagttacagttgtcactgcccacctgagacgtacggaccccagtgtgcatccaaatatgacgactgtgaagggggttctgtggcacgctgtgtccatggcatctgtgaggatttaatgcgagagcaagctggagagcccaagtacagctgcgtctgtgatgctgggtggatgttttcacccaacagccctgcctgcacgctggacagagacgagtgcagcttccagcccgggccttgctccacacttgtgcagtgtttcaacactcaaggctctttctactgtggggcctgtccaacaggctggcaaggcaatggatatatttgcgaagatatcaatgaatgtgagataaataacggcggctgttctgtggctccacccgttgagtgtgtgaatacacctgggtcttcccactgccaggcctgtccaccagggtaccagggtgacggaagagtgtgcacactcacagacatctgctcagtcagtaatggaggctgccacccagatgcctcatgctcctcaactctaggttccttacctctctgcacgtgtctcccgggttatactggaaatggttatgggccaaatggatgtgtgcagctcagtaatatttgcctaagtcacccctgtctaaatggacaatgcatcgacactgtctctggttatttttgtaagtgtgactcaggttggacaggtgtcaactgtacagaaaacatcaatgagtgtttgagcaacccctgtttgaatggaggaacttgtgttgatggcgttgattctttcagttgtgaatgcacacgtctctggactggagctctctgtcaggttcctcagcaagtttgtggagagtccctctcaggaataaatggaagcttcagctacaggagcccggatgttggttatgttcatgatgttaactgcttctgggttatcaaaactgaaatgggaaaggtcctgcgtatcactttcacttttttccggttagaatccatggacaactgtccacacgagtttcttcaggtttatgatggagattcctcttctgcttttcaacttggaagattttgtggctccagcctccctcatgaactcctcagcagtgacaatgctctctattttcatctctattctgaacatttaagaaatgggagaggctttacagtaagatgggaaacacagcaaccagagtgtggaggtatcctgactggtccttacggttctattaagtctccggggtatcctggaaactatcccccaggaagagattgtgtctggattgttgtaactagtcctgacctcctggtaacatttacttttgggaccttgagcctcgagcaccatgatgactgcaacaaagattaccttgagattcgagatggtcctttgtatcaggacccccttcttgggaagttctgcaccactttctctgtcccaccgctccagactactggcccctttgccagaattcacttccattcagactcccagattagtgaccaaggcttccatatcacctacttaacatcaccttcggatctgcgttgtggtgggaactacacggacccagagggtgaactcttcttgcctgagttgtctgggcctttcactcacaccaggcaatgcgtctatatgatgaagcagccccagggagaacaaatacaaatcaacttcacccacgtggagctgcaatgccagagtgacagttctcagaattacattgaggttcgagatggtgaaaccttacttggaaaagtctgtggcaacggaaccatctctcacattaaatccattactaatagtgtctggatcaggtttaaaatagatgcttctgttgaaaaagctagtttcagagctgtttatcaagtcgcttgcggggatgaattaactggagaaggggtcattcgctcgcctttttttcctaacgtgtatcctggagaaagaacctgtaggtggaccatccaccagccccaaagccaagtcattctcctcaacttcactgtctttgaaattggaagttctgcccactgtgaaacagattatgttgagattggtagcagttccattttgggttctcctgaaaataaaaagtattgcggtacagacataccttcatttataacatctgtgtacaattttctttatgtcacattcgtgaaaagttcttctactgaaaaccatggtttcatggctaagttcagtgctgaggatttggcatgtggagaaattcttacagaatcaacagggaccattcaaagtcctggccatccaaatgtctacccccacggtatcaactgtacttggcatatattagtccaacctaatcacctgattcatttaatgttcgaaacatttcatctggagtttcattacaattgcacaaacgactacttggaagtttatgacaccgactctgagacatcccttggaagatactgtggaaagtcgatcccgccatctctcacaagcagtggtaactcattgatgctggtgtttgtgactgactccgacctcgcttatgaaggcttcttaataaactatgaagcaatcagtgcagcaacagcatgtttgcaagactacacagatgatttggggacattcacttctccaaacttccccaataattatcccaacaactgggaatgcatttatcggatcacagtgagaactggccaactgattgcagtgcacttcacaaacttctccttggaggaagccattggaaactattatacagattttctggaaatcagagatggaggctatgaaaaatcaccattgctgggaatattctatggctcaaatctacccccaacaatcatctctcatagtaacaaactatggttaaaatttaagagtgaccaaatagacacaaggtctggattctcagcttactgggatgggtcatcaacaggttgcgggggtaatctcaccacttcaagcggcacgttcatatctcccaactacccgatgccctattaccacagctctgaatgctactggtggttgaaatctagccacggcagcgcatttgaactggaattcaaagactttcacttggagcatcatccaaactgcactttagattacctggctgtatatgatggcccaagtagcaactctcatctgctaactcagctttgtggggatgagaaaccccctcttattcgttctagtggagacagcatgtttataaaactgaggacagatgaaggtcagcaaggacgtggcttcaaggctgaataccggcagacatgtgagaatgtggtaatagtcaatcaaacctatggcatcttagagagtatagggtatccgaatccttattctgaaaatcagcattgcaactggaccatccgggcaacaacaggcaacactgtgaactacacatttttagcatttgacttggaacatcacataaactgctccacagattatttagagctctatgatggaccacggcagatgggacgctactgtggagtagacctgccccctccagggagtactacaagctccaagcttcaagtgctgctccttacagatggggttggccgccgtgagaaaggatttcagatgcagtggtttgtttacggttgtggtggagagctgtctggggccacaggctccttcagcagccccgggttccccaacaggtatccaccaaacaaggagtgtatctggtacattaggacggaccccgggagtagcattcagctcaccatccatgacttcgatgtggagtatcattcaaggtgcaactttgatgtcttggagatctatggaggccccgatttccactctcccagaatagcccaactgtgtacccagagatcacctgagaaccccatgcaggtctccagcactggaaatgagctagcaattcgattcaagaccgacttgtccataaatgggagaggcttcaatgcgtcatggcaagcagtcactggaggttgtggtgggattttccaggctcccagtggagagattcattctccaaattaccccagtccttataggagcaacacagactgttcttgggtcattcgggttgacagaaatcatcgtgttctcttgaacttcactgactttgatcttgaaccacaagactcttgtattatggcatacgatggcttaagctccacaatgtcccgccttgccaggacgtgtggaagggagcagctggctaaccccatcgtctcctcaggaaacagcctcttcttgagatttcagtctggcccttccagacagaacagaggcttccgagctcaattcaggcaagcctgcggaggccacatcctcaccagctcatttgatactgtttcctctccacggttccctgccaattatccaaacaatcagaactgcagctggatcattcaagcgcaacctccattaaatcatatcaccctctcttttacccactttgaacttgaaagaagcacaacgtgtgcacgtgactttgtagaaattttggatggcggccacgaagacgcgcccctccgaggccgttactgtggcaccgacatgccccatcctatcacatccttcagcagcgccctgacgctgagattcgtctctgattctagcatcagtgctgggggtttccacaccacggtcaccgcatcagtgtcggcttgtggtggaacgttctacatggctgaaggcatcttcaacagccctggctacccagacatttatccccctaatgtggaatgtgtctggaacatcgtcagttcccctggcaaccggctccagctgtcttttatatctttccagttggaagactctcaggactgcagcagagattttgtggagatccgtgaaggaaatgccacgggtcacttggtgggacgatactgtggaaactccttccctctcaattattcttccatcgttggacataccctgtgggtcagatttatctcagatggttctggcagcggcacgggcttccaggccacatttatgaagatatttggcaatgataatattgtgggaactcatgggaaagtcgcctctcctttctggcctgaaaactacccacataactccaattaccaatggacagtaaatgtgaatgcatctcacgttgtccatggtagaatcttggagatggacatagaagaaatacaaaactgctattatgacaaattaaggatctatgatgggcctagcattcacgcccgcctaattggagcttactgtggtacccagactgaatctttcagctccactggaaattctttgacatttcatttttactccgactcttcaatctcagggaagggattccttctggagtggtttgcagtggatgcacctgatggtgttttacctaccattgctccaggtgcttgtggtggcttcctgaggacgggagatgcacccgtgtttctcttctccccgggctggcctgacagttacagtaatagagtggactgtacgtggctcatccaggctcccgactctaccgtggaactcaacattctttccctggacattgaatctcaccgaacgtgtgcctatgatagccttgtgatacgagatggagataataacttggcccagcagctagcagttctctgtggcagagagatccctgggcccatccggtctactggagagtacatgttcatccgcttcacctcggactccagtgtaaccagggcaggcttcaatgcatcctttcacaagagctgcggtggatatttgcatgcagacagagggatcatcacgtcccccaagtatccagagacttacccatccaacctcaactgttcttggcacgtcctggtccaaagtggcctgaccattgctgtccattttgaacagcctttccagattccaaatggagattcttcttgcaaccagggggattacttggtgctaagaaatggtcctgatatctgttctccacccttgggaccccctggaggaaatggtcatttttgtggcagtcatgcttcatcaactctgttcacctcggataatcaaatgtttgttcagtttatttctgatcacagtaatgaagggcaaggatttaaaatcaaatatgaggcaaagagtttagcctgtgggggcaacgtctacatccatgatgctgattctgctgggtatgtgacctcccccaaccaccctcataattatcccccgcacgctgattgcatttggatcttagcggctccaccggaaacacgcatacagctgcaatttgaagatcgattcgatattgaagtaacacccaactgtacttccaactaccttgagttgcgggatggagtggattcggatgcaccaatactttccaaattttgtgggacatctttgcccagcagtcagtggtcctcaggagaggttatgtatttgagatttcgatctgacaacagccccacacatgtgggattcaaggccaagtattctatagctcagtgtgggggaagagtaccagggcaaagtggtgttgttgaaagcattggacatccaacacttccatacagagacaacttattctgtgagtggcatctccaggggctctctggacactatctcaccatctcttttgaagactttaaccttcagaattcttctggctgtgaaaaagacttcgtggagatctgggacaatcatacctctggaaacatcttgggcagatactgtggaaacaccattcctgacagcatagacacttctagcaatactgctgtggtcaggtttgtcacagacggctctgtgactgcctcaggattcagactgcgatttgaatccagtatggaagagtgtggtggggatcttcagggctctattggaacatttacttctcccaactacccgaacccaaatcctcatggccggatctgcgagtggagaatcactgccccggagggaaggcggatcaccctaatgtttaacaacctgaggctggccacgcatccgtcctgcaacaatgagcatgtgatagtattcaatggcattagaagtaactcaccccagctagagaaactgtgtagtagtgtgaatgtaagcaatgagattaaatcttcaggaaacacaatgaaagtcatttttttcacggatggatccaggccatatggcggcttcactgcttcctatacctccagtgaagatgcagtgtgtggtgggtctcttccaaatactcctgaaggaaactttacttctcctggctatgacggagtcaggaattactcaagaaacctgaactgcgaatggactctcagcaatccaaatcagggaaattcatccatttccattcactttgaagatttttacctagaaagtcaccaagactgtcaatttgatgtcctcgagtttcgagtgggtgatgctgatgggcccctgatgtggagactttgtggtccttcaaagcctacattgccattggttataccttattctcaggtatggattcactttgtcaccaacgaacgtgtagaacacattggattccatgcaaagtattcctttacagattgtggcggaatacagataggtgacagtggagtgatcacaagccccaactatccaaatgcttatgacagcctgacccactgctcttcgctgttggaggccccacaagggcacaccatcactctcacatttagtgactttgatattgaaccccatacaacttgtgcttgggactctgtcactgtcaggaatggtgggtcccctgaatcacccatcataggacaatactgtggaaattcaaaccccaggacaatacagtcaggttccaatcagctggtcgtgacttttaactcagaccattcattgcaaggtggtggattttatgctacgtggaacacacaaactttaggttgtggtggaatatttcattctgataatggtacaatcagatcccctcactggcctcagaattttcccgaaaacagcagatgttcctggacggccattactcacaaaagtaaacacttggagatcagctttgacaacaacttcctaatccccagcggtgatggacaatgtcagaatagcttcgtgaaggtgtgggcaggaactgaggaggtggacaaagccctgctagccactggctgtgggaacgtggctccgggtcccgttatcacaccaagtaacacattcactgccgtcttccagtctcaggaggcaccagctcagggcttctccgcgtcctttgttagccgatgtggaagtaatttcactggcccttcaggttacatcatttctccaaattacccaaaacaatatgacaacaacatgaattgcacctatgtcatagaggctaatcctctgtcagtggtcctcttgacttttgtgtccttccacttagaagctcgttccgctgtgacgggaagctgtgtcaacgatggcgtgcacattatcagaggttacagcgtcatgtccaccccatttgctactgtgtgtggggatgagatgccagctcccctcaccatcgctgggccggttctgcttaacttctactccaacgagcaaatcacagacttcggattcaagttttcctataggataatctcctgtggtggtgtgttcaatttctcttctggaatcatcacaagtcctgcctattcatacgcagactacccaaatgatatgcactgtctgtataccatcaccgttagtgacgacaaggtgatcgagctcaagttcagtgattttgatgtggttccctccacctcctgctcccatgactacctggcaatttacgatggtgccaataccagcgatccccttcttggcaaattctgcggttccaagcgcccaccaaatgtgaagagcagcaataatagtatgctcctggtgttcaagacagattcatttcagacagcaaaaggctggaagatgtctttccggcagacattggggcctcagcaaggatgtggtggttatctgacaggctcgaataatacctttgcctctcctgattctgattcgaatggaatgtatgacaagaatttaaactgtgtatggatcataattgcacctgtaaacaaagtaattcacctcaccttcaatacatttgctctggaggcagcaagtactaggcaaagatgcctttatgattatgtaaagttatatgatggggatagtgaaaatgcgaacttggctggaacgttttgtggttccacagtacctgctccttttatctcttctggtaacttccttacggttcaattcatcagtgacttaacattagagagggaaggatttaatgctacatacaccatcatggacatgccttgtggtggaacatacaatgcaacttggaccccacaaaatatttcatcacccaattcatcagacccagatgtcccattttccatctgtacttgggtcattgattcccctccgcatcagcaggtcaagataactgtgtgggcattacagctgacctcgcaagactgcacgcagaattacttacagcttcaggactcaccgcagggtcacggaaattcaagatttcagttctgtggcagaaatgcttcggctgtgccagtgttttattcttctatgagtactgcaatggtcattttcaaatctggagttgtaaacagaaactctagaatgagtttcacctatcagattgcagattgcaacagagactatcacaaggcatttggcaacctgagaagccctggatggccagataactacgacaatgacaaggattgcaccgttactctcacagccccccagaaccacaccatttccctcttttttcattcacttggcatcgagaactcagttgaatgcagaaacgatttcttggaggtgagaaatggaagtaacagcaattcaccattactgggcaagtactgtggaactctgctgccaaaccctgtcttctctcaaaataatgaactatacctacgatttaagagtgatagtgtaacttctgatcgtggatatgaaatcatctggacttcatcaccctctggatgtggtggaactctttatggagacagaggctcattcaccagccccggctatccaggcacatacccaaacaacacgtactgcgagtgggtccttgttgctcctgctggaaggcttgtcaccatcaacttctacttcatcagcattgacgatccaggagactgtgtccagaactatctcacactctatgatgggcccaacgccagctctccatcctctggaccatactgcggaggcgacaccagcatagctcccttcgtggcttcctcaaatcaggtcttcataaaatttcatgctgattatgcacggcgtccatccgcattccgattaacttgggacagctaagtgggtaacaactcgtgttcactcagcactttccctctgcagcacgctggacagcactctgccatcctgatacatgacccctgctgatgccacagagaataagctgaacttgtatggtttttcaccaaaccatggatagaatcaatatttgtaggccaggcgtggtggctcacccccctgtattctcagcactttgggaggccgaggcaggttgatcacctgaggtcaggagtttgagactagcctggccagcatggtgaaacctcatctctctaacaatataataattagccaggcgtggtggtgggtgcctgtaattccagccactcgagaggctgaggcaggagaattgcttgaacccaggaggcagaggttgcagtgagctaagatcacaccactacactccagcctgggcgagacggcaagactccatctcaaaaaaaaaagaaacaaaaaaaaccagaatcaatatttgtacattttctcgaacatagaatatagcttctttagtcttgagtgtgcatttcattctaatattttgagctgaaatttaaaaaaactttgaaagagttggaaatgattatggcatatgtgacatacatttttaaaagttaataataatagccaggggcagtggctcatacccataatcccagcacgctgggaggccatgatgggaggattgcttgaacctaggagtttgagaccagcctgggcaacaaagtgagacctgatttttacaaaaaatcaaaaaattagccaggcatggtggcatgcacccgtggttccagctacacaggaggttgaagcaggaggatcacttgagcccagtaggttaaggctgcagtgaaaccctgtgaattaaccactgtactccagcctgggtgacagactgagaccctatctcaaaaatgacaacaagaacaacaaaagttaatgataatatagaagcataaatttcctgtgaatgttcaattacacataataaacattattgaattgtacacaatt

SEQ ID NO: 123147 - DNA, 599 bp, Homo sapiens
  Payload ID: 4186
  Gene Symbol: CUBN
  Gene Name: cubilin (intrinsic factor-cobalamin receptor)
  ENST ID: ENST00000438254
  CDS Start-End: 1-267
agcactggaaatgagctagcaattcgattcaagaccgacttgtccataaatgggagaggcttcaatgcgtcatggcaagcagtcactggaggttgtggtgggattttccaggctcccagtggagagattcattctccaaattaccccagtccttataggagcaacacagactgttcttgggtcattcgggttgacagaaatcatcgtgttctcttgaacttcactgactttgatcttgaaccacaagactcttgtattatggtttaatcatacttggtcggacgtcagacagatggggtttgtatattggctctgcactgctaagcgtgtgattgggcaagtcatgtatgttttcagagctcagttttccctgctgcaaagtggaactgtaagaatcaaatgtaaacaaatgtatttaagtacctatcagtgtctggttcagataagtatttgctgctattcctaatttttctattacaatgactcctgcttctattactattaacgctatgttaaagatcttaaggaatcttttaaaaaaattttctccctgagcaagatgaaacttagtaaacaagataaaaaatccagtagaaaaa

SEQ ID NO: 123148 - DNA, 958 bp, Homo sapiens
  Payload ID: 4186
  Gene Symbol: CUBN
  Gene Name: cubilin (intrinsic factor-cobalamin receptor)
  ENST ID: ENST00000433666
  CDS Start-End: 1-318
aattccaagctggtggatcttgagagaaaattccaaggcttgcagcagactgttgacaaaaaggtttgcagcagcaatccttgccagaatggtggaacctgcctcaatctgcatgattcctttttttgtatctgtcccccacagtggaagggtcctctctgctcagctgatgttaacgaatgtgagatttactcaggaacacccttgagctgccagaatggaggcacatgtgttaatacaatgggaagttacagaaatccttgctctaacatccccaaggaaccggaagaaggctcccgtgattggcacagagagtaagcatggcctggtgcaaaaggagctgaagacttaggaagagccggagcattgaaggggagccactgaatggccttaagtagaaaaggggacaccccaccacaccagtgtccccagctgtactctttccatgtattagcaagctcatagttttgggtaaagagagctttattcaatgctatgtcaaaatgtgaccataacgaggtcaaagattaaactgaggttcaatgaatgaagtaactctctctgaccacagtcatcattatcagtacagctctatcttctcttctgacttattctgtcaagtgacttgtccacagaattctcctgctcagctcaggcatcactttctgcaggaaactttcccttccctttttaagcagagtgaggcatctcagggcctctatgttcccatcatgctctagggatatccatcgtcaaagctttgctgatgccacacacattgtctttctaaaaacgaagtccaaaaaattaaggcagatcaatgccaaacttacttttgtacagttctttgaagtcaccttttaaactagacagtgtctttccttatagtttggctggtctcttttattttgtgatttttaaaagattaataaataaattctgctatagaatgaacaaa

SEQ ID NO: 123149 - DNA, 2193 bp, Homo sapiens
  Payload ID: 4187
  Gene Symbol: CUEDC1
  Gene Name: CUE domain containing 1
  Uniprot ID: Q9NWM3
  ENST ID: ENST00000360238
  CDS Start-End: 720-1880
aagtgtggccacttcctcttgcctggcctgactcaccctggctgctgcccattgtggctgccatggaaatacaactcgaggagaacccagaccaggacagggaggccatgttctgggtggcagtggagcctggcaaggtgccctcctggcctgggactgctgtggcagaggaagcatgaggtggggcctggcctgcccagctcagagctgaggtgcccccttggttttttacctccctgttccctggctggcccactgcacccacgcactcaacgcagtggcttcgctcctcctccaggatggctggaggtgggaccattgccaggatggcctcaagtgcccagccctcctggaagactcagtttccctctttgtcccatgcagaggtgcagagattcattattgtgggaccatccgtgaaaccggtgccaggatgcaccgggggtgtggatgaccggccgcccagccccagcacggcccggtcccgcatgccaccgccccgcgaggaccgctctccaagggctgcctggggccccgcgcccgtactctcctaacccggagctcttggcagcccattgctgcctggctacccggggaggaggaggcgcaggagtgagctgcccgagaccgcagggcaagtaagcggctgacggcggaaagaccctggggaaggggctttgcggccggctagaaacattttccccaagcggctccgcaaaatgaccagcctgttccgccggagcagcagcggcagcggcgggggtggcaccgccggggcacgcgggggcgggggaggcacggccgccccccaggagctcaacaacagccggcctgcccgccaggtgcgccgcctggagttcaaccaggccatggacgacttcaagaccatgttccccaacatggattacgacatcatcgaatgcgtgctgcgcgccaacagcggcgctgtggacgccaccatcgaccagctgctgcagatgaacctggagggcggtggcagcagcggcggcgtctatgaggacagctccgactcggaggacagcatccccccggagatcttggaaaggactttggaacctgatagctcggatgaagagcccccacctgtgtactccccgccagcctaccacatgcacgtgttcgaccggccctaccctctggctcccccgactccgcctccccgtatcgacgcgctgggctctggagcccctacaagccagagacgctatcggaactggaacccaccactgctgggcaaccttccggatgactttctccgcatcctgccccagcagctggacagcatacagggtaacgctgggggccccaagcctgggagtggagagggatgtccacctgccatggctgggccagggcccggagaccaggagagccgctggaagcagtacctggaggacgagaggatcgcgcttttcctgcagaacgaggagttcatgaaggagctgcaacggaaccgcgacttcctcctcgctctggagagagatcgattgaaatacgaatcccagaaatctaaatccagcagcgtggctgtcggaaacgactttggcttttcctctcctgtcccaggaactggcgacgccaaccccgctgtgtctgaagatgccttattcagggacaagctgaaacacatgggaaagtccacccggaggaaactgtttgaacttgcccgagccttctcagagaagaccaaaatgaggaagtcaaagaggaaacacttgttgaagcatcagtcgctgggggctgccgcgtcaacagccaacctcctggatgatgtggagggccacgcgtgtgatgaagacttccggggcaggcgtcaggaggcacccaaggtggaggaaggcctgcgagaaggacagtaagagatgccagcagctcttccttgccagagatgatctgacccggtgggggcagctggaaagcaacactggcccccagctgaagggcccagctgcagccagacagatggtgcttgagaaccgaggcccggtgatcctccagccacagtccagcccaaccactgccactttccatgggacttagaacttcggagttgctgccttgcaattggaggaaggacctggggcccctataggcagcagccaattacagccccttttgtagccaggcgttcctatggtcaaagagtggaaatgcaggaaccaacctcccttt

SEQ ID NO: 123150 - DNA, 2190 bp, Homo sapiens
  Payload ID: 4187
  Gene Symbol: CUEDC1
  Gene Name: CUE domain containing 1
  Uniprot ID: Q9NWM3
  ENST ID: ENST00000407144
  CDS Start-End: 437-1597
gctgccagggcctgagctctgggacaccacctagtggcctggcttggcagcgccactgggctgtgccagatcttaggcaagaagcaaatccctctgcaggcaggcatcacggcagtcacagatggacgtagggtctgctccttggtgattttcagaggagggagcctggggtgcacagagacagagctgcacggcccggtcccgcatgccaccgccccgcgaggaccgctctccaagggctgcctggggccccgcgcccgtactctcctaacccggagctcttggcagcccattgctgcctggctacccggggaggaggaggcgcaggagtgagctgcccgagaccgcagggcaagtaagcggctgacggcggaaagaccctggggaaggggctttgcggccggctagaaacattttccccaagcggctccgcaaaatgaccagcctgttccgccggagcagcagcggcagcggcgggggtggcaccgccggggcacgcgggggcgggggaggcacggccgccccccaggagctcaacaacagccggcctgcccgccaggtgcgccgcctggagttcaaccaggccatggacgacttcaagaccatgttccccaacatggattacgacatcatcgaatgcgtgctgcgcgccaacagcggcgctgtggacgccaccatcgaccagctgctgcagatgaacctggagggcggtggcagcagcggcggcgtctatgaggacagctccgactcggaggacagcatccccccggagatcttggaaaggactttggaacctgatagctcggatgaagagcccccacctgtgtactccccgccagcctaccacatgcacgtgttcgaccggccctaccctctggctcccccgactccgcctccccgtatcgacgcgctgggctctggagcccctacaagccagagacgctatcggaactggaacccaccactgctgggcaaccttccggatgactttctccgcatcctgccccagcagctggacagcatacagggtaacgctgggggccccaagcctgggagtggagagggatgtccacctgccatggctgggccagggcccggagaccaggagagccgctggaagcagtacctggaggacgagaggatcgcgcttttcctgcagaacgaggagttcatgaaggagctgcaacggaaccgcgacttcctcctcgctctggagagagatcgattgaaatacgaatcccagaaatctaaatccagcagcgtggctgtcggaaacgactttggcttttcctctcctgtcccaggaactggcgacgccaaccccgctgtgtctgaagatgccttattcagggacaagctgaaacacatgggaaagtccacccggaggaaactgtttgaacttgcccgagccttctcagagaagaccaaaatgaggaagtcaaagaggaaacacttgttgaagcatcagtcgctgggggctgccgcgtcaacagccaacctcctggatgatgtggagggccacgcgtgtgatgaagacttccggggcaggcgtcaggaggcacccaaggtggaggaaggcctgcgagaaggacagtaagagatgccagcagctcttccttgccagagatgatctgacccggtgggggcagctggaaagcaacactggcccccagctgaagggcccagctgcagccagacagatggtgcttgagaaccgaggcccggtgatcctccagccacagtccagcccaaccactgccactttccatgggacttagaacttcggagttgctgccttgcaattggaggaaggacctggggcccctataggcagcagccaattacagccccttttgtagccaggcgttcctatggtcaaagagtggaaatgcaggaaccaacctccctttaaaaaaaaaaaaatccagaaagcagataaaagttggaatatggaaaagggcaagatgacccccaccagaggctctttggcctgaaggtggagtctctgcctccgtccgttctctatctctcctgtcacagactctgcctgaccccctttcctcagctcccttctggtcccccttcctcagctccctccgggcacttgtgcccttcccttccatgtcctcctgtatctcagccttcccccggggctgctggcccagcacacgagccctgcacccagcctgg

SEQ ID NO: 123151 - DNA, 486 bp, Homo sapiens
  Payload ID: 4187
  Gene Symbol: CUEDC1
  Gene Name: CUE domain containing 1
  ENST ID: ENST00000581898
  CDS Start-End: 1-160
ggagagagatcgattgaaatacgaatcccagaaatctaaatccagcagcgtggctgtcggaaacgactttggcttttcctctcctgtcccagatgaagacttccggggcaggcgtcaggaggcacccaaggtggaggaaggcctgcgagaaggacagtaagagatgccagcagctcttccttgccagagatgatctgacccggtgggggcagctggaaagcaacactggcccccagctgaagggcccagctgcagccagacagatggtgcttgagaaccgaggcccggtgatcctccagccacagtccagcccaaccactgccactttccatgggacttagaacttcggagttgctgccttgcaattggaggaaggacctggggcccctataggcagcagccaattacagccccttttgtagccaggcgttcctatggtcaaagagtggaaatgcaggaaccaacctccctttaaaaaaaaaaaaa

SEQ ID NO: 123152 - DNA, 512 bp, Homo sapiens
  Payload ID: 4187
  Gene Symbol: CUEDC1
  Gene Name: CUE domain containing 1
  ENST ID: ENST00000585294
  CDS Start-End: 1-127
gctgggggctgccgcgtcaacagccaacctcctggatgatgtggagggccacgcgtgtgatgaagacttccggggcaggcgtcaggaggcacccaaggtggaggaaggcctgcgagaaggacagtaagaggaaccagtgaccaggaaagaccattgggctcctttgaaaaagattcctcccatcccttttttcccctaccagatgccagcagctcttccttgccagagatgatctgacccggtgggggcagctggaaagcaacactggcccccagctgaagggcccagctgcagccagacagatggtgcttgagaaccgaggcccggtgatcctccagccacagtccagcccaaccactgccactttccatgggacttagaacttcggagttgctgccttgcaattggaggaaggacctggggcccctataggcagcagccaattacagccccttttgtagccaggcgttcctatggtcaaagagtggaaatgcaggaaccaacctcccttt

SEQ ID NO: 123153 - DNA, 3621 bp, Homo sapiens
  Payload ID: 4187
  Gene Symbol: CUEDC1
  Gene Name: CUE domain containing 1
  Uniprot ID: Q9NWM3
  ENST ID: ENST00000577830
  CDS Start-End: 415-1575
ggccccgccgccaccgctgcggattgcagcccctcccccgcccggcccgcggcccggcccctgcggcccgcgcggagcggacgcgcgtggcgctgcccggtgggaccatccgtgaaaccggtgccaggatgcaccgggggtgtggatgaccggccgcccagccccagcacggcccggtcccgcatgccaccgccccgcgaggaccgctctccaagggctgcctggggccccgcgcccgtactctcctaacccggagctcttggcagcccattgctgcctggctacccggggaggaggaggcgcaggagtgagctgcccgagaccgcagggcaagtaagcggctgacggcggaaagaccctggggaaggggctttgcggccggctagaaacattttccccaagcggctccgcaaaatgaccagcctgttccgccggagcagcagcggcagcggcgggggtggcaccgccggggcacgcgggggcgggggaggcacggccgccccccaggagctcaacaacagccggcctgcccgccaggtgcgccgcctggagttcaaccaggccatggacgacttcaagaccatgttccccaacatggattacgacatcatcgaatgcgtgctgcgcgccaacagcggcgctgtggacgccaccatcgaccagctgctgcagatgaacctggagggcggtggcagcagcggcggcgtctatgaggacagctccgactcggaggacagcatccccccggagatcttggaaaggactttggaacctgatagctcggatgaagagcccccacctgtgtactccccgccagcctaccacatgcacgtgttcgaccggccctaccctctggctcccccgactccgcctccccgtatcgacgcgctgggctctggagcccctacaagccagagacgctatcggaactggaacccaccactgctgggcaaccttccggatgactttctccgcatcctgccccagcagctggacagcatacagggtaacgctgggggccccaagcctgggagtggagagggatgtccacctgccatggctgggccagggcccggagaccaggagagccgctggaagcagtacctggaggacgagaggatcgcgcttttcctgcagaacgaggagttcatgaaggagctgcaacggaaccgcgacttcctcctcgctctggagagagatcgattgaaatacgaatcccagaaatctaaatccagcagcgtggctgtcggaaacgactttggcttttcctctcctgtcccaggaactggcgacgccaaccccgctgtgtctgaagatgccttattcagggacaagctgaaacacatgggaaagtccacccggaggaaactgtttgaacttgcccgagccttctcagagaagaccaaaatgaggaagtcaaagaggaaacacttgttgaagcatcagtcgctgggggctgccgcgtcaacagccaacctcctggatgatgtggagggccacgcgtgtgatgaagacttccggggcaggcgtcaggaggcacccaaggtggaggaaggcctgcgagaaggacagtaagagatgccagcagctcttccttgccagagatgatctgacccggtgggggcagctggaaagcaacactggcccccagctgaagggcccagctgcagccagacagatggtgcttgagaaccgaggcccggtgatcctccagccacagtccagcccaaccactgccactttccatgggacttagaacttcggagttgctgccttgcaattggaggaaggacctggggcccctataggcagcagccaattacagccccttttgtagccaggcgttcctatggtcaaagagtggaaatgcaggaaccaacctccctttaaaaaaaaaaaaatccagaaagcagataaaagttggaatatggaaaagggcaagatgacccccaccagaggctctttggcctgaaggtggagtctctgcctccgtccgttctctatctctcctgtcacagactctgcctgaccccctttcctcagctcccttctggtcccccttcctcagctccctccgggcacttgtgcccttcccttccatgtcctcctgtatctcagccttcccccggggctgctggcccagcacacgagccctgcacccagcctgggtgggaggtccctggccagtcccccaggaactctgaggagctatgggctactgcaaagcatctgccgactgccctgccccgtctggcctcatcaggctgctgctgttagggatgggctcactcccagcagctcccggtcacccagcagggatggggagggtggccaccctggagctggaggactctggggaggcagggtctttaatttggcagcagacaaaagccagttctggagtcacaccacagtaggggctcacaggggctctgactccccagctggactggaagccctgctgtccgagggtgggcagcggtgggtcctggagtgacccctttgagcaggtgcagggctaaagagcaaggcggaaaggccgccagcctgggtgagcgcctagggcataagggcttgctgggtgcccctgagaagggcgggtgatctgaggaggagaactctgattctaggaacgcttacacggcactgaccactgccacggggagggaggctgcccagcccgtggccccgccctggacatgggagcgcgcagaccttccggagagccgggaagcctgggcaggcacgaggcttcggcgcggctctgggaggttgggagtggcatccgatccttggccgggccctggtggcctccgtggccccaagatcacaagggcgtagcgaaggcgagccggcgatcgcacctcgtcccgcccaccctgcccggactcgcaacgccgagcttggggagggccgggacgcgcagccgccgccgagcgtgaccaagtttggaaacgcgcgcggggccgggacgctggctcggggggccctgccgaggagcggtcgccccctccgctgctccccgcgccaggcctggggccctggagggaggggggggggtctccgaggagtgcctcggtaccccagctcgagttctcgacgggtctctgagccttccccgcgccaggacccggcgcactgtgggggaagccccagccccatgtctgttgagtgttgctttgttattttttttcctcctatgtgtgggttttttcttggagctgtttcataggaattcctgtaataaacagttggtgttctcttggtgctctgatgtggccagcggcgtgggctggaccctcctgctccctcctccctcccggcctggggcagggtttgtccccaggagccccgcgtcgcatccctagggtacccctgccttgcctggcccattcacccgcggcgctctccgactgcactctcgaggtgacacctgcggcaccgctgcacctcaaccttgcggacctgccggctgcgtctagcgctgtcgccttcctgtttggcccaggactgtaaaccgcttgctgtatcaggcaagggaaacaccatggggaaagccagtctgttgagaaagctccagacggccacctccctaaataaacagcttctggattaaaggca

SEQ ID NO: 123154 - DNA, 705 bp, Homo sapiens
  Payload ID: 4187
  Gene Symbol: CUEDC1
  Gene Name: CUE domain containing 1
  ENST ID: ENST00000577589
  CDS Start-End: 220-705
gtggatgaccggccgcccagccccagcacggcccggtcccgcatgccaccgccccgcgaggaccgctctccaagggctgcctggggccccgcgcccgtactctcctaacccggagctcttggcagcccattgctgcctggctacccggggaggaggaggcgcaggagtgagctgcccgagaccgcagggcaagtgcgccgcctggagttcaaccaggccatggacgacttcaagaccatgttccccaacatggattacgacatcatcgaatgcgtgctgcgcgccaacagcggcgctgtggacgccaccatcgaccagctgctgcagatgaacctggagggcggtggcagcagcggcggcgtctatgaggacagctccgactcggaggacagcatccccccggagatcttggaaaggactttggaacctgatagctcggatgaagagcccccacctgtgtactccccgccagcctaccacatgcacgtgttcgaccggccctaccctctggctcccccgactccgcctccccgtatcgacgcgctgggctctggagcccctacaagccagagacgctatcggaactggaacccaccactgctgggcaaccttccggatgactttctccgcatcctgccccagcagctggacagcatacagggtaacgctgggggccccaagcctgggagtggagagggatgtcca

SEQ ID NO: 123155 - DNA, 875 bp, Homo sapiens
  Payload ID: 4187
  Gene Symbol: CUEDC1
  Gene Name: CUE domain containing 1
  ENST ID: ENST00000577840
  CDS Start-End: 109-858
cccgcgcggagcggacgcgcgtggcgctgcccgatcttggaaaggactttggaacctgatagctcggatgaagagcccccacctgtgtactccccgccagcctaccacatgcacgtgttcgaccggccctaccctctggctcccccgactccgcctccccgtatcgacgcgctgggctctggagcccctacaagccagagacgctatcggaactggaacccaccactgctgggcaaccttccggatgactttctccgcatcctgccccagcagctggacagcatacagggtaacgctgggggccccaagcctgggagtggagagggatgtccacctgccatggctgggccagggcccggagaccaggagagccgctggaagcagtacctggaggacgagaggatcgcgcttttcctgcagaacgaggagttcatgaaggagctgcaacggaaccgcgacttcctcctcgctctggagagagatcgattgaaatacgaatcccagaaatctaaatccagcagcgtggctgtcggaaacgactttggcttttcctctcctgtcccaggaactggcgacgccaaccccgctgtgtctgaagatgccttattcagggacaagctgaaacacatgggaaagtccacccggaggaaactgtttgaacttgcccgagccttctcagagaagaccaaaatgaggaagtcaaagaggaaacacttgttgaagcatcagtcgctgggggctgccgcgtcaacagccaacctcctggatgatgtggagggccacgcgtgtgatgaagacttccggggcaggcgtcaggaggcacccaaggtggaggaaggcctgcgagaaggacagtaagagatgccagcagctct

SEQ ID NO: 123156 - DNA, 1191 bp, Homo sapiens
  Payload ID: 4188
  Gene Symbol: CUEDC2
  Gene Name: CUE domain containing 2
  Uniprot ID: Q9H467
  ENST ID: ENST00000369937
  CDS Start-End: 147-1010
gcccttctcaaacatggccgccacggcgcctctggaagggaaccgctctgggccccgcctttgatctcgttggtggggctgggggatgagagctgcaccgcgcgggacaagtcgccggcggcgcccgacggagcagaagagagagcatggagctggagaggatcgtcagtgcagccctccttgcctttgtccagacacacctcccggaggccgacctcagtggcttggatgaggtcatcttctcctatgtgcttggggtcctggaggacctgggcccctcgggcccatcagaggagaacttcgatatggaggctttcactgagatgatggaggcctatgtgcctggcttcgcccacatccccaggggcacaataggggacatgatgcagaagctctcagggcagctgagcgatgccaggaacaaagagaacctgcaaccgcagagctctggtgtccaaggtcaggtgcccatctccccagagcccctgcagcggcccgaaatgctcaaagaagagactaggtcttcggctgctgctgctgcagacacccaagatgaggcaactggcgctgaggaggagcttctgccaggggtggatgtactcctggaggtgttccctacctgttcggtggagcaggcccagtgggtgctggccaaagctcggggggacttggaagaagctgtgcagatgctggtagagggaaaggaagaggggcctgcagcctgggagggccccaaccaggacctgcccagacgcctcagaggcccccaaaaggatgagctgaagtccttcatcctgcagaagtacatgatggtggatagcgcagaggatcagaagattcaccggcccatggctcccaaggaggcccccaagaagctgatccgatacatcgacaaccaggtagtgagcaccaaaggggagcgattcaaagatgtgcggaaccctgaggccgaggagatgaaggccacatacatcaacctcaagccagccagaaagtaccgcttccattgaggcactcgccggactctgcccgagccttctaggctcagatcccagagggatgcaggagccctatacccctacacaggggccccctaactcctgtcccccttctctactcctttgctccatagtgttaacctactctcggagctgcctccatgggcacagtaaaggtggcccaaggaaggtg

SEQ ID NO: 123157 - DNA, 2112 bp, Homo sapiens
  Payload ID: 4189
  Gene Symbol: CELF1
  Gene Name: CUGBP, Elav-like family member 1
  Uniprot ID: Q92879
  ENST ID: ENST00000310513
  CDS Start-End: 137-1585
ggcagcggcagcggcggcgggacgcggaggctcccccgggattcggcctcagcagcgaggcggcggcggcggctgcggaggcgcaggcagcaactgaggcagcggcaggctcaggtgcagccgctgctcaaagaaaatgaacggcaccctggaccacccagaccaaccagatcttgatgctatcaagatgtttgtgggccaggttccaaggacctggtctgaaaaggacttgcgggaactcttcgaacagtatggtgctgtgtatgaaatcaacgtcctaagggataggagccaaaacccgcctcagagcaaagggtgctgttttgttacattttacacccgtaaagctgcattagaagctcagaatgctcttcacaacatgaaagtcctcccagggatgcatcaccctatacagatgaaacctgctgacagtgagaagaacaatgcagtggaagacaggaagctgtttattggtatgatttccaagaagtgcactgaaaatgacatccgagtcatgttctcttcgtttggacagattgaagaatgccggatattgcggggacctgatggcctgagccgaggttgtgcatttgtgacttttacaacaagagccatggcacagacggctatcaaggcaatgcaccaagcacagaccatggagggttgctcatcacccatggtggtaaaatttgctgatacacagaaggacaaagaacagaagagaatggcccagcagctccagcagcagatgcagcaaatcagcgcagcatctgtgtggggaaaccttgctggtctaaatactcttggaccccagtatttagcactccttcagcagactgcctcctctgggaacctcaacaccctgagcagcctccacccaatgggagggttgaatgcaatgcagttacagaatttggctgcactagctgctgcagctagtgcagctcagaacacaccaagtggtaccaatgctctcactacatccagcagtcccctcagcgtgctcactagttcagggtcctcacctagctctagcagcagtaattctgtcaaccccatagcctcacttggagccctgcagacattagctggagcaacggctggcctcaatgttggctctttggcaggaatggctgctttaaatggtggcctgggcagcagtggcctttccaatggcaccgggagcaccatggaggccctcactcaggcctactcgggtatccagcaatatgctgctgctgcgctccccactctgtacaaccagaatcttctgacacagcagagtattggtgctgctggaagccagaaggaaggtccagagggagccaacctgttcatctaccacctgccccaggagtttggtgatcaggacctgctgcagatgtttatgccctttgggaatgtcgtgtctgccaaggttttcatagacaagcagacaaacctgagcaagtgttttggttttgtaagttacgacaatcctgtttcggcccaagctgccatccagtccatgaacggctttcagattggcatgaagcggcttaaagtgcagctcaaacgttcgaagaatgacagcaagccctactgagcgtgctcccctctgagactggagtgagagggtcttctgattcctgccgtttgttcatcgttgtgcctaaagcatgtcgatgtggcgtcaagtacatcgtccaaatccctgtctcttcagcttctctgatgcttgaactctcacctttgaccttgtgttgacctttgatgctgatgtgtatttttattatgtttgtttctttcttcgtttttttttctttttttctttcctttttttttccttttgtgctgccaaattggttttgctagaacgactgctgaaggggaaatatttaaacttgcatttgaatataaaaaaaatctatttttctagaacttcataagataaccacttgattttgtgattccaattctttgtaattgtcttcagagcagccctactagcacataccgcgtggtgtttgtatttctgtgaacacacagccagtccgtttctaggctttgtttctctgtgtgcttagttttaaagacaactttgaagtaaacaatgaaataaaagatgtcact

SEQ ID NO: 123158 - DNA, 2108 bp, Homo sapiens
  Payload ID: 4189
  Gene Symbol: CELF1
  Gene Name: CUGBP, Elav-like family member 1
  Uniprot ID: Q92879
  ENST ID: ENST00000358597
  CDS Start-End: 1-1461
atgaacggcaccctggaccacccagaccaaccagatcttgatgctatcaagatgtttgtgggccaggttccaaggacctggtctgaaaaggacttgcgggaactcttcgaacagtatggtgctgtgtatgaaatcaacgtcctaagggataggagccaaaacccgcctcagagcaaagggtgctgttttgttacattttacacccgtaaagctgcattagaagctcagaatgctcttcacaacatgaaagtcctcccagggatgcatcaccctatacagatgaaacctgctgacagtgagaagaacaatgcagtggaagacaggaagctgtttattggtatgatttccaagaagtgcactgaaaatgacatccgagtcatgttctcttcgtttggacagattgaagaatgccggatattgcggggacctgatggcctgagccgaggttgtgcatttgtgacttttacaacaagagccatggcacagacggctatcaaggcaatgcaccaagcacagaccatggagggttgctcatcacccatggtggtaaaatttgctgatacacagaaggacaaagaacagaagagaatggcccagcagctccagcagcagatgcagcaaatcagcgcagcatctgtgtggggaaaccttgctggtctaaatactcttggaccccagtatttagcactttatttgcagctccttcagcagactgcctcctctgggaacctcaacaccctgagcagcctccacccaatgggagggttgaatgcaatgcagttacagaatttggctgcactagctgctgcagctagtgcagctcagaacacaccaagtggtaccaatgctctcactacatccagcagtcccctcagcgtgctcactagttcagggtcctcacctagctctagcagcagtaattctgtcaaccccatagcctcacttggagccctgcagacattagctggagcaacggctggcctcaatgttggctctttggcaggaatggctgctttaaatggtggcctgggcagcagtggcctttccaatggcaccgggagcaccatggaggccctcactcaggcctactcgggtatccagcaatatgctgctgctgcgctccccactctgtacaaccagaatcttctgacacagcagagtattggtgctgctggaagccagaaggaaggtccagagggagccaacctgttcatctaccacctgccccaggagtttggtgatcaggacctgctgcagatgtttatgccctttgggaatgtcgtgtctgccaaggttttcatagacaagcagacaaacctgagcaagtgttttggttttgtaagttacgacaatcctgtttcggcccaagctgccatccagtccatgaacggctttcagattggcatgaagcggcttaaagtgcagctcaaacgttcgaagaatgacagcaagccctactgagcgtgctcccctctgagactggagtgagagggtcttctgattcctgccgtttgttcatcgttgtgcctaaagcatgtcgatgtggcgtcaagtacatcgtccaaatccctgtctcttcagcttctctgatgcttgaactctcacctttgaccttgtgttgacctttgatgctgatgtgtatttttattatgtttgtttctttcttcgtttttttttctttttttctttcctttttttttccttttgtgctgccaaattggttttgctagaacgactgctgaaggggaaatatttaaacttgcatttgaatataaaaaaaatctatttttctagaacttcataagataaccacttgattttgtgattccaattctttgtaattgtcttcagagcagccctactagcacataccgcgtggtgtttgtatttctgtgaacacacagccagtccgtttctaggctttgtttctctgtgtgcttagttttaaagacaactttgaagtaaacaatgaaataaaagatgtcactaaaacctctgaggctcctgagcacattttgctgatacagtctgtggggcttgaggagaccgcatgtattgttctttcttttgtttttcttctgagttctcaactgcggagagcacctgaa

SEQ ID NO: 123159 - DNA, 1580 bp, Homo sapiens
  Payload ID: 4189
  Gene Symbol: CELF1
  Gene Name: CUGBP, Elav-like family member 1
  Uniprot ID: Q92879
  ENST ID: ENST00000361904
  CDS Start-End: 12-1463
gctcaaagaaaatgaacggcaccctggaccacccagaccaaccagatcttgatgctatcaagatgtttgtgggccaggttccaaggacctggtctgaaaaggacttgcgggaactcttcgaacagtatggtgctgtgtatgaaatcaacgtcctaagggataggagccaaaacccgcctcagagcaaagggtgctgttttgttacattttacacccgtaaagctgcattagaagctcagaatgctcttcacaacatgaaagtcctcccagggatgcatcaccctatacagatgaaacctgctgacagtgagaagaacaatgcagtggaagacaggaagctgtttattggtatgatttccaagaagtgcactgaaaatgacatccgagtcatgttctcttcgtttggacagattgaagaatgccggatattgcggggacctgatggcctgagccgaggttgtgcatttgtgacttttacaacaagagccatggcacagacggctatcaaggcaatgcaccaagcacagaccatggagggttgctcatcacccatggtggtaaaatttgctgatacacagaaggacaaagaacagaagagaatggcccagcagctccagcagcagatgcagcaaatcagcgcagcatctgtgtggggaaaccttgctggtctaaatactcttggaccccagtatttagcactccttcagcagactgcctcctctgggaacctcaacaccctgagcagcctccacccaatgggagggttgaatgcaatgcagttacagaatttggctgcactagctgctgcagctagtgcagctcagaacacaccaagtggtaccaatgctctcactacatccagcagtcccctcagcgtgctcactagttcagcagggtcctcacctagctctagcagcagtaattctgtcaaccccatagcctcacttggagccctgcagacattagctggagcaacggctggcctcaatgttggctctttggcaggaatggctgctttaaatggtggcctgggcagcagtggcctttccaatggcaccgggagcaccatggaggccctcactcaggcctactcgggtatccagcaatatgctgctgctgcgctccccactctgtacaaccagaatcttctgacacagcagagtattggtgctgctggaagccagaaggaaggtccagagggagccaacctgttcatctaccacctgccccaggagtttggtgatcaggacctgctgcagatgtttatgccctttgggaatgtcgtgtctgccaaggttttcatagacaagcagacaaacctgagcaagtgttttggttttgtaagttacgacaatcctgtttcggcccaagctgccatccagtccatgaacggctttcagattggcatgaagcggcttaaagtgcagctcaaacgttcgaagaatgacagcaagccctactgagcgtgctcccctctgagactggagtgagagggtcttctgattcctgccgtttgttcatcgttgtgcctaaagcatgtcgatgtggcgtcaagtacatcgtccaaatccctgtctctt

SEQ ID NO: 123160 - DNA, 7666 bp, Homo sapiens
  Payload ID: 4189
  Gene Symbol: CELF1
  Gene Name: CUGBP, Elav-like family member 1
  Uniprot ID: Q92879
  ENST ID: ENST00000395290
  CDS Start-End: 11-1468
ctcaaagaaaatgaacggcaccctggaccacccagaccaaccagatcttgatgctatcaagatgtttgtgggccaggttccaaggacctggtctgaaaaggacttgcgggaactcttcgaacagtatggtgctgtgtatgaaatcaacgtcctaagggataggagccaaaacccgcctcagagcaaagggtgctgttttgttacattttacacccgtaaagctgcattagaagctcagaatgctcttcacaacatgaaagtcctcccagggatgcatcaccctatacagatgaaacctgctgacagtgagaagaacaatgtggaagacaggaagctgtttattggtatgatttccaagaagtgcactgaaaatgacatccgagtcatgttctcttcgtttggacagattgaagaatgccggatattgcggggacctgatggcctgagccgaggttgtgcatttgtgacttttacaacaagagccatggcacagacggctatcaaggcaatgcaccaagcacagaccatggagggttgctcatcacccatggtggtaaaatttgctgatacacagaaggacaaagaacagaagagaatggcccagcagctccagcagcagatgcagcaaatcagcgcagcatctgtgtggggaaaccttgctggtctaaatactcttggaccccagtatttagcactttatttgcagctccttcagcagactgcctcctctgggaacctcaacaccctgagcagcctccacccaatgggagggttgaatgcaatgcagttacagaatttggctgcactagctgctgcagctagtgcagctcagaacacaccaagtggtaccaatgctctcactacatccagcagtcccctcagcgtgctcactagttcagggtcctcacctagctctagcagcagtaattctgtcaaccccatagcctcacttggagccctgcagacattagctggagcaacggctggcctcaatgttggctctttggcaggaatggctgctttaaatggtggcctgggcagcagtggcctttccaatggcaccgggagcaccatggaggccctcactcaggcctactcgggtatccagcaatatgctgctgctgcgctccccactctgtacaaccagaatcttctgacacagcagagtattggtgctgctggaagccagaaggaaggtccagagggagccaacctgttcatctaccacctgccccaggagtttggtgatcaggacctgctgcagatgtttatgccctttgggaatgtcgtgtctgccaaggttttcatagacaagcagacaaacctgagcaagtgttttggttttgtaagttacgacaatcctgtttcggcccaagctgccatccagtccatgaacggctttcagattggcatgaagcggcttaaagtgcagctcaaacgttcgaagaatgacagcaagccctactgagcgtgctcccctctgagactggagtgagagggtcttctggcacagcttgccctgaagactcggctactgccttctgtgggagtttcgcttcgtacagaggacaagtttgtgctttggtttccagtgttttactttggagtttaggtgccatatcctgaggttttttttgtttttgtttttgtttctcctttatttaaagtttgctgtgtttgtaaccagtgtgtgttgagaaggaccaacaccaaaccaccctggggaagggggacagggaaacatttaacacagacgatgatcaggatttgccccaaaccaccccaagagagaggactgagtggaacaaaaaagtgacccccagaacctctcttagtgtgagggtgggtagaatgagaactgacacctgggagctgtggggagcagagcggctttggggaagagtggagtgactagacacctaatgccctggcagctggagactcaaactcctgtacagctaccttctgggaaatagtttttgacacctatttttcagattcttgtccggaatttctgctgctcttttcaaaaaagggcattaacaattctctggaaataaagcacctgttagcctgacatatgcaaaaagcagggcggcatcacccattacgagctcccccagccagcagtcagtattggattggccttgcctggctggtggcagtttgggagaaacagccaaagaggttagtttatttcaacaccaaattagaccatggcccatttccaacgggtctctttaaaggcctctatggaatacattgcctggtttccttctttgcagttcaccacagcaaggaatgtcacctccatcccaagccaccattttctcatgaaggcaaatccaagaagggcttgcagttcttgctgaagggggtaccatttgtgggcagagtgatcaataccatctagttgggggaggaggagcttatttcttggtgtacttgaatcagaaggtccctgcaagccagtatgcttcatttgccagtggccagaaattctcccttgcctccttgattgaggtgtcccagatgtagtattcccacaggggtctggcaggcccctcctgtaaccactccagtcacattttctgctcttgaggcagaggtgacatcaggacgtttacagcctccacatgaattgagtgttcatttacctcagtattaccgtgttcatttttgtcctcgtgctacagttagctccctgccgcctcttgcaggtcttacttcagctcttgcctgtgacccacacagcttctgggctctgcctctgctctaagaagtgctgtgggggtagagaaccaggaaggacatgctgttgggaatgtacacctgggcagaggtggccctgttaagatgtgactgtagccacagccagggatgggatccctgggtctctggaatctgaaacctcaacaaataccagtcttgacccctagcagcagagataagaataaaggggttggtttgctattaagtcagatgggggctctctccttgtcatgctgtccctgtgggtaacagacagggattgaccatcttactgttgtacaggtagctggtggtgttggattatcccattgaagctgggacagctgttcctttctcatagtgataacttgggtctgttgtcctctaaggaacgtgaaacatacacttcttaagctgaaccacgtaaacttgaaattctgcgcactgggagaaatgtgtcctgtgtttcaaaggataaaactgttctaaaggcttccagggtcatgatgggattttttaaataaatgcaaaaaataaaaataaaaaagaaaaaagaaaacaaaaaaaaaaaagaaaaaaatgctaggttggggaggcgctgttctgaatcccaaccggctggaaccaagaatgtcgtttctatttttatagaagttttatacagctccggggtggagaatatttattacctaaattatatctctggaaaaggccaggattttgtagaatccagaatgtgattgttatacacacagggtgctgtgtatgattgaaactactgactttctgtggcccgtttgcagcccagctaacctgcccaaggggaaggtgttaatgctgtgaattggcagaggagagagctgtgctccatagggtgctgccggtgctgtgctccctagccttctgttctgtcttcctccttagccagaacgccactcccttcccacatccccttcttctctccgccttcccccatctcaccattatttgtccatggatttgtcctgggctctgggaccttatgaaacccctttcctaatgacataagaggccaaggtgcaatccacccacctttgataccagaccctgagggcttcatacctgctgatgggttttcttttctaaaaggaatgctcgccccagcagggtcctgggctgcttgagcagccagctggtgagaccatgcacttctctgttctctcctccccctgcccagtgagttagcacagcagtagcactgcccttgagcacagttctttccccaggccaaagatggttttgtgaagaagctgctcccctacaagtctcacgtgtgaaagggctcagctcagagtggagactcgctgtcaagtcttaagcaatccttttctgttgtgtgaaggtttcacttacaatgtgttttctgctgtagttttgtttcttacttgggttacatcatgaaattgatttgccttgaatgcagccagaccactgtctcctgggttccccttgagtggccagggcctggatggaagctaagagcttggatttctgggaacaaagggccatccccataagattgagcagaaattctggtcctcttccctgaaaaattttccccaccccagccagcatcttctgcttccccttgggttgtgaccagggagtggggagagaggctgaggctctgctcccctggagaccttctcttaggagttgggtgcttcatggaaaatccaagccttaggttcccttctgtctctggcaattagatgtgttcttggtgtcctccatgtcctttttgacttttccctgtgtccattgttagcatgtgcaaaagttccctgtcattacccaacccctgcccgcccacctcatttcagggctgtacacacagtgagtgttcctgttctctctctctttgtttggatgtattgctctgtgtaactcagtgggtctccctctttctggtttgtttttttttctagattcctgccgtttgttcatcgttgtgcctaaagcatgtcgatgtggcgtcaagtacatcgtccaaatccctgtctcttcagcttctctgatgcttgaactctcacctttgaccttgtgttgacctttgatgctgatgtgtatttttattatgtttgtttctttcttcgtttttttttctttttttctttcctttttttttccttttgtgctgccaaattggttttgctagaacgactgctgaaggggaaatatttaaacttgcatttgaatataaaaaaaatctatttttctagaacttcataagataaccacttgattttgtgattccaattctttgtaattgtcttcagagcagccctactagcacataccgcgtggtgtttgtatttctgtgaacacacagccagtccgtttctaggctttgtttctctgtgtgcttagttttaaagacaactttgaagtaaacaatgaaataaaagatgtcactaaaacctctgaggctcctgagcacattttgctgatacagtctgtggggcttgaggagaccgcatgtattgttctttcttttgtttttcttctgagttctcaactgcggagagcacctgaaccccctttcctttttgaccgcaggctgcactttgggccccagccagccctttttctttttctttttcttttgtggttcttccctggagcgactctggggagtcctggatatcccgcctgccccttcccctcagccccatgcttgttccaacagtctccacagcaaaatgtgatgctttgatttttttgttgttgtttttgtttttgtattgtttttgtgtttttgttttgaattttttcctttcctactaagattatgcccagaaaaaagttttgcatgtttcctgctgtttcttcacaccttcgtatatatcaccttcacctctctgttttctatagtttgtgcaaaaactgatcgatttaaaagggtttcaaagaagctgttttaaattgttgtagggttgattatttttttcaagattgtattgtttaattttgaagtggcaactttctcctctattgcccttagagcgtttgcctgtgcacttagactgtcacttcgtgtggcctccaggtcttaccggggcttccgggaggctggctgctttgctcagagagggtgggaagggggcctggagagacacgagaagcagaggtagagcctagaaggtggcagcaggtgggtaagaggcttatttagcacattaggggcagtgagcacctggaggaaggagggcgctcccaatcacccgtaggaggccatctgcacaccaagcggcaattcacctgctggcgcttttcctaggtgacaagcacaatactacagtcttcacactgtttacagccctgggcaccagccacccggcactggctcttcatcacagctctgctcttgcttagctagtggggtgggggaaagggcagggatttgtttttttaattgggtggagagccaaacagctactgtccctgggtgccaagcaagccagttttttggttccctgagggaaactgaccctcctctcttgtggcaccatccagcctcagggtcttggagacttgagtaagaatgtgagtggagggggagaggtgaggagaggagcacagggtggatctgtggagggaagaggttacagggggaggagctgatgatagatcccacccagacttaagctgctggtgggtgggtgagctgggaagtaggactgtccagggaagggtggagagatgtagctaggggctggggagggggaggtggaagcgctattgagcatcctccacaccaaggttgatgaaggaagggatcccagcagggtttctgctctggggctggcaggttgcctggtattatgcccaaggccgctctgcctgggggaaagggcagccaggcagaggcccagtgtctggtaggctgctgaatttcctggaaggggtgattggatggaaagaggccagaaaccccagcctgagagactgctgtgcaccccacagtctgactgcacagagccgcctctgttggcaggaggcactgaggctccccttcctgtgtattgagaagcagtgtttgccaatatattttgctttcaattccaagaggagctctgggaaaacctgtggataaaaccaaatgccaaatgttggacgttgtttccttttccttttctctctctgattgttttaattgttctgtggtggttttaatggatttgagaccctggagcggcagctgcctttctgatttccagctgctttttgtgaataatttaaaaagaaaaaaaaaaagaaactttacattttggagacaaacctgtgtgagttttttattggtacaaacgttgtatttaacactaggggttttgtacagttttttgccttttctactagaaaacaatgtaaagtgatttcacaatgtgaagagaaaaaaaaattgccactatgaccaaacgcacagtctgttctgcagcaacaacgggattcaatcaactcagtcgtgattcagccgtagaaatgcttttcctttatcttgtttgagcttttcctttctttcctgttttgatttgcaaaagaaaatgtcttttttgtgtgaacttgtgttgtactctgtagaaaattatggattttactttaatggtttaaaaaaaggcaaggagagccctcgtcgcttttcttacctaatcacagagtttgtgtagtgaatttaaaaagaaaaaaaaattgttataagtttggagcaagggagtatgtgtttcaaaggaatctccttcctttttttgtgtgtttttccttttgtcccaatggggaacctaaatctgttttaattgcacagacacatggacaaaaagtcattttgtatctgccaagtgtggtaccttcctttgtttatttgctattaaactgtttg

SEQ ID NO: 123161 - DNA, 2191 bp, Homo sapiens
  Payload ID: 4189
  Gene Symbol: CELF1
  Gene Name: CUGBP, Elav-like family member 1
  Uniprot ID: Q92879
  ENST ID: ENST00000395292
  CDS Start-End: 202-1653
atactttgaaaataacagctcttttttgttccctcgtgtgtctcttcccaattgtatccctattgtattttctcatagtatgtttcagcagaaatcaaggtagacgaagtaacctcttgtcctgaattttcatagttgctcattcttaataatggcagcagaagcaacaatgagagtaactacctcctcagctcaaagaaaatgaacggcaccctggaccacccagaccaaccagatcttgatgctatcaagatgtttgtgggccaggttccaaggacctggtctgaaaaggacttgcgggaactcttcgaacagtatggtgctgtgtatgaaatcaacgtcctaagggataggagccaaaacccgcctcagagcaaagggtgctgttttgttacattttacacccgtaaagctgcattagaagctcagaatgctcttcacaacatgaaagtcctcccagggatgcatcaccctatacagatgaaacctgctgacagtgagaagaacaatgcagtggaagacaggaagctgtttattggtatgatttccaagaagtgcactgaaaatgacatccgagtcatgttctcttcgtttggacagattgaagaatgccggatattgcggggacctgatggcctgagccgaggttgtgcatttgtgacttttacaacaagagccatggcacagacggctatcaaggcaatgcaccaagcacagaccatggagggttgctcatcacccatggtggtaaaatttgctgatacacagaaggacaaagaacagaagagaatggcccagcagctccagcagcagatgcagcaaatcagcgcagcatctgtgtggggaaaccttgctggtctaaatactcttggaccccagtatttagcactccttcagcagactgcctcctctgggaacctcaacaccctgagcagcctccacccaatgggagggttgaatgcaatgcagttacagaatttggctgcactagctgctgcagctagtgcagctcagaacacaccaagtggtaccaatgctctcactacatccagcagtcccctcagcgtgctcactagttcagcagggtcctcacctagctctagcagcagtaattctgtcaaccccatagcctcacttggagccctgcagacattagctggagcaacggctggcctcaatgttggctctttggcaggaatggctgctttaaatggtggcctgggcagcagtggcctttccaatggcaccgggagcaccatggaggccctcactcaggcctactcgggtatccagcaatatgctgctgctgcgctccccactctgtacaaccagaatcttctgacacagcagagtattggtgctgctggaagccagaaggaaggtccagagggagccaacctgttcatctaccacctgccccaggagtttggtgatcaggacctgctgcagatgtttatgccctttgggaatgtcgtgtctgccaaggttttcatagacaagcagacaaacctgagcaagtgttttggttttgtaagttacgacaatcctgtttcggcccaagctgccatccagtccatgaacggctttcagattggcatgaagcggcttaaagtgcagctcaaacgttcgaagaatgacagcaagccctactgagcgtgctcccctctgagactggagtgagagggtcttctgattcctgccgtttgttcatcgttgtgcctaaagcatgtcgatgtggcgtcaagtacatcgtccaaatccctgtctcttcagcttctctgatgcttgaactctcacctttgaccttgtgttgacctttgatgctgatgtgtatttttattatgtttgtttctttcttcgtttttttttctttttttctttcctttttttttccttttgtgctgccaaattggttttgctagaacgactgctgaaggggaaatatttaaacttgcatttgaatataaaaaaaatctatttttctagaacttcataagataaccacttgattttgtgattccaattctttgtaattgtcttcagagcagccctactagcacataccgcgtggtgtttgtatttctgtgaacacacagccagtccgtttctaggctttgtttctctgtgtgcttagttttaaagacaactttgaagtaaacaatgaaataaaagatgtcactaaaacctctga

SEQ ID NO: 123162 - DNA, 583 bp, Homo sapiens
  Payload ID: 4189
  Gene Symbol: CELF1
  Gene Name: CUGBP, Elav-like family member 1
  ENST ID: ENST00000530151
  CDS Start-End: 298-583
ctctcgcgggctcgcaccgggtgacggcggggactggcctggactctgggggactggcgggactctggaggagggcccggcggcctcggaggagggaccgaggtttcctgggcgggaaactgggaccccggcgaagggagagcgcgtcgcaggccagacacgtgtgagccctgtagcgtgggaaactgaggcccccgcctgtggccggtgacctccctcctccgagggaggggggttgtgaccccagagtgaagacatagtccagagagggaagtgtaaagctacagctcaaagaaaatgaacggcaccctggaccacccagaccaaccagatcttgatgctatcaagatgtttgtgggccaggttccaaggacctggtctgaaaaggacttgcgggaactcttcgaacagtatggtgctgtgtatgaaatcaacgtcctaagggataggagccaaaacccgcctcagagcaaagggtgctgttttgttacattttacacccgtaaagctgcattagaagctcagaatgctcttcacaacatgaaagtcctcccagggatgcatcaccctatacagatgaaac

SEQ ID NO: 123163 - DNA, 543 bp, Homo sapiens
  Payload ID: 4189
  Gene Symbol: CELF1
  Gene Name: CUGBP, Elav-like family member 1
  ENST ID: ENST00000528434
  CDS Start-End: 202-543
atgctggagaaacaccttgattgaggcagcttcttctgtggctgtgtggctgaacataacttctttttttcaaagttccctgtgttgtgaactgagcttgggtgaagtgaaatctttgaggaagctaaagctgtgtgtatttgtggatcagacaagtgcagcaagttaatatcattggcttctgaaggggagagtgaggtgatggctgcgtttaagttggatttccttccagaaatgatggtggatcattgctctttgaattccagtcccgtctcaaagaaaatgaacggcaccctggaccacccagaccaaccagatcttgatgctatcaagatgtttgtgggccaggttccaaggacctggtctgaaaaggacttgcgggaactcttcgaacagtatggtgctgtgtatgaaatcaacgtcctaagggataggagccaaaacccgcctcagagcaaagggtgctgttttgttacattttacacccgtaaagctgcattagaagctcagaatgctcttcacaacatgaaagtcctcccaggg

SEQ ID NO: 123164 - DNA, 476 bp, Homo sapiens
  Payload ID: 4189
  Gene Symbol: CELF1
  Gene Name: CUGBP, Elav-like family member 1
  ENST ID: ENST00000526419
  CDS Start-End: 307-476
gcgagaagagcaggcgggtgccggggcggggctgccagctgcactaggcctctcgcgggctcgcaccgggtgacggcggggactggcctggactctgggggactggcgggactctggaggagggcccggcggcctcggaggagggaccgaggtttcctgggcgggaaactgggaccccggcgaagggagagcgcgtcgcaggccagacacgtgtgagccctgtagcgtgggaaactgaggcccccgcctgtggccggtgacctccctcctccgagggaggggggttgtgaccccagctcaaagaaaatgaacggcaccctggaccacccagaccaaccagatcttgatgctatcaagatgtttgtgggccaggttccaaggacctggtctgaaaaggacttgcgggaactcttcgaacagtatggtgctgtgtatgaaatcaacgtcctaagggataggagccaaaacccgcctca

SEQ ID NO: 123165 - DNA, 3044 bp, Homo sapiens
  Payload ID: 4189
  Gene Symbol: CELF1
  Gene Name: CUGBP, Elav-like family member 1
  Uniprot ID: Q92879
  ENST ID: ENST00000532048
  CDS Start-End: 895-2433
gtctgtttaaggaatagcagaagacatgacatgtagacaaatttcaggttattttcagaagatactgggtttgttactgtattttaaaaggatactttcttggtttgttatgagatattctaattaaacagtgatgaattcttactcctggtcagtgtaagtctaaattcaagtttgttgctttgttttacagtttcctttcactcccctcccccatcccctcatgagtcataagcatgcagtgttgggaatagaacttgtcagctgagtggggatgagacagttctctgcccatactatttgtaactgtagtcaatgaggagaggaaaggacgttattaaatgctggagaaacaccttgattgaggcagcttcttctgtggctgtgtggtatggatgcagagttctgtgtgactatacactgatgtattctggctctgaatcacttagggatctcttctgcaccttgtgcattgtaggttttggatgcttatttgtttagggtctaggacctggtgcttagcctctcctggatcctgtatatttactgactttccaaattcttttgagtgtggcattatatctgcttcatcttctctttcttggctattcttagtgcccttctcattttactgtcctaatgttttcccatttatactatgaatcattgtgcaccctatgtagagcctgtcattggagattaaaatcagtggcagctctttgattttacagctcagcctcagctgaacataacttctttttttcaaagttccctgtgttgtgaactgagcttgggtgaagtgaaatctttgaggaagctaaagctgtgtgtatttgtggatcagacaagtgcagcaagttaatatcattggcttctgaaggggagagtgaggtgatggctgcgtttaagttggatttccttccagaaatgatggtggatcattgctctttgaattccagtcccgtctcaaagaaaatgaacggcaccctggaccacccagaccaaccagatcttgatgctatcaagatgtttgtgggccaggttccaaggacctggtctgaaaaggacttgcgggaactcttcgaacagtatggtgctgtgtatgaaatcaacgtcctaagggataggagccaaaacccgcctcagagcaaagggtgctgttttgttacattttacacccgtaaagctgcattagaagctcagaatgctcttcacaacatgaaagtcctcccagggatgcatcaccctatacagatgaaacctgctgacagtgagaagaacaatgtggaagacaggaagctgtttattggtatgatttccaagaagtgcactgaaaatgacatccgagtcatgttctcttcgtttggacagattgaagaatgccggatattgcggggacctgatggcctgagccgaggttgtgcatttgtgacttttacaacaagagccatggcacagacggctatcaaggcaatgcaccaagcacagaccatggagggttgctcatcacccatggtggtaaaatttgctgatacacagaaggacaaagaacagaagagaatggcccagcagctccagcagcagatgcagcaaatcagcgcagcatctgtgtggggaaaccttgctggtctaaatactcttggaccccagtatttagcactttatttgcagctccttcagcagactgcctcctctgggaacctcaacaccctgagcagcctccacccaatgggagggttgaatgcaatgcagttacagaatttggctgcactagctgctgcagctagtgcagctcagaacacaccaagtggtaccaatgctctcactacatccagcagtcccctcagcgtgctcactagttcagggtcctcacctagctctagcagcagtaattctgtcaaccccatagcctcacttggagccctgcagacattagctggagcaacggctggcctcaatgttggctctttggcaggaatggctgctttaaatggtggcctgggcagcagtggcctttccaatggcaccgggagcaccatggaggccctcactcaggcctactcgggtatccagcaatatgctgctgctgcgctccccactctgtacaaccagaatcttctgacacagcagagtattggtgctgctggaagccagaaggaaggtccagagggagccaacctgttcatctaccacctgccccaggagtttggtgatcaggacctgctgcagatgtttatgccctttgggaatgtcgtgtctgccaaggttttcatagacaagcagacaaacctgagcaagtgttttggttttgtaagttacgacaatcctgtttcggcccaagctgccatccagtccatgaacggctttcagattggcatgaagcggcttaaagtgcagctcaaacgttcgaagaatgacagcaagccctactgagcgtgctcccctctgagactggagtgagagggtcttctggtcttacttcagctcttgcctgtgacccacacagcttctgggctctgcctctgctctaagaagtgctgtgggggtagagaaccaggaaggacatgctgttgggaatgtacacctgggcagaggtggccctgttaagatgtgactgtagccacagccagggatgggatccctgggtctctggaatctgaaacctcaacaaataccagtcttgacccctagcagcagagataagaataaaggggttggtttgctattaagtcagatgggggctctctccttgtcatgctgtccctgtgggtaacagacagggattgaccatcttactgttgtacaggtagctggtggtgttggattatcccattgaagctgggacagctgttcctttctcatagtgataacttgggtctgttgtcctctaaggaacgtgaaacatacacttcttaagctgaaccacgtaaacttgaaattctgcgcactgggagaaatgtgtcctgtgtttcaaaggataaaactgttctaaaggcttccagggtcatgatgggattttttaaataaatgcaaaaaataaaaat

SEQ ID NO: 123166 - DNA, 622 bp, Homo sapiens
  Payload ID: 4189
  Gene Symbol: CELF1
  Gene Name: CUGBP, Elav-like family member 1
  ENST ID: ENST00000525841
  CDS Start-End: 362-622
accgggtgacggcggggactggcctggactctgggggactggcgggactctggaggagggcccggcggcctcggaggagggaccgaggtttcctgggcgggaaactgggaccccggcgaagggagagcgcgtcgcaggccagacacgtgtgagccctgtagcgtgggaaactgaggcccccgcctgtggccggtgacctccctcctccgagggaggggggttgtgaccccagagtttcactattgtcacccaagctgcagtgcaatggcgtgatctcagcacactgcaacctctgcctcccaggttcaagcaattctcctgcctcagcctcccgagtagctgggattacagctcaaagaaaatgaacggcaccctggaccacccagaccaaccagatcttgatgctatcaagatgtttgtgggccaggttccaaggacctggtctgaaaaggacttgcgggaactcttcgaacagtatggtgctgtgtatgaaatcaacgtcctaagggataggagccaaaacccgcctcagagcaaagggtgctgttttgttacattttacacccgtaaagctgcattagaagctcagaatgctcttcacaacatgaaagtcctcccaggg

SEQ ID NO: 123167 - DNA, 3650 bp, Homo sapiens
  Payload ID: 4189
  Gene Symbol: CELF1
  Gene Name: CUGBP, Elav-like family member 1
  ENST ID: ENST00000531165
  CDS Start-End: 280-1824
ggcagcggcagcggcggcgggacgcggaggctcccccgggattcggcctcagcagcgaggcggcggcggcggctgcggaggcgcaggcagcaactgaggcagcggcaggctcaggtgcagccgctggctgaacataacttctttttttcaaagttccctgtgttgtgaactgagcttgggtgaagtgaaatctttgaggaagctaaagctgtgtgtatttgtggatcagacaagtgcagcaagttaatatcattggcttctgaaggggagagtgaggtgatggctgcgtttaagttggatttccttccagaaatgatggtggatcattgctctttgaattccagtcccgtctcaaagaaaatgaacggcaccctggaccacccagaccaaccagatcttgatgctatcaagatgtttgtgggccaggttccaaggacctggtctgaaaaggacttgcgggaactcttcgaacagtatggtgctgtgtatgaaatcaacgtcctaagggataggagccaaaacccgcctcagagcaaagggtgctgttttgttacattttacacccgtaaagctgcattagaagctcagaatgctcttcacaacatgaaagtcctcccagggatgcatcaccctatacagatgaaacctgctgacagtgagaagaacaatgcagtggaagacaggaagctgtttattggtatgatttccaagaagtgcactgaaaatgacatccgagtcatgttctcttcgtttggacagattgaagaatgccggatattgcggggacctgatggcctgagccgaggttgtgcatttgtgacttttacaacaagagccatggcacagacggctatcaaggcaatgcaccaagcacagaccatggagggttgctcatcacccatggtggtaaaatttgctgatacacagaaggacaaagaacagaagagaatggcccagcagctccagcagcagatgcagcaaatcagcgcagcatctgtgtggggaaaccttgctggtctaaatactcttggaccccagtatttagcactttatttgcagctccttcagcagactgcctcctctgggaacctcaacaccctgagcagcctccacccaatgggagggttgaatgcaatgcagttacagaatttggctgcactagctgctgcagctagtgcagctcagaacacaccaagtggtaccaatgctctcactacatccagcagtcccctcagcgtgctcactagttcagcagggtcctcacctagctctagcagcagtaattctgtcaaccccatagcctcacttggagccctgcagacattagctggagcaacggctggcctcaatgttggctctttggcaggaatggctgctttaaatggtggcctgggcagcagtggcctttccaatggcaccgggagcaccatggaggccctcactcaggcctactcgggtatccagcaatatgctgctgctgcgctccccactctgtacaaccagaatcttctgacacagcagagtattggtgctgctggaagccagaaggaaggtccagagggagccaacctgttcatctaccacctgccccaggagtttggtgatcaggacctgctgcagatgtttatgccctttgggaatgtcgtgtctgccaaggttttcatagacaagcagacaaacctgagcaagtgttttggttttgtaagttacgacaatcctgtttcggcccaagctgccatccagtccatgaacggctttcagattggcatgaagcggcttaaagtgcagctcaaacgttcgaagaatgacagcaagccctactgagcgtgctcccctctgagactggagtgagagggtcttctggcacagcttgccctgaagactcggctactgccttctgtgggagtttcgcttcgtacagaggacaagtttgtgctttggtttccagtgttttactttggagtttaggtgccatatcctgaggttttttttgtttttgtttttgtttctcctttatttaaagtttgctgtgtttgtaaccagtgtgtgttgagaaggaccaacaccaaaccaccctggggaagggggacagggaaacatttaacacagacgatgatcaggatttgccccaaaccaccccaagagagaggactgagtggaacaaaaaagtgacccccagaacctctcttagtgtgagggtgggtagaatgagaactgacacctgggagctgtggggagcagagcggctttggggaagagtggagtgactagacacctaatgccctggcagctggagactcaaactcctgtacagctaccttctgggaaatagtttttgacacctatttttcagattcttgtccggaatttctgctgctcttttcaaaaaagggcattaacaattctctggaaataaagcacctgttagcctgacatatgcaaaaagcagggcggcatcacccattacgagctcccccagccagcagtcagtattggattggccttgcctggctggtggcagtttgggagaaacagccaaagaggttagtttatttcaacaccaaattagaccatggcccatttccaacgggtctctttaaaggcctctatggaatacattgcctggtttccttctttgcagttcaccacagcaaggaatgtcacctccatcccaagccaccattttctcatgaaggcaaatccaagaagggcttgcagttcttgctgaagggggtaccatttgtgggcagagtgatcaataccatctagttgggggaggaggagcttatttcttggtgtacttgaatcagaaggtccctgcaagccagtatgcttcatttgccagtggccagaaattctcccttgcctccttgattgaggtgtcccagatgtagtattcccacaggggtctggcaggcccctcctgtaaccactccagtcacattttctgctcttgaggcagaggtgacatcaggacgtttacagcctccacatgaattgagtgttcatttacctcagtattaccgtgttcatttttgtcctcgtgctacagttagctccctgccgcctcttgcaggtcttacttcagctcttgcctgtgacccacacagcttctgggctctgcctctgctctaagaagtgctgtgggggtagagaaccaggaaggacatgctgttgggaatgtacacctgggcagaggtggccctgttaagatgtgactgtagccacagccagggatgggatccctgggtctctggaatctgaaacctcaacaaataccagtcttgacccctagcagcagagataagaataaaggggttggtttgctattaagtcagatgggggctctctccttgtcatgctgtccctgtgggtaacagacagggattgaccatcttactgttgtacaggtagctggtggtgttggattatcccattgaagctgggacagctgttcctttctcatagtgataacttgggtctgttgtcctctaaggaacgtgaaacatacacttcttaagctgaaccacgtaaacttgaaattctgcgcactgggagaaatgtgtcctgtgtttcaaaggataaaactgttctaaaggcttccagggtcatgatgggattttttaaataaatgcaaaaaataaaaataa

SEQ ID NO: 123168 - DNA, 549 bp, Homo sapiens
  Payload ID: 4189
  Gene Symbol: CELF1
  Gene Name: CUGBP, Elav-like family member 1
  ENST ID: ENST00000535982
  CDS Start-End: 241-549
attgtgtgctgggctgagcctcccttcacatggtcacatccccattttaatccaatactccctttccctaccccttccccagtcctgcctctttctgtggcacttattgctggtttccctgagctcctgtttccactttgtgttttttgtggggcccaggaagctaaagctgtgtgtatttgtggatcagacaagtgcagcaagttaatatcattggcttctgaaggggagagtgaggtgatggctgcgtttaagttggatttccttccagaaatgatggtggatcattgctctttgaattccagtcccgtctcaaagaaaatgaacggcaccctggaccacccagaccaaccagatcttgatgctatcaagatgtttgtgggccaggttccaaggacctggtctgaaaaggacttgcgggaactcttcgaacagtatggtgctgtgtatgaaatcaacgtcctaagggataggagccaaaacccgcctcagagcaaagggtgctgttttgttacattttacacccgtaaagctgcattagaagctcag

SEQ ID NO: 123169 - DNA, 556 bp, Homo sapiens
  Payload ID: 4189
  Gene Symbol: CELF1
  Gene Name: CUGBP, Elav-like family member 1
  ENST ID: ENST00000526277
  CDS Start-End: 444-556
atctcttctgcaccttgtgcattgtaggttttggatgcttatttgtttagggtctaggacctggtgcttagcctctcctggatcctgtatatttactgactttccaaattcttttgagtgtggcattatatctgcttcatcttctctttcttggctattcttagtgcccttctcattttactgtcctaatgttttcccatttatactatgaatcattgtgcaccctatgtagagcctgtcattggagattaaaatcagtggcagctctttgattttacagctcagcctcagctgaacataacttctttttttcaaagttccctgtgttgtgaactgagcttgggtgaagtgaaatctttgaggaagctaaagctgtgtgtatttgtggatcagacaagtgcagcaagttaatatcattggcttctgaaggggagagtgaggtgatggctgcgtttaagttggatttccttccagaaatgatggtggatcattgctctttgaattccagtcccgtctcaaagaaaatgaacggcaccctggaccacccagaccaacc

SEQ ID NO: 123170 - DNA, 581 bp, Homo sapiens
  Payload ID: 4189
  Gene Symbol: CELF1
  Gene Name: CUGBP, Elav-like family member 1
  ENST ID: ENST00000528538
  CDS Start-End: 539-581
actagctaggccgtgtggccaccctttggcacccgcaccggctcagacctgctcaggactcagccagggcacacagtttgtgttcttacgtgcatccatctgtctgtctgtgtgcgtctctgtggaggactgaggttttcaagtgaaagagagtgaagacatagtccagagagggaagtgtaaagctacaggctgaacataacttctttttttcaaagttccctgtgttgtgaactgagcttgggtgaagtgaaatctttgaggaagctaaagctgtgtgtatttgtggatcagacaagtgcagcaagttaatatcattggcttctgaaggggagagtgaggtgatggctgcgtttaagttggatttccttccagaaatgatggtggatcattgctctttgaattccagtcccgttatgtttcagcagaaatcaaggtagacgaagtaacctcttgtcctgaattttcatagttgctcattcttaataatggcagcagaagcaacaatgagagtaactacctcctcagctcaaagaaaatgaacggcaccctggaccacccagaccaaccagatcttgatg

SEQ ID NO: 123171 - DNA, 576 bp, Homo sapiens
  Payload ID: 4189
  Gene Symbol: CELF1
  Gene Name: CUGBP, Elav-like family member 1
  ENST ID: ENST00000543178
  CDS Start-End: 341-576
agttccctgctcctccctctctgagcacggagcagaatctgttctgctgaagctgctgttccactttttagcttgctatatttgtacagcaacagcaggagcagcccactagctaggccgtgtggccaccctttggcacccgcaccggctcagacctgctcaggactcagccagggcacacagtttgtgttcttacgtgcatccatctgtctgtctgtgtgcgtctctgtggaggactgaggttttcaagtgaaagaggctgaacataacttctttttttcaaagttccctgtgttgtgaactgagcttgggtgaagtgaaatctttgagctcaaagaaaatgaacggcaccctggaccacccagaccaaccagatcttgatgctatcaagatgtttgtgggccaggttccaaggacctggtctgaaaaggacttgcgggaactcttcgaacagtatggtgctgtgtatgaaatcaacgtcctaagggataggagccaaaacccgcctcagagcaaagggtgctgttttgttacattttacacccgtaaagctgcattagaagctcagaatgctct

SEQ ID NO: 123172 - DNA, 1754 bp, Homo sapiens
  Payload ID: 4190
  Gene Symbol: CELF2
  Gene Name: CUGBP, Elav-like family member 2
  ENST ID: ENST00000354897
  CDS Start-End: 20-1528
taacggcacagccaacaagatgaacggagctttggatcactcagaccaaccagacccagatgccattaagatgtttgtcggacagatcccccggtcatggtcggaaaaggagctgaaagaactttttgagccttacggagccgtctaccagatcaacgtcctccgggaccggagtcagaaccctccgcagagtaaaggttgttgtttcgtaacattttatacaagaaaagctgcacttgaggcccagaatgcactgcacaatattaaaactttacctgggatgcatcatcccattcagatgaaacctgcagatagtgaaaagtccaacgctgtggaagacagaaaattgttcataggaatggtatcgaagaaatgtaatgagaacgacatcagggtgatgttctctccatttggccagatagaagaatgccggatcctccggggacctgatgggctgagtcgaggctgtgcgtttgtcacattttctacaagggcaatggcacagaatgcaatcaaagccatgcatcagtctcagaccatggagggctgctcttcacctatcgtggtgaagtttgctgacactcagaaggacaaagagcaaaggcgcctccagcagcagctcgctcagcagatgcagcagctcaacactgccacctgggggaacctgacagggctgggcggactgaccccacagtatctggcgctcctgcagcaggccacctcctccagcaacctgggtgcgttcagcggcattcaacaaatggcaggcatgaatgctttacagttgcagaacctggcgacgctggctgctgctgcagctgcggcccagacctcagccaccagcaccaatgcaaaccctctctctaccacgagcagcgccctgggagccctcacgagtcccgtggctgcttcaacccccaactccactgctggtgcagccatgaactccttgacctctctcgggactctgcaaggactggctggagccactgttggactgaataatattaatgcactagcaggtaccatcaacactcccagaagcaaaaggcttttacttccaaaagataacaacggtatggcggctctgaatggaggacttggcgccacaggcttgacgaatggcacggctggcaccatggacgccctcacccaggcctactcaggaattcaacagtacgcagccgccgcgctgcccactctgtacagccagagcctgctgcagcagcagagcgctgcaggcagccagaaggaaggtccagagggggcaaacctctttatttaccaccttccacaggaatttggagaccaggacattctgcagatgttcatgccttttggaaatgttatctctgctaaagtcttcattgacaaacagaccaatctgagcaagtgctttggttttgttagctacgacaatccagtctctgcacaagctgctatccaagctatgaatggctttcagatcggcatgaaacgcttgaaggtgcagctgaagcgttccaaaaacgacagcaaaccttactgatcctaaccccagaggctccctgctctcattttagctttcttagggtaagtcccacgagccagcctgtctcaacagggaaggcagaggaggaccacattgccaacttttaccaagagagacggttatttttacaataaggcctccatgtccccacccacttcccctacccagtttgccataattaaaacttgggctactttgtttctattgagtaattcctcctcca

SEQ ID NO: 123173 - DNA, 7085 bp, Homo sapiens
  Payload ID: 4190
  Gene Symbol: CELF2
  Gene Name: CUGBP, Elav-like family member 2
  Uniprot ID: O95319
  ENST ID: ENST00000399850
  CDS Start-End: 308-1780
aaaagggcggtggggcggggggcggggcagggagagggagagaaatccagcagacatctagctctgcctttctttcccagccacagccagggtagggctgataaggcgctgatgcgttgatggcagccttgcagagctagacctgcacttaacttgcagctgcctcccgagcctccaagatgtccacgccctgggtgacaggcggcagggcgctgccccgtgctcccccggctctgctcgacagcagcacgcagtgagagcctcgccgccgccgaggagcaactcatgtaacggcacagccaacaagatgaacggagctttggatcactcagaccaaccagacccagatgccattaagatgtttgtcggacagatcccccggtcatggtcggaaaaggagctgaaagaactttttgagccttacggagccgtctaccagatcaacgtcctccgggaccggagtcagaaccctccgcagagtaaaggttgttgtttcgtaacattttatacaagaaaagctgcacttgaggcccagaatgcactgcacaatattaaaactttacctgggatgcatcatcccattcagatgaaacctgcagatagtgaaaagtccaacgctgtggaagacagaaaattgttcataggaatggtatcgaagaaatgtaatgagaacgacatcagggtgatgttctctccatttggccagatagaagaatgccggatcctccggggacctgatgggctgagtcgaggctgtgcgtttgtcacattttctacaagggcaatggcacagaatgcaatcaaagccatgcatcagtctcagaccatggagggctgctcttcacctatcgtggtgaagtttgctgacactcagaaggacaaagagcaaaggcgcctccagcagcagctcgctcagcagatgcagcagctcaacactgccacctgggggaacctgacagggctgggcggactgaccccacagtatctggcgctcctgcagcaggccacctcctccagcaacctgggtgcgttcagcggcattcaacaaatggcaggcatgaatgctttacagttgcagaacctggcgacgctggctgctgctgcagctgcggcccagacctcagccaccagcaccaatgcaaaccctctctctaccacgagcagcgccctgggagccctcacgagtcccgtggctgcttcaacccccaactccactgctggtgcagccatgaactccttgacctctctcgggactctgcaaggactggctggagccactgttggactgaataatattaatgcactagcagttgctcaaatgctctcaggtatggcggctctgaatggaggacttggcgccacaggcttgacgaatggcacggctggcaccatggacgccctcacccaggcctactcaggaattcaacagtacgcagccgccgcgctgcccactctgtacagccagagcctgctgcagcagcagagcgctgcaggcagccagaaggaaggtccagagggggcaaacctctttatttaccaccttccacaggaatttggagaccaggacattctgcagatgttcatgccttttggaaatgttatctctgctaaagtcttcattgacaaacagaccaatctgagcaagtgctttggttttgttagctacgacaatccagtctctgcacaagctgctatccaagctatgaatggctttcagatcggcatgaaacgcttgaaggtgcagctgaagcgttccaaaaacgacagcaaaccttactgatcctaaccccagaggctccctgctctcattttagctttcttagggtaagtcccacgagccagcctgtctcaacagggaaggcagaggaggaccacattgccaacttttaccaagagagacggttatttttacaataaggcctccatgtccccacccacttcccctacccagtttgccataattaaaacttgggctactttgtttctattgagtaattcctcctccagttgtgccactgtattctcctttgttttgcgatttgaatctccttttacctttttttttaatttttttcatttttgcttttttttaaagagaagcatatacacaaataaatggcatcttgagaatttaaaaggcaaacaaacaaacgctaatgtgcaattctaactctgaaaccactggtgccccgagagcactgcctggagaattcacccctccttgcccggcgcccgcccccggagggagggcccggtgcttagaggttaacttggtggcctaggagagggagaagccaggagaagcacttactccaaccacacgtctttccactacatcggcttgttttactaagtaggattttattttagggttcaaagaaacatgacatttattggtcaaaatattacactggttgtctattttgttattgttttattttagtttttagaaaggattaatgtacaaaaagatttagagatctgtttcttaaagctacagggtttaaaaaataaaaatgagtgaaaatacttgatgtttcttgaaagataaatttaataataataaataaatacataaatacataaataaaaaagaaagccacaggcctgtaaattttatttgtaaaaaagcatttctatttttatacaaaatttttactgcctcagaaataatggaagttatttattgcctattgttaacttattgggtacctaaagagcagttctctgtctagctagaaccttctgaagtagtctctagaggaattgttctaggaatgggctttttttcaccgttgaaccctagacctgaagttcatgctttatcctctcgttgtttgtatctgtctgattattttgtttgtaacttccattatctagtttacagttcagtcgtctgactttccccgtatgtcacatttgttgaaactggaccttctccccctgtccctcaccccaaaacacccggaatccatcccgtttcgctctctccagatggattctcttggggtttcattgtgctgtggataaggagtgtaagaaatgcaaattatgtgaatggctcggagactccctaatgacctaagatttgcattagtttttctcctgcacccttaaaagtgattttgttgccgctgcatagattctgtgtaactttttactcttccttgttttttccctagacatcttcatgcccgttagttcatcgtttgcctagcatgtccctgtggcgtctcaaaaaaaagtttcatcgtcccgtcattgtttctgatgtctttctgacctcacatcatatttggttctcctactgacctttgatctagtttgacctttgaaatttgcatgtgacctcatctagctatgaattctgggaagtcaatgtgaaaaacattgctgcattcatgcaagactgaaatttattattagacaaattcattatagaaaaaacctgtggcaaaaacgtttctttcttattttttttcttttcctaaaacagacttgaaagtattatacagggattggcattcttcccggtcactggtaacaatagcaatatgtgtccagggacacagaatgttggtttctaacagactacttccaaaaacagtttgagaaaaaaactgtctgattttaagtctctagaggtctgtaatagtttttacatttttcaggcagtgtaaagttttttgataaggccattttaggtggctcactttctcattaagatatatatatagaaccactttttgtagattagtataagaaaaatatttaccctgttttggggcaaatgctacctatttgtgtcaccttttgctgaactcacagttagacaatccatggtttaatgcacatgaaattacctatattttatactgtttcaatgtacaggagaaaggttactgtaaactgtgttatgttggtgcttctgtgaattaagttgtggtttcatcatgagtcttaatgttctttgttgataagacaagtttagaattggtttacttaatacaaaaaaaaaaaaaagaatttcaaaaaaaaaagttgtttgcttaaaaaaaatttcatgtgagggaaaaaaaaaaaacctattccagaataagttttgtgttggcttgtgaagcattgatgtcattttttttaattgtggactatttagatgtgtttgtgttcagcaaaatgtgatgtttttttcttttaaagaaaaaaagtgaaaatatatagtgccaaattccaaaggtacttccttcctagagcttcagtgtgtttcttgtgagaagtaatttgataacatgggtattttattatgtgttttgtataaatccctaatatttaaaaaaaaaaacaaaacaaaaaaaggttacaaagtttgttaacttgctatcctgtggtcttgttgcctgaaattgttattgtttgttatttctctctgatgttttttgtaagacattgtataagtgcccatgtcccacttttttaaccactccgcacatcagtgctgtgaaggcaacctcaccatgtattttcttcataatctatggaaacctctaaggtgagaaagttttgaacttttaaccctttctacccagagctatctggaatgttgatgactttttatactgtcatgatttgagtttgttttggggtgtttccaatttggatttttttccctgcatctatcctctaagttgtttcggtttgactactttgttctttggttaagatccaaaagaaaacagaaaacaattccacgaggccaatctaaagggaaaaaatcctacactacttttactacttttgattatttctcatttttgggaaaagaattcctaatgtgctactagaattccttcttcagttttaacgagtaattggataaaccctgagggaaaacggaggtagattcagcacctaacaatcctgtatgcttttgagatcacgtttagtgctatgtcctagtctagaatattttcatataccttgcagtaaaacgactttgtggcaggacagtctcttgaggggttttgtttctgtttcctaaatactcctaaataatatttctaatcagccattatgctggggcatctctgatcccagtaggtacctctgaatataccaggtgtctggagttagaagcccatagccctttcccagcctttttggtttttttaattgaacacatttcatctaagtaaagctcagttctttatcacaatttactgaccaaatacctagcaccagttcctgctgccactttttaaagtgccatatgactttctacgaacaggtaccttgctgtcttgacaaatcctaatgtcacgcctacagccccaacacaagctccagtcttcctcttcggcatgccctggaagcttcttggcctcagctccccttccccgctcagcaccctgttaggatcagtgtgtgtggatgggatagccctgggatggaaaggactagcctctactgatgcaaaaaaacaaaaagcaacacaaacgtttccttcttatagcacatgcacttccttacaatgacatgatttgtattatcctcacatgtgtttactactgctggggccttccttcatcctctgagggctattttgtactttctgcagcaatcagcttaataacaacacttattgcacctgtctctctctgagaacacggtgtgtctcgacacgtaccacgtacgtggaaacacaagagcccaccacttgaatttctaagaccatttcattctgaaacttcttatcaattacctaaatctcaacgaaaaacaatttactgaagccgactcccctccccatctccctctcaacctcaacccacctgcatgcatctcccccagaggaaacactgagggtaggggacaggaggctcaggacgcgccctctgaatcgagtgtttcttcttcacaagtcaccaagagaggacatgagggggaaagtcctttttgcccttctccaaaaaataaccttccacagagacaaactgtccttctatccacttttatcttttaataaatatcaaaaggaaaaagctgcaagggtgcaaagggcctgtgccagaagaaaacacacacagggaaaccgctttttttaatcaattgtagagaatagtcatttttaatctaaattagagaattgtgatacaatggcagtcctcaaaggcgtaacgagttcatctttctttcaccataggggttatagttggcttgtgctactctggaatcattttactgtttgtttttattatcttaagtgctaattaaaaaaaaaataaaattttaaaaaaacctgtagtttcattacctttttgaataatgtcatacaaaaaatgtatttgtttttttgtgctgtgagaattgatgtttgtagattaataatcattttgtttagaattacaaaatagtttttaaatattgtctgagaaaagccaaagttaatgcaacctagtggaaactgtaagaccatttgagtattgtttgttttattgatgcatttggattttgttgtttgatggaatttgagccaaaaaaaaaatacgcaggctttcctatttctacaactgattgtacttatgcattttgtaccagtggaactttttatactggagattaaaaaaaaaatggaaatttttgtggcttgctctggtgggcccctgacaatgactgatttcaagtttgatttcgggttgattgattgattgattgatagaaagaaagttgcttttcttttgagaattaaaaactttggcttgatttcttttttccctttgcttatatctagcattagaattttgtcttaaaataacagcggtaagtttcactttttattctgtattgtgcagttacacaataaggtaattagatttagaagtactcagtcactttaagtggataaatgtattagttaaaactttagggtttgcttttttgctgtttagatcaaagttttttctgattcttctgtcctcattgtgaacataaccgtgtagttgaaacagtcaaacttatttttgtaatgtatgttattgtgtgatgcagttttttgcttctgtctccaatattaaaccattttcctaata

SEQ ID NO: 123174 - DNA, 8044 bp, Homo sapiens
  Payload ID: 4190
  Gene Symbol: CELF2
  Gene Name: CUGBP, Elav-like family member 2
  Uniprot ID: O95319
  ENST ID: ENST00000417956
  CDS Start-End: 308-1780
aaaagggcggtggggcggggggcggggcagggagagggagagaaatccagcagacatctagctctgcctttctttcccagccacagccagggtagggctgataaggcgctgatgcgttgatggcagccttgcagagctagacctgcacttaacttgcagctgcctcccgagcctccaagatgtccacgccctgggtgacaggcggcagggcgctgccccgtgctcccccggctctgctcgacagcagcacgcagtgagagcctcgccgccgccgaggagcaactcatgtaacggcacagccaacaagatgaacggagctttggatcactcagaccaaccagacccagatgccattaagatgtttgtcggacagatcccccggtcatggtcggaaaaggagctgaaagaactttttgagccttacggagccgtctaccagatcaacgtcctccgggaccggagtcagaaccctccgcagagtaaaggttgttgtttcgtaacattttatacaagaaaagctgcacttgaggcccagaatgcactgcacaatattaaaactttacctgggatgcatcatcccattcagatgaaacctgcagatagtgaaaagtccaacgctgtggaagacagaaaattgttcataggaatggtatcgaagaaatgtaatgagaacgacatcagggtgatgttctctccatttggccagatagaagaatgccggatcctccggggacctgatgggctgagtcgaggctgtgcgtttgtcacattttctacaagggcaatggcacagaatgcaatcaaagccatgcatcagtctcagaccatggagggctgctcttcacctatcgtggtgaagtttgctgacactcagaaggacaaagagcaaaggcgcctccagcagcagctcgctcagcagatgcagcagctcaacactgccacctgggggaacctgacagggctgggcggactgaccccacagtatctggcgctcctgcagcaggccacctcctccagcaacctgggtgcgttcagcggcattcaacaaatggcaggcatgaatgctttacagttgcagaacctggcgacgctggctgctgctgcagctgcggcccagacctcagccaccagcaccaatgcaaaccctctctctaccacgagcagcgccctgggagccctcacgagtcccgtggctgcttcaacccccaactccactgctggtgcagccatgaactccttgacctctctcgggactctgcaaggactggctggagccactgttggactgaataatattaatgcactagcagttgctcaaatgctctcaggtatggcggctctgaatggaggacttggcgccacaggcttgacgaatggcacggctggcaccatggacgccctcacccaggcctactcaggaattcaacagtacgcagccgccgcgctgcccactctgtacagccagagcctgctgcagcagcagagcgctgcaggcagccagaaggaaggtccagagggggcaaacctctttatttaccaccttccacaggaatttggagaccaggacattctgcagatgttcatgccttttggaaatgttatctctgctaaagtcttcattgacaaacagaccaatctgagcaagtgctttggttttgttagctacgacaatccagtctctgcacaagctgctatccaagctatgaatggctttcagatcggcatgaaacgcttgaaggtgcagctgaagcgttccaaaaacgacagcaaaccttactgatcctaaccccagaggctccctgctctcattttagctttcttaggacatcttcatgcccgttagttcatcgtttgcctagcatgtccctgtggcgtctcaaaaaaaagtttcatcgtcccgtcattgtttctgatgtctttctgacctcacatcatatttggttctcctactgacctttgatctagtttgacctttgaaatttgcatgtgacctcatctagctatgaattctgggaagtcaatgtgaaaaacattgctgcattcatgcaagactgaaatttattattagacaaattcattatagaaaaaacctgtggcaaaaacgtttctttcttattttttttcttttcctaaaacagacttgaaagtattatacagggattggcattcttcccggtcactggtaacaatagcaatatgtgtccagggacacagaatgttggtttctaacagactacttccaaaaacagtttgagaaaaaaactgtctgattttaagtctctagaggtctgtaatagtttttacatttttcaggcagtgtaaagttttttgataaggccattttaggtggctcactttctcattaagatatatatatagaaccactttttgtagattagtataagaaaaatatttaccctgttttggggcaaatgctacctatttgtgtcaccttttgctgaactcacagttagacaatccatggtttaatgcacatgaaattacctatattttatactgtttcaatgtacaggagaaaggttactgtaaactgtgttatgttggtgcttctgtgaattaagttgtggtttcatcatgagtcttaatgttctttgttgataagacaagtttagaattggtttacttaatacaaaaaaaaaaaaaagaatttcaaaaaaaaaagttgtttgcttaaaaaaaatttcatgtgagggaaaaaaaaaaaacctattccagaataagttttgtgttggcttgtgaagcattgatgtcattttttttaattgtggactatttagatgtgtttgtgttcagcaaaatgtgatgtttttttcttttaaagaaaaaaagtgaaaatatatagtgccaaattccaaaggtacttccttcctagagcttcagtgtgtttcttgtgagaagtaatttgataacatgggtattttattatgtgttttgtataaatccctaatatttaaaaaaaaaaacaaaacaaaaaaaggttacaaagtttgttaacttgctatcctgtggtcttgttgcctgaaattgttattgtttgttatttctctctgatgttttttgtaagacattgtataagtgcccatgtcccacttttttaaccactccgcacatcagtgctgtgaaggcaacctcaccatgtattttcttcataatctatggaaacctctaaggtgagaaagttttgaacttttaaccctttctacccagagctatctggaatgttgatgactttttatactgtcatgatttgagtttgttttggggtgtttccaatttggatttttttccctgcatctatcctctaagttgtttcggtttgactactttgttctttggttaagatccaaaagaaaacagaaaacaattccacgaggccaatctaaagggaaaaaatcctacactacttttactacttttgattatttctcatttttgggaaaagaattcctaatgtgctactagaattccttcttcagttttaacgagtaattggataaaccctgagggaaaacggaggtagattcagcacctaacaatcctgtatgcttttgagatcacgtttagtgctatgtcctagtctagaatattttcatataccttgcagtaaaacgactttgtggcaggacagtctcttgaggggttttgtttctgtttcctaaatactcctaaataatatttctaatcagccattatgctggggcatctctgatcccagtaggtacctctgaatataccaggtgtctggagttagaagcccatagccctttcccagcctttttggtttttttaattgaacacatttcatctaagtaaagctcagttctttatcacaatttactgaccaaatacctagcaccagttcctgctgccactttttaaagtgccatatgactttctacgaacaggtaccttgctgtcttgacaaatcctaatgtcacgcctacagccccaacacaagctccagtcttcctcttcggcatgccctggaagcttcttggcctcagctccccttccccgctcagcaccctgttaggatcagtgtgtgtggatgggatagccctgggatggaaaggactagcctctactgatgcaaaaaaacaaaaagcaacacaaacgtttccttcttatagcacatgcacttccttacaatgacatgatttgtattatcctcacatgtgtttactactgctggggccttccttcatcctctgagggctattttgtactttctgcagcaatcagcttaataacaacacttattgcacctgtctctctctgagaacacggtgtgtctcgacacgtaccacgtacgtggaaacacaagagcccaccacttgaatttctaagaccatttcattctgaaacttcttatcaattacctaaatctcaacgaaaaacaatttactgaagccgactcccctccccatctccctctcaacctcaacccacctgcatgcatctcccccagaggaaacactgagggtaggggacaggaggctcaggacgcgccctctgaatcgagtgtttcttcttcacaagtcaccaagagaggacatgagggggaaagtcctttttgcccttctccaaaaaataaccttccacagagacaaactgtccttctatccacttttatcttttaataaatatcaaaaggaaaaagctgcaagggtgcaaagggcctgtgccagaagaaaacacacacagggaaaccgctttttttaatcaattgtagagaatagtcatttttaatctaaattagagaattgtgatacaatggcagtcctcaaaggcgtaacgagttcatctttctttcaccataggggttatagttggcttgtgctactctggaatcattttactgtttgtttttattatcttaagtgctaattaaaaaaaaaataaaattttaaaaaaacctgtagtttcattacctttttgaataatgtcatacaaaaaatgtatttgtttttttgtgctgtgagaattgatgtttgtagattaataatcattttgtttagaattacaaaatagtttttaaatattgtctgagaaaagccaaagttaatgcaacctagtggaaactgtaagaccatttgagtattgtttgttttattgatgcatttggattttgttgtttgatggaatttgagccaaaaaaaaaatacgcaggctttcctatttctacaactgattgtacttatgcattttgtaccagtggaactttttatactggagattaaaaaaaaaatggaaatttttgtggcttgctctggtgggcccctgacaatgactgatttcaagtttgatttcgggttgattgattgattgattgatagaaagaaagttgcttttcttttgagaattaaaaactttggcttgatttcttttttccctttgcttatatctagcattagaattttgtcttaaaataacagcggtaagtttcactttttattctgtattgtgcagttacacaataaggtaattagatttagaagtactcagtcactttaagtggataaatgtattagttaaaactttagggtttgcttttttgctgtttagatcaaagttttttctgattcttctgtcctcattgtgaacataaccgtgtagttgaaacagtcaaacttatttttgtaatgtatgttattgtgtgatgcagttttttgcttctgtctccaatattaaaccattttcctaatacttgtttctctctctgcgtgttgtattgttggtagtcattatatgttggtgatacatctgcacacctcactgtttcacgtatctgtttttttctctatgttgtgtaaaaagatacagtcgattccacttaagtgaatatctgatttggggaagaggaaactgcacagcagccacctttgatttatgtacaaccgcccacttgaactcctgcttccaagatttatacacttttttcctacagttcacctcagtaactgcctttggggttggatttgccaaggtgttttacggtcttttgaccacacaggttaatttccccttctctcccctccctcatgagtctatccacgcagttcttaacatacattccaaactgctgcggggtttcctctccacacccacgaggccaaacccgcatcattacagtccaactcttcttagacactaatcactttctaaaagaagtgagttctccagggaagaaaaatcaacttagccagtgaaaagggttaaacttaagtctattatttgttgccctcaatcaaaagatatgtatagaaaagtcatttaaattatttatttctacaagctaattgaatccaggagcagctttaattattaacactaacggaagagaaaagaagtatttccaagggctcaaatggaagctgtactcagtccggtggaggcagggggaggtaaagtttctcacactcaagtcgtcttcatagtttactgtccttttccaaacaaaagctaataacgccatacgcatccacacactccctcctggatgaacctaagtctcgtccccactgtcaccccaaggccagttatcaaaaactgttccttctctgccctcaaagactgaagccgcaggccctgttctgcctctgctcaggaatctgattgctcttaaagtgctcttacaagattccgtcgatgtttgctccctctgtcttatctctccttccagtattttcagacgcacaagctctgactcaggccacccagcacctggcagccttcctctgcgtgccagtgaaatctctcccagtaggtgctcaggctcttcaccctctcgttgcagcagcccctctggcccgagattgtattttctagtctgctcaagaacagaggggcctggcgaggtggaggaagggaggctccctccccggggctggccgcctcagtgatggtgatgccaccagctccagcctgcacggatggagctcacttcctaccatcacttctgctttcagtctcctcatagccttcggcagtctcctctgaaaacacactgcctacgttagtgggaaaggatggctaagggtgtgatttctttttattagggaggtgggagggggatgttgggaggcatggggggtgattaaattatcatttccaaggtgcaagtgtttatttttcaaatctataagtacatagttccaccattttggcacaagacaaaatactcatgctaagcaaaggaagagaaagacaaagccagtttttgttgcttttctaaagcaacaaataattctccaaagaaggggatgaaaatgctagttcctttaagcacttactgactgtaaagttggtccctgcttaaattcatacccatagttttgagtcggtatgacaccactgcagtgtgagcaaggtgaatccgtgtgccatgcatggaccaccttgggataccgcagcaccatcaacatccgccttgctgatggaagccacacacgctgcccagcccacagcagtcgcacgcagccgatgggctcggactcttagctggcaggctaggacacacagtgaacattaatgtactgtgaatcgttcctgataagtgaataaaacattgtgaccaaacaatcagcttattcacttatcaggaatcgactgttctgctaatttgctgttgttgtttttcatctctgttgtagttcactatttttgctgtgttctgttttctcctctcatgcttgggcaaatcactgggaatattatcttcatgtgaccatgaaacgtttctattgagtgaaaatgatatcttaacaaaatctatgcacttgctatcaggaacacaatactggatgtgtcttatatatattgaactatatagtactcgatttcttaaataaagcttaagaaaggactctgttgtgtgtaaagttaatgtgattatttttcaaagcagtgtttctaaggggtatttttgttcttttaagtcttgagtgatacaggatatttttcattaaaattatatcactggctttatgacttaatattcaataaattgactttggaaacaaaa

SEQ ID NO: 123175 - DNA, 6894 bp, Homo sapiens
  Payload ID: 4190
  Gene Symbol: CELF2
  Gene Name: CUGBP, Elav-like family member 2
  Uniprot ID: O95319
  ENST ID: ENST00000416382
  CDS Start-End: 68-1594
cgactgtggcattgatgtttgagcatacttctgaactggcttttgttgagactatcagtatagaagcatgcgctgtcccaaatccgctgttactatgagaaatgaagagctgcttttaagtaacggcacagccaacaagatgaacggagctttggatcactcagaccaaccagacccagatgccattaagatgtttgtcggacagatcccccggtcatggtcggaaaaggagctgaaagaactttttgagccttacggagccgtctaccagatcaacgtcctccgggaccggagtcagaaccctccgcagagtaaaggttgttgtttcgtaacattttatacaagaaaagctgcacttgaggcccagaatgcactgcacaatattaaaactttacctgggatgcatcatcccattcagatgaaacctgcagatagtgaaaagtccaacgctgtggaagacagaaaattgttcataggaatggtatcgaagaaatgtaatgagaacgacatcagggtgatgttctctccatttggccagatagaagaatgccggatcctccggggacctgatgggctgagtcgaggctgtgcgtttgtcacattttctacaagggcaatggcacagaatgcaatcaaagccatgcatcagtctcagaccatggagggctgctcttcacctatcgtggtgaagtttgctgacactcagaaggacaaagagcaaaggcgcctccagcagcagctcgctcagcagatgcagcagctcaacactgccacctgggggaacctgacagggctgggcggactgaccccacagtatctggcgctcctgcagcaggccacctcctccagcaacctgggtgcgttcagcggcattcaacaaatggcaggcatgaatgctttacagttgcagaacctggcgacgctggctgctgctgcagctgcggcccagacctcagccaccagcaccaatgcaaaccctctctctaccacgagcagcgccctgggagccctcacgagtcccgtggctgcttcaacccccaactccactgctggtgcagccatgaactccttgacctctctcgggactctgcaaggactggctggagccactgttggactgaataatattaatgcactagcaggtatggcggctctgaatggaggacttggcgccacaggcttgacgaatggcacggctggcaccatggacgccctcacccaggcctactcaggaattcaacagtacgcagccgccgcgctgcccactctgtacagccagagcctgctgcagcagcagagcgctgcaggcagccagaaggaaggtccagagggggcaaacctctttatttaccaccttccacaggaatttggagaccaggacattctgcagatgttcatgccttttggaaatgttatctctgctaaagtcttcattgacaaacagaccaatctgagcaagtgctttggttttgttagctacgacaatccagtctctgcacaagctgctatccaagctatgaatggctttcagatcggcatgaaacgcttgaaggtgcagctgaagcgttccaaaaacgacagcaaaccttactgatcctaaccccagaggctccctgctctcattttagctttcttagggtaagtcccacgagccagcctgtctcaacagggaaggcagaggaggaccacattgccaacttttaccaagagagacggttatttttacaataaggcctccatgtccccacccacttcccctacccagtttgccataattaaaacttgggctactttgtttctattgagtaattcctcctccagttgtgccactgtattctcctttgttttgcgatttgaatctccttttacctttttttttaatttttttcatttttgcttttttttaaagagaagcatatacacaaataaatggcatcttgagaatttaaaaggcaaacaaacaaacgctaatgtgcaattctaactctgaaaccactggtgccccgagagcactgcctggagaattcacccctccttgcccggcgcccgcccccggagggagggcccggtgcttagaggttaacttggtggcctaggagagggagaagccaggagaagcacttactccaaccacacgtctttccactacatcggcttgttttactaagtaggattttattttagggttcaaagaaacatgacatttattggtcaaaatattacactggttgtctattttgttattgttttattttagtttttagaaaggattaatgtacaaaaagatttagagatctgtttcttaaagctacagggtttaaaaaataaaaatgagtgaaaatacttgatgtttcttgaaagataaatttaataataataaataaatacataaatacataaataaaaaagaaagccacaggcctgtaaattttatttgtaaaaaagcatttctatttttatacaaaatttttactgcctcagaaataatggaagttatttattgcctattgttaacttattgggtacctaaagagcagttctctgtctagctagaaccttctgaagtagtctctagaggaattgttctaggaatgggctttttttcaccgttgaaccctagacctgaagttcatgctttatcctctcgttgtttgtatctgtctgattattttgtttgtaacttccattatctagtttacagttcagtcgtctgactttccccgtatgtcacatttgttgaaactggaccttctccccctgtccctcaccccaaaacacccggaatccatcccgtttcgctctctccagatggattctcttggggtttcattgtgctgtggataaggagtgtaagaaatgcaaattatgtgaatggctcggagactccctaatgacctaagatttgcattagtttttctcctgcacccttaaaagtgattttgttgccgctgcatagattctgtgtaactttttactcttccttgttttttccctagacatcttcatgcccgttagttcatcgtttgcctagcatgtccctgtggcgtctcaaaaaaaagtttcatcgtcccgtcattgtttctgatgtctttctgacctcacatcatatttggttctcctactgacctttgatctagtttgacctttgaaatttgcatgtgacctcatctagctatgaattctgggaagtcaatgtgaaaaacattgctgcattcatgcaagactgaaatttattattagacaaattcattatagaaaaaacctgtggcaaaaacgtttctttcttattttttttcttttcctaaaacagacttgaaagtattatacagggattggcattcttcccggtcactggtaacaatagcaatatgtgtccagggacacagaatgttggtttctaacagactacttccaaaaacagtttgagaaaaaaactgtctgattttaagtctctagaggtctgtaatagtttttacatttttcaggcagtgtaaagttttttgataaggccattttaggtggctcactttctcattaagatatatatatagaaccactttttgtagattagtataagaaaaatatttaccctgttttggggcaaatgctacctatttgtgtcaccttttgctgaactcacagttagacaatccatggtttaatgcacatgaaattacctatattttatactgtttcaatgtacaggagaaaggttactgtaaactgtgttatgttggtgcttctgtgaattaagttgtggtttcatcatgagtcttaatgttctttgttgataagacaagtttagaattggtttacttaatacaaaaaaaaaaaaaagaatttcaaaaaaaaaagttgtttgcttaaaaaaaatttcatgtgagggaaaaaaaaaaaacctattccagaataagttttgtgttggcttgtgaagcattgatgtcattttttttaattgtggactatttagatgtgtttgtgttcagcaaaatgtgatgtttttttcttttaaagaaaaaaagtgaaaatatatagtgccaaattccaaaggtacttccttcctagagcttcagtgtgtttcttgtgagaagtaatttgataacatgggtattttattatgtgttttgtataaatccctaatatttaaaaaaaaaaacaaaacaaaaaaaggttacaaagtttgttaacttgctatcctgtggtcttgttgcctgaaattgttattgtttgttatttctctctgatgttttttgtaagacattgtataagtgcccatgtcccacttttttaaccactccgcacatcagtgctgtgaaggcaacctcaccatgtattttcttcataatctatggaaacctctaaggtgagaaagttttgaacttttaaccctttctacccagagctatctggaatgttgatgactttttatactgtcatgatttgagtttgttttggggtgtttccaatttggatttttttccctgcatctatcctctaagttgtttcggtttgactactttgttctttggttaagatccaaaagaaaacagaaaacaattccacgaggccaatctaaagggaaaaaatcctacactacttttactacttttgattatttctcatttttgggaaaagaattcctaatgtgctactagaattccttcttcagttttaacgagtaattggataaaccctgagggaaaacggaggtagattcagcacctaacaatcctgtatgcttttgagatcacgtttagtgctatgtcctagtctagaatattttcatataccttgcagtaaaacgactttgtggcaggacagtctcttgaggggttttgtttctgtttcctaaatactcctaaataatatttctaatcagccattatgctggggcatctctgatcccagtaggtacctctgaatataccaggtgtctggagttagaagcccatagccctttcccagcctttttggtttttttaattgaacacatttcatctaagtaaagctcagttctttatcacaatttactgaccaaatacctagcaccagttcctgctgccactttttaaagtgccatatgactttctacgaacaggtaccttgctgtcttgacaaatcctaatgtcacgcctacagccccaacacaagctccagtcttcctcttcggcatgccctggaagcttcttggcctcagctccccttccccgctcagcaccctgttaggatcagtgtgtgtggatgggatagccctgggatggaaaggactagcctctactgatgcaaaaaaacaaaaagcaacacaaacgtttccttcttatagcacatgcacttccttacaatgacatgatttgtattatcctcacatgtgtttactactgctggggccttccttcatcctctgagggctattttgtactttctgcagcaatcagcttaataacaacacttattgcacctgtctctctctgagaacacggtgtgtctcgacacgtaccacgtacgtggaaacacaagagcccaccacttgaatttctaagaccatttcattctgaaacttcttatcaattacctaaatctcaacgaaaaacaatttactgaagccgactcccctccccatctccctctcaacctcaacccacctgcatgcatctcccccagaggaaacactgagggtaggggacaggaggctcaggacgcgccctctgaatcgagtgtttcttcttcacaagtcaccaagagaggacatgagggggaaagtcctttttgcccttctccaaaaaataaccttccacagagacaaactgtccttctatccacttttatcttttaataaatatcaaaaggaaaaagctgcaagggtgcaaagggcctgtgccagaagaaaacacacacagggaaaccgctttttttaatcaattgtagagaatagtcatttttaatctaaattagagaattgtgatacaatggcagtcctcaaaggcgtaacgagttcatctttctttcaccataggggttatagttggcttgtgctactctggaatcattttactgtttgtttttattatcttaagtgctaattaaaaaaaaaataaaattttaaaaaaacctgtagtttcattacctttttgaataatgtcatacaaaaaatgtatttgtttttttgtgctgtgagaattgatgtttgtagattaataatcattttgtttagaattacaaaatagtttttaaatattgtctgagaaaagccaaagttaatgcaacctagtggaaactgtaagaccatttgagtattgtttgttttattgatgcatttggattttgttgtttgatggaatttgagccaaaaaaaaaatacgcaggctttcctatttctacaactgattgtacttatgcattttgtaccagtggaactttttatactggagattaaaaaaaaaatggaaatttttgtggcttgctctggtgggcccctgacaatgactgatttcaagtttgatttcgggttgattgattgattgattgatagaaagaaagttgcttttcttttgagaattaaaaactttggcttgatttcttttttccctttgcttatatctagcattagaattttgtcttaaaataacagcggtaagtttcactttttattctgtattgtgcagttacacaataaggtaattagatttagaagtactcagtcactttaagtggataaatgtattagttaaaactttagggtttgcttttttgctgtttagatcaaagttttttctgattcttctgtcctcattgtgaacataaccgtgtagttgaaacagtcaaacttatttttgtaatgtatgttattgtgtgatgcagttttttgcttctgtctccaatattaaaccattttcc

SEQ ID NO: 123176 - DNA, 7982 bp, Homo sapiens
  Payload ID: 4190
  Gene Symbol: CELF2
  Gene Name: CUGBP, Elav-like family member 2
  ENST ID: ENST00000542579
  CDS Start-End: 161-1726
ggggattggcggagcgcgaggagagaatgtgacaagtgccggctcggcggccgccgggggaggccgcgcgcacctgtccctgcccgtctcgcgccgcccgcggccgctcggacgcgcgcagagccgccccccgccgctgccgccgcgtgcgcccgcgaacatgacttctgccttcaagctggatttcctcccggacatgatggtcgagggccgcctgctcgttcctgacagaattaacggcacagccaacaagatgaacggagctttggatcactcagaccaaccagacccagatgccattaagatgtttgtcggacagatcccccggtcatggtcggaaaaggagctgaaagaactttttgagccttacggagccgtctaccagatcaacgtcctccgggaccggagtcagaaccctccgcagagtaaaggttgttgtttcgtaacattttatacaagaaaagctgcacttgaggcccagaatgcactgcacaatattaaaactttacctgggatgcatcatcccattcagatgaaacctgcagatagtgaaaagtccaacgctgtggaagacagaaaattgttcataggaatggtatcgaagaaatgtaatgagaacgacatcagggtgatgttctctccatttggccagatagaagaatgccggatcctccggggacctgatgggctgagtcgaggctgtgcgtttgtcacattttctacaagggcaatggcacagaatgcaatcaaagccatgcatcagtctcagaccatggagggctgctcttcacctatcgtggtgaagtttgctgacactcagaaggacaaagagcaaaggcgcctccagcagcagctcgctcagcagatgcagcagctcaacactgccacctgggggaacctgacagggctgggcggactgaccccacagtatctggcgctcctgcagcaggccacctcctccagcaacctgggtgcgttcagcggcattcaacaaatggcaggcatgaatgctttacagttgcagaacctggcgacgctggctgctgctgcagctgcggcccagacctcagccaccagcaccaatgcaaaccctctctctaccacgagcagcgccctgggagccctcacgagtcccgtggctgcttcaacccccaactccactgctggtgcagccatgaactccttgacctctctcgggactctgcaaggactggctggagccactgttggactgaataatattaatgcactagcagttgctcaaatgctctcaggtatggcggctctgaatggaggacttggcgccacaggcttgacgaatggcacggctggcaccatggacgccctcacccaggcctactcaggaattcaacagtacgcagccgccgcgctgcccactctgtacagccagagcctgctgcagcagcagagcgctgcaggcagccagaaggaaggtccagagggggcaaacctctttatttaccaccttccacaggaatttggagaccaggacattctgcagatgttcatgccttttggaaatgttatctctgctaaagtcttcattgacaaacagaccaatctgagcaagtgctttggttttgttagctacgacaatccagtctctgcacaagctgctatccaagctatgaatggctttcagatcggcatgaaacgcttgaaggtgcagctgaagcgttccaaaaacgacagcaaaccttactgatcctaaccccagaggctccctgctctcattttagctttcttaggacatcttcatgcccgttagttcatcgtttgcctagcatgtccctgtggcgtctcaaaaaaaagtttcatcgtcccgtcattgtttctgatgtctttctgacctcacatcatatttggttctcctactgacctttgatctagtttgacctttgaaatttgcatgtgacctcatctagctatgaattctgggaagtcaatgtgaaaaacattgctgcattcatgcaagactgaaatttattattagacaaattcattatagaaaaaacctgtggcaaaaacgtttctttcttattttttttcttttcctaaaacagacttgaaagtattatacagggattggcattcttcccggtcactggtaacaatagcaatatgtgtccagggacacagaatgttggtttctaacagactacttccaaaaacagtttgagaaaaaaactgtctgattttaagtctctagaggtctgtaatagtttttacatttttcaggcagtgtaaagttttttgataaggccattttaggtggctcactttctcattaagatatatatatagaaccactttttgtagattagtataagaaaaatatttaccctgttttggggcaaatgctacctatttgtgtcaccttttgctgaactcacagttagacaatccatggtttaatgcacatgaaattacctatattttatactgtttcaatgtacaggagaaaggttactgtaaactgtgttatgttggtgcttctgtgaattaagttgtggtttcatcatgagtcttaatgttctttgttgataagacaagtttagaattggtttacttaatacaaaaaaaaaaaaaagaatttcaaaaaaaaaagttgtttgcttaaaaaaaatttcatgtgagggaaaaaaaaaaaacctattccagaataagttttgtgttggcttgtgaagcattgatgtcattttttttaattgtggactatttagatgtgtttgtgttcagcaaaatgtgatgtttttttcttttaaagaaaaaaagtgaaaatatatagtgccaaattccaaaggtacttccttcctagagcttcagtgtgtttcttgtgagaagtaatttgataacatgggtattttattatgtgttttgtataaatccctaatatttaaaaaaaaaaacaaaacaaaaaaaggttacaaagtttgttaacttgctatcctgtggtcttgttgcctgaaattgttattgtttgttatttctctctgatgttttttgtaagacattgtataagtgcccatgtcccacttttttaaccactccgcacatcagtgctgtgaaggcaacctcaccatgtattttcttcataatctatggaaacctctaaggtgagaaagttttgaacttttaaccctttctacccagagctatctggaatgttgatgactttttatactgtcatgatttgagtttgttttggggtgtttccaatttggatttttttccctgcatctatcctctaagttgtttcggtttgactactttgttctttggttaagatccaaaagaaaacagaaaacaattccacgaggccaatctaaagggaaaaaatcctacactacttttactacttttgattatttctcatttttgggaaaagaattcctaatgtgctactagaattccttcttcagttttaacgagtaattggataaaccctgagggaaaacggaggtagattcagcacctaacaatcctgtatgcttttgagatcacgtttagtgctatgtcctagtctagaatattttcatataccttgcagtaaaacgactttgtggcaggacagtctcttgaggggttttgtttctgtttcctaaatactcctaaataatatttctaatcagccattatgctggggcatctctgatcccagtaggtacctctgaatataccaggtgtctggagttagaagcccatagccctttcccagcctttttggtttttttaattgaacacatttcatctaagtaaagctcagttctttatcacaatttactgaccaaatacctagcaccagttcctgctgccactttttaaagtgccatatgactttctacgaacaggtaccttgctgtcttgacaaatcctaatgtcacgcctacagccccaacacaagctccagtcttcctcttcggcatgccctggaagcttcttggcctcagctccccttccccgctcagcaccctgttaggatcagtgtgtgtggatgggatagccctgggatggaaaggactagcctctactgatgcaaaaaaacaaaaagcaacacaaacgtttccttcttatagcacatgcacttccttacaatgacatgatttgtattatcctcacatgtgtttactactgctggggccttccttcatcctctgagggctattttgtactttctgcagcaatcagcttaataacaacacttattgcacctgtctctctctgagaacacggtgtgtctcgacacgtaccacgtacgtggaaacacaagagcccaccacttgaatttctaagaccatttcattctgaaacttcttatcaattacctaaatctcaacgaaaaacaatttactgaagccgactcccctccccatctccctctcaacctcaacccacctgcatgcatctcccccagaggaaacactgagggtaggggacaggaggctcaggacgcgccctctgaatcgagtgtttcttcttcacaagtcaccaagagaggacatgagggggaaagtcctttttgcccttctccaaaaaataaccttccacagagacaaactgtccttctatccacttttatcttttaataaatatcaaaaggaaaaagctgcaagggtgcaaagggcctgtgccagaagaaaacacacacagggaaaccgctttttttaatcaattgtagagaatagtcatttttaatctaaattagagaattgtgatacaatggcagtcctcaaaggcgtaacgagttcatctttctttcaccataggggttatagttggcttgtgctactctggaatcattttactgtttgtttttattatcttaagtgctaattaaaaaaaaaataaaattttaaaaaaacctgtagtttcattacctttttgaataatgtcatacaaaaaatgtatttgtttttttgtgctgtgagaattgatgtttgtagattaataatcattttgtttagaattacaaaatagtttttaaatattgtctgagaaaagccaaagttaatgcaacctagtggaaactgtaagaccatttgagtattgtttgttttattgatgcatttggattttgttgtttgatggaatttgagccaaaaaaaaaatacgcaggctttcctatttctacaactgattgtacttatgcattttgtaccagtggaactttttatactggagattaaaaaaaaaatggaaatttttgtggcttgctctggtgggcccctgacaatgactgatttcaagtttgatttcgggttgattgattgattgattgatagaaagaaagttgcttttcttttgagaattaaaaactttggcttgatttcttttttccctttgcttatatctagcattagaattttgtcttaaaataacagcggtaagtttcactttttattctgtattgtgcagttacacaataaggtaattagatttagaagtactcagtcactttaagtggataaatgtattagttaaaactttagggtttgcttttttgctgtttagatcaaagttttttctgattcttctgtcctcattgtgaacataaccgtgtagttgaaacagtcaaacttatttttgtaatgtatgttattgtgtgatgcagttttttgcttctgtctccaatattaaaccattttcctaatacttgtttctctctctgcgtgttgtattgttggtagtcattatatgttggtgatacatctgcacacctcactgtttcacgtatctgtttttttctctatgttgtgtaaaaagatacagtcgattccacttaagtgaatatctgatttggggaagaggaaactgcacagcagccacctttgatttatgtacaaccgcccacttgaactcctgcttccaagatttatacacttttttcctacagttcacctcagtaactgcctttggggttggatttgccaaggtgttttacggtcttttgaccacacaggttaatttccccttctctcccctccctcatgagtctatccacgcagttcttaacatacattccaaactgctgcggggtttcctctccacacccacgaggccaaacccgcatcattacagtccaactcttcttagacactaatcactttctaaaagaagtgagttctccagggaagaaaaatcaacttagccagtgaaaagggttaaacttaagtctattatttgttgccctcaatcaaaagatatgtatagaaaagtcatttaaattatttatttctacaagctaattgaatccaggagcagctttaattattaacactaacggaagagaaaagaagtatttccaagggctcaaatggaagctgtactcagtccggtggaggcagggggaggtaaagtttctcacactcaagtcgtcttcatagtttactgtccttttccaaacaaaagctaataacgccatacgcatccacacactccctcctggatgaacctaagtctcgtccccactgtcaccccaaggccagttatcaaaaactgttccttctctgccctcaaagactgaagccgcaggccctgttctgcctctgctcaggaatctgattgctcttaaagtgctcttacaagattccgtcgatgtttgctccctctgtcttatctctccttccagtattttcagacgcacaagctctgactcaggccacccagcacctggcagccttcctctgcgtgccagtgaaatctctcccagtaggtgctcaggctcttcaccctctcgttgcagcagcccctctggcccgagattgtattttctagtctgctcaagaacagaggggcctggcgaggtggaggaagggaggctccctccccggggctggccgcctcagtgatggtgatgccaccagctccagcctgcacggatggagctcacttcctaccatcacttctgctttcagtctcctcatagccttcggcagtctcctctgaaaacacactgcctacgttagtgggaaaggatggctaagggtgtgatttctttttattagggaggtgggagggggatgttgggaggcatggggggtgattaaattatcatttccaaggtgcaagtgtttatttttcaaatctataagtacatagttccaccattttggcacaagacaaaatactcatgctaagcaaaggaagagaaagacaaagccagtttttgttgcttttctaaagcaacaaataattctccaaagaaggggatgaaaatgctagttcctttaagcacttactgactgtaaagttggtccctgcttaaattcatacccatagttttgagtcggtatgacaccactgcagtgtgagcaaggtgaatccgtgtgccatgcatggaccaccttgggataccgcagcaccatcaacatccgccttgctgatggaagccacacacgctgcccagcccacagcagtcgcacgcagccgatgggctcggactcttagctggcaggctaggacacacagtgaacattaatgtactgtgaatcgttcctgataagtgaataaaacattgtgaccaaacaatcagcttattcacttatcaggaatcgactgttctgctaatttgctgttgttgtttttcatctctgttgtagttcactatttttgctgtgttctgttttctcctctcatgcttgggcaaatcactgggaatattatcttcatgtgaccatgaaacgtttctattgagtgaaaatgatatcttaacaaaatctatgcacttgctatcaggaacacaatactggatgtgtcttatatatattgaactatatagtactcgatttcttaaataaagcttaagaaaggactctgttgtgtgtaaagttaatgtgattatttttcaaagcagtgtttctaaggggtatttttgttcttttaagtcttgagtgatacaggatatttttcattaaaattatatcactggctttatgacttaatattcaataaattgactttgg

SEQ ID NO: 123177 - DNA, 1549 bp, Homo sapiens
  Payload ID: 4190
  Gene Symbol: CELF2
  Gene Name: CUGBP, Elav-like family member 2
  ENST ID: ENST00000609870
  CDS Start-End: 22-234
agtaacggcacagccaacaagatgaacggagctttggatcactcagaccaaccagacccagatgccattaagatgtttgtcggacagatcccccggtcatggtcggaaaaggagctgaaagaactttttgagccttacggagccgtctaccagatcaacgtcctccgggaccggagtcagaaccctccgcagagtaaagatgcatcatcccattcagatgaaacctgcagatagtgaaaagtccaacgctgtggaagacagaaaattgttcataggaatggtatcgaagaaatgtaatgagaacgacatcagggtgatgttctctccatttggccagatagaagaatgccggatcctccggggacctgatgggctgagtcgagggctgctcttcacctatcgtggtgaagtttgctgacactcagaaggacaaagagcaaaggcgcctccagcagcagctcgctcagcagatgcagcagctcaacactgccacctgggggaacctgacagggctgggcggactgaccccacagtatctggcgctcctgcagcaggccacctcctccagcaacctgggtgcgttcagcggcattcaacaaatggcaggcatgaatgctttacagttgcagaacctggcgacgctggctgctgctgcagctgcggcccagacctcagccaccagcaccaatgcaaaccctctctctaccacgagcagcgccctgggagccctcacgagtcccgtggctgcttcaacccccaactccactgctggtgcagccatgaactccttgacctctctcgggactctgcaaggactggctggagccactgttggactgaataatattaatgcactagcaggtatggcggctctgaatggaggacttggcgccacaggcttgacgaatggcacggctggcaccatggacgccctcacccaggcctactcaggaattcaacagtacgcagccgccgcgctgcccactctgtacagccagagcctgctgcagcagcagagcgctgcaggcagccagaaggaaggtccagagggggcaaacctctttatttaccaccttccacaggaatttggagaccaggacattctgcagatgttcatgccttttggaaatgttatctctgctaaagtcttcattgacaaacagaccaatctgagcaagtgctttggttttgttagctacgacaatccagtctctgcacaagctgctatccaagctatgaatggctttcagatcggcatgaaacgcttgaaggtgcagctgaagcgttccaaaaacgacagcaaaccttactgatcctaaccccagaggctccctgctctcattttagctttcttagggtaagtcccacgagccagcctgtctcaacagggaaggcagaggaggaccacattgccaacttttaccaagagagacggttatttttacaataaggcctccatgtccccacccacttcccctacccagtttgccataattaaaacttgggctactttgtttctattgagtaattcctcctccagttgtgccac

SEQ ID NO: 123178 - DNA, 2210 bp, Homo sapiens
  Payload ID: 4190
  Gene Symbol: CELF2
  Gene Name: CUGBP, Elav-like family member 2
  ENST ID: ENST00000609692
  CDS Start-End: 22-1344
agtaacggcacagccaacaagatgaacggagctttggatcactcagaccaaccagacccagatgccattaagatgtttgtcggacagatcccccggtcatggtcggaaaaggagctgaaagaactttttgagccttacggagccgtctaccagatcaacgtcctccgggaccggagtcagaaccctccgcagagtaaaggttgttgtttcgtaacattttatacaagaaaagctgcacttgaggcccagaatgcactgcacaatattaaaactttacctgggatgcatcatcccattcagatgaaacctgcagatagtgaaaagtccaacgctgtggaagacagaaaattgttcataggaatggtatcgaagaaatgtaatgagaacgacatcagggtgatgttctctccatttggccagatagaagaatgccggatcctccggggacctgatgggctgagtcgaggctgtgcgtttgtcacattttctacaagggcaatggcacagaatgcaatcaaagccatgcatcagtctcagaccatggagggctgctcttcacctatcgtggtgaagtttgctgacactcagaaggacaaagagcaaaggcgcctccagcagcagctcgctcagcagatgcagcagctcaacactgccacctgggggaacctgacagggctgggcggactgaccccacagtatctggcgctcctgcagcaggccacctcctccagcaacctgggtgcgttcagcggcattcaacaaatggcaggcatgaatgctttacagttgcagaacctggcgacgctggctgctgctgcagctgcggcccagacctcagccaccagcaccaatgcaaaccctctctctaccacgagcagcgccctgggagccctcacgagtcccgtggctgcttcaacccccaactccactgctggtgcagccatgaactccttgacctctctcgggactctgcaaggactggctggagccactgttggactgaataatattaatgcactagcaggtaccatcaacagtatggcggctctgaatggaggacttggcgccacaggcttgacgaatggcacggctggcaccatggacgccctcacccaggcctactcaggaattcaacagtacgcagccgccgcgctgcccactctgtacagccagagcctgctgcagcagcagagcgctgcaggcagccagaaggaaggttttgttagctacgacaatccagtctctgcacaagctgctatccaagctatgaatggctttcagatcggcatgaaacgcttgaaggtgcagctgaagcgttccaaaaacgacagcaaaccttactgatcctaaccccagaggctccctgctctcattttagctttcttaggacatcttcatgcccgttagttcatcgtttgcctagcatgtccctgtggcgtctcaaaaaaaagtttcatcgtcccgtcattgtttctgatgtctttctgacctcacatcatatttggttctcctactgacctttgatctagtttgacctttgaaatttgcatgtgacctcatctagctatgaattctgggaagtcaatgtgaaaaacattgctgcattcatgcaagactgaaatttattattagacaaattcattatagaaaaaacctgtggcaaaaacgtttctttcttattttttttcttttcctaaaacagacttgaaagtattatacagggattggcattcttcccggtcactggtaacaatagcaatatgtgtccagggacacagaatgttggtttctaacagactacttccaaaaacagtttgagaaaaaaactgtctgattttaagtctctagaggtctgtaatagtttttacatttttcaggcagtgtaaagttttttgataaggccattttaggtggctcactttctcattaagatatatatatagaaccactttttgtagattagtataagaaaaatatttaccctgttttggggcaaatgctacctatttgtgtcaccttttgctgaactcacagttagacaatccatggtttaatgcacatgaaattacctatattttatactgtttcaatgtacaggagaaaggttactgtaaactgtgttatgttggtgcttctgtgaattaagttgtggtttcatcatgagtcttaatgttctttgttgataagacaagtttagaattggtttactt

SEQ ID NO: 123179 - DNA, 1892 bp, Homo sapiens
  Payload ID: 4190
  Gene Symbol: CELF2
  Gene Name: CUGBP, Elav-like family member 2
  Uniprot ID: O95319
  ENST ID: ENST00000608830
  CDS Start-End: 198-1664
gatgcgttgatggcagccttgcagagctagacctgcacttaacttgcagctgcctcccgagcctccaagatgtccacgccctgggtgacaggcggcagggcgctgccccgtgctcccccggctctgctcgacagcagcacgcagtgagagcctcgccgccgccgaggagcaactcatgtaacggcacagccaacaagatgaacggagctttggatcactcagaccaaccagacccagatgccattaagatgtttgtcggacagatcccccggtcatggtcggaaaaggagctgaaagaactttttgagccttacggagccgtctaccagatcaacgtcctccgggaccggagtcagaaccctccgcagagtaaaggttgttgtttcgtaacattttatacaagaaaagctgcacttgaggcccagaatgcactgcacaatattaaaactttacctgggatgcatcatcccattcagatgaaacctgcagatagtgaaaagtccaacgctgtggaagacagaaaattgttcataggaatggtatcgaagaaatgtaatgagaacgacatcagggtgatgttctctccatttggccagatagaagaatgccggatcctccggggacctgatgggctgagtcgaggctgtgcgtttgtcacattttctacaagggcaatggcacagaatgcaatcaaagccatgcatcagtctcagaccatggagggctgctcttcacctatcgtggtgaagtttgctgacactcagaaggacaaagagcaaaggcgcctccagcagcagctcgctcagcagatgcagcagctcaacactgccacctgggggaacctgacagggctgggcggactgaccccacagtatctggcgctcctgcagcaggccacctcctccagcaacctgggtgcgttcagcggcattcaacaaatggcaggcatgaatgctttacagttgcagaacctggcgacgctggctgctgctgcagctgcggcccagacctcagccaccagcaccaatgcaaaccctctctctaccacgagcagcgccctgggagccctcacgagtcccgtggctgcttcaacccccaactccactgctggtgcagccatgaactccttgacctctctcgggactctgcaaggactggctggagccactgttggactgaataatattaatgcactagcaggtaccatcaacagtatggcggctctgaatggaggacttggcgccacaggcttgacgaatggcacggctggcaccatggacgccctcacccaggcctactcaggaattcaacagtacgcagccgccgcgctgcccactctgtacagccagagcctgctgcagcagcagagcgctgcaggcagccagaaggaaggtccagagggggcaaacctctttatttaccaccttccacaggaatttggagaccaggacattctgcagatgttcatgccttttggaaatgttatctctgctaaagtcttcattgacaaacagaccaatctgagcaagtgctttggttttgttagctacgacaatccagtctctgcacaagctgctatccaagctatgaatggctttcagatcggcatgaaacgcttgaaggtgcagctgaagcgttccaaaaacgacagcaaaccttactgatcctaaccccagaggctccctgctctcattttagctttcttaggacatcttcatgcccgttagttcatcgtttgcctagcatgtccctgtggcgtctcaaaaaaaagtttcatcgtcccgtcattgtttctgatgtctttctgacctcacatcatatttggttctcctactgacctttgatctagtttgacctttgaaatttgcatgtgacctcatctagctatgaat

SEQ ID NO: 123180 - DNA, 3827 bp, Homo sapiens
  Payload ID: 4190
  Gene Symbol: CELF2
  Gene Name: CUGBP, Elav-like family member 2
  Uniprot ID: O95319
  ENST ID: ENST00000632728
  CDS Start-End: 109-1581
gacggagctctggtggccggggggaaagagctcttcttaccaaattacccgctcatctgatttaatatttgcaaagatcctttcctaagtaacggcacagccaacaagatgaacggagctttggatcactcagaccaaccagacccagatgccattaagatgtttgtcggacagatcccccggtcatggtcggaaaaggagctgaaagaactttttgagccttacggagccgtctaccagatcaacgtcctccgggaccggagtcagaaccctccgcagagtaaaggttgttgtttcgtaacattttatacaagaaaagctgcacttgaggcccagaatgcactgcacaatattaaaactttacctgggatgcatcatcccattcagatgaaacctgcagatagtgaaaagtccaacgctgtggaagacagaaaattgttcataggaatggtatcgaagaaatgtaatgagaacgacatcagggtgatgttctctccatttggccagatagaagaatgccggatcctccggggacctgatgggctgagtcgaggctgtgcgtttgtcacattttctacaagggcaatggcacagaatgcaatcaaagccatgcatcagtctcagaccatggagggctgctcttcacctatcgtggtgaagtttgctgacactcagaaggacaaagagcaaaggcgcctccagcagcagctcgctcagcagatgcagcagctcaacactgccacctgggggaacctgacagggctgggcggactgaccccacagtatctggcgctcctgcagcaggccacctcctccagcaacctgggtgcgttcagcggcattcaacaaatggcaggcatgaatgctttacagttgcagaacctggcgacgctggctgctgctgcagctgcggcccagacctcagccaccagcaccaatgcaaaccctctctctaccacgagcagcgccctgggagccctcacgagtcccgtggctgcttcaacccccaactccactgctggtgcagccatgaactccttgacctctctcgggactctgcaaggactggctggagccactgttggactgaataatattaatgcactagcagttgctcaaatgctctcaggtatggcggctctgaatggaggacttggcgccacaggcttgacgaatggcacggctggcaccatggacgccctcacccaggcctactcaggaattcaacagtacgcagccgccgcgctgcccactctgtacagccagagcctgctgcagcagcagagcgctgcaggcagccagaaggaaggtccagagggggcaaacctctttatttaccaccttccacaggaatttggagaccaggacattctgcagatgttcatgccttttggaaatgttatctctgctaaagtcttcattgacaaacagaccaatctgagcaagtgctttggttttgttagctacgacaatccagtctctgcacaagctgctatccaagctatgaatggctttcagatcggcatgaaacgcttgaaggtgcagctgaagcgttccaaaaacgacagcaaaccttactgatcctaaccccagaggctccctgctctcattttagctttcttagggtaagtcccacgagccagcctgtctcaacagggaaggcagaggaggaccacattgccaacttttaccaagagagacggttatttttacaataaggcctccatgtccccacccacttcccctacccagtttgccataattaaaacttgggctactttgtttctattgagtaattcctcctccagttgtgccactgtattctcctttgttttgcgatttgaatctccttttacctttttttttaatttttttcatttttgcttttttttaaagagaagcatatacacaaataaatggcatcttgagaatttaaaaggcaaacaaacaaacgctaatgtgcaattctaactctgaaaccactggtgccccgagagcactgcctggagaattcacccctccttgcccggcgcccgcccccggagggagggcccggtgcttagaggttaacttggtggcctaggagagggagaagccaggagaagcacttactccaaccacacgtctttccactacatcggcttgttttactaagtaggattttattttagggttcaaagaaacatgacatttattggtcaaaatattacactggttgtctattttgttattgttttattttagtttttagaaaggattaatgtacaaaaagatttagagatctgtttcttaaagctacagggtttaaaaaataaaaatgagtgaaaatacttgatgtttcttgaaagataaatttaataataataaataaatacataaatacataaataaaaaagaaagccacaggcctgtaaattttatttgtaaaaaagcatttctatttttatacaaaatttttactgcctcagaaataatggaagttatttattgcctattgttaacttattgggtacctaaagagcagttctctgtctagctagaaccttctgaagtagtctctagaggaattgttctaggaatgggctttttttcaccgttgaaccctagacctgaagttcatgctttatcctctcgttgtttgtatctgtctgattattttgtttgtaacttccattatctagtttacagttcagtcgtctgactttccccgtatgtcacatttgttgaaactggaccttctccccctgtccctcaccccaaaacacccggaatccatcccgtttcgctctctccagatggattctcttggggtttcattgtgctgtggataaggagtgtaagaaatgcaaattatgtgaatggctcggagactccctaatgacctaagatttgcattagtttttctcctgcacccttaaaagtgattttgttgccgctgcatagattctgtgtaactttttactcttccttgttttttccctagacatcttcatgcccgttagttcatcgtttgcctagcatgtccctgtggcgtctcaaaaaaaagtttcatcgtcccgtcattgtttctgatgtctttctgacctcacatcatatttggttctcctactgacctttgatctagtttgacctttgaaatttgcatgtgacctcatctagctatgaattctgggaagtcaatgtgaaaaacattgctgcattcatgcaagactgaaatttattattagacaaattcattatagaaaaaacctgtggcaaaaacgtttctttcttattttttttcttttcctaaaacagacttgaaagtattatacagggattggcattcttcccggtcactggtaacaatagcaatatgtgtccagggacacagaatgttggtttctaacagactacttccaaaaacagtttgagaaaaaaactgtctgattttaagtctctagaggtctgtaatagtttttacatttttcaggcagtgtaaagttttttgataaggccattttaggtggctcactttctcattaagatatatatatagaaccactttttgtagattagtataagaaaaatatttaccctgttttggggcaaatgctacctatttgtgtcaccttttgctgaactcacagttagacaatccatggtttaatgcacatgaaattacctatattttatactgtttcaatgtacaggagaaaggttactgtaaactgtgttatgttggtgcttctgtgaattaagttgtggtttcatcatgagtcttaatgttctttgttgataagacaagtttagaattggtttacttaatacaaaaaaaaaaaaaagaa

SEQ ID NO: 123181 - DNA, 1803 bp, Homo sapiens
  Payload ID: 4190
  Gene Symbol: CELF2
  Gene Name: CUGBP, Elav-like family member 2
  ENST ID: ENST00000631816
  CDS Start-End: 12-1556
agtatagaagcatgcgctgtcccaaatccgctgttactatgagaaatgaagagctgcttttaagtaacggcacagccaacaagatgaacggagctttggatcactcagaccaaccagacccagatgccattaagatgtttgtcggacagatcccccggtcatggtcggaaaaggagctgaaagaactttttgagccttacggagccgtctaccagatcaacgtcctccgggaccggagtcagaaccctccgcagagtaaaggttgttgtttcgtaacattttatacaagaaaagctgcacttgaggcccagaatgcactgcacaatattaaaactttacctgggatgcatcatcccattcagatgaaacctgcagatagtgaaaagtccaacgctgtggaagacagaaaattgttcataggaatggtatcgaagaaatgtaatgagaacgacatcagggtgatgttctctccatttggccagatagaagaatgccggatcctccggggacctgatgggctgagtcgaggctgtgcgtttgtcacattttctacaagggcaatggcacagaatgcaatcaaagccatgcatcagtctcagaccatggagggctgctcttcacctatcgtggtgaagtttgctgacactcagaaggacaaagagcaaaggcgcctccagcagcagctcgctcagcagatgcagcagctcaacactgccacctgggggaacctgacagggctgggcggactgaccccacagtatctggcgctcctgcagcaggccacctcctccagcaacctgggtgcgttcagcggcattcaacaaatggcaggcatgaatgctttacagttgcagaacctggcgacgctggctgctgctgcagctgcggcccagacctcagccaccagcaccaatgcaaaccctctctctaccacgagcagcgccctgggagccctcacgagtcccgtggctgcttcaacccccaactccactgctggtgcagccatgaactccttgacctctctcgggactctgcaaggactggctggagccactgttggactgaataatattaatgcactagcagttgctcaaatgctctcaggtatggcggctctgaatggaggacttggcgccacaggcttgacgaatggcacggctggcaccatggacgccctcacccaggcctactcaggaattcaacagtacgcagccgccgcgctgcccactctgtacagccagagcctgctgcagcagcagagcgctgcaggcagccagaaggaaggtccagagggggcaaacctctttatttaccaccttccacaggaatttggagaccaggacattctgcagatgttcatgccttttggaaatgttatctctgctaaagtcttcattgacaaacagaccaatctgagcaagtgctttggttttgttagctacgacaatccagtctctgcacaagctgctatccaagctatgaatggctttcagatcggcatgaaacgcttgaaggtgcagctgaagcgttccaaaaacgacagcaaaccttactgatcctaaccccagaggctccctgctctcattttagctttcttaggacatcttcatgcccgttagttcatcgtttgcctagcatgtccctgtggcgtctcaaaaaaaagtttcatcgtcccgtcattgtttctgatgtctttctgacctcacatcatatttggttctcctactgacctttgatctagtttgacctttgaaatttgcatgtgacctcatctagctatgaattctgggaagtcaatgtgaa

SEQ ID NO: 123182 - DNA, 1952 bp, Homo sapiens
  Payload ID: 4190
  Gene Symbol: CELF2
  Gene Name: CUGBP, Elav-like family member 2
  ENST ID: ENST00000632065
  CDS Start-End: 125-1726
tgccggctcggcggccgccgggggaggccgcgcgcacctgtccctgcccgtctcgcgccgcccgcggccgctcggacgcgcgcagagccgccccccgccgctgccgccgcgtgcgcccgcgaacatgacttctgccttcaagctggatttcctcccggacatgatggtcgagggccgcctgctcgttcctgacagaattaacggcacagccaacaagatgaacggagctttggatcactcagaccaaccagacccagatgccattaagatgtttgtcggacagatcccccggtcatggtcggaaaaggagctgaaagaactttttgagccttacggagccgtctaccagatcaacgtcctccgggaccggagtcagaaccctccgcagagtaaaggttgttgtttcgtaacattttatacaagaaaagctgcacttgaggcccagaatgcactgcacaatattaaaactttacctgggatgcatcatcccattcagatgaaacctgcagatagtgaaaagtccaacgctgtggaagacagaaaattgttcataggaatggtatcgaagaaatgtaatgagaacgacatcagggtgatgttctctccatttggccagatagaagaatgccggatcctccggggacctgatgggctgagtcgaggctgtgcgtttgtcacattttctacaagggcaatggcacagaatgcaatcaaagccatgcatcagtctcagaccatggagggctgctcttcacctatcgtggtgaagtttgctgacactcagaaggacaaagagcaaaggcgcctccagcagcagctcgctcagcagatgcagcagctcaacactgccacctgggggaacctgacagggctgggcggactgaccccacagtatctggcgctcctgcagcaggccacctcctccagcaacctgggtgcgttcagcggcattcaacaaatggcaggcatgaatgctttacagttgcagaacctggcgacgctggctgctgctgcagctgcggcccagacctcagccaccagcaccaatgcaaaccctctctctaccacgagcagcgccctgggagccctcacgagtcccgtggctgcttcaacccccaactccactgctggtgcagccatgaactccttgacctctctcgggactctgcaaggactggctggagccactgttggactgaataatattaatgcactagcaggtaccatcaacactcccagaagcaaaaggcttttacttccaaaagataacaacggtatggcggctctgaatggaggacttggcgccacaggcttgacgaatggcacggctggcaccatggacgccctcacccaggcctactcaggaattcaacagtacgcagccgccgcgctgcccactctgtacagccagagcctgctgcagcagcagagcgctgcaggcagccagaaggaaggtccagagggggcaaacctctttatttaccaccttccacaggaatttggagaccaggacattctgcagatgttcatgccttttggaaatgttatctctgctaaagtcttcattgacaaacagaccaatctgagcaagtgctttggttttgttagctacgacaatccagtctctgcacaagctgctatccaagctatgaatggctttcagatcggcatgaaacgcttgaaggtgcagctgaagcgttccaaaaacgacagcaaaccttactgatcctaaccccagaggctccctgctctcattttagctttcttagggtaagtcccacgagccagcctgtctcaacagggaaggcagaggaggaccacattgccaacttttaccaagagagacggttatttttacaataaggcctccatgtccccacccacttcccctacccagtttgccataattaaaacttgggctactttgtttctattgagtaattcctcctcca

SEQ ID NO: 123183 - DNA, 1496 bp, Homo sapiens
  Payload ID: 4190
  Gene Symbol: CELF2
  Gene Name: CUGBP, Elav-like family member 2
  ENST ID: ENST00000633200
  CDS Start-End: 54-338
atgtttgagcatacttctgaactggcttttgttgagactatcagtatagaagcatgcgctgtcccaaatccgctgttactatgagaaatgaagagctgcttttaagtaacggcacagccaacaagatgaacggagctttggatcactcagaccaaccagacccagatgccattaagatgtttgtcggacagatcccccggtcatggtcggaaaaggagctgaaagaactttttgagccttacggagccgtctaccagatcaacgtcctccgggaccggagtcagaaccctccgcagagtaaagatgcatcatcccattcagatgaaacctgcagatagtgaaaagtccaacgctgtggaagacagaaaattgttcataggaatggtatcgaagaaatgtaatgagaacgacatcagggtgatgttctctccatttggccagatagaagaatgccggatcctccggggacctgatgggctgagtcgagggctgctcttcacctatcgtggtgaagtttgctgacactcagaaggacaaagagcaaaggcgcctccagcagcagctcgctcagcagatgcagcagctcaacactgccacctgggggaacctgacagggctgggcggactgaccccacagtatctggcgctcctgcagcaggccacctcctccagcaacctgggtgcgttcagcggcattcaacaaatggcaggcatgaatgctttacagttgcagaacctggcgacgctggctgctgctgcagctgcggcccagacctcagccaccagcaccaatgcaaaccctctctctaccacgagcagcgccctgggagccctcacgagtcccgtggctgcttcaacccccaactccactgctggtgcagccatgaactccttgacctctctcgggactctgcaaggactggctggagccactgttggactgaataatattaatgcactagcaggtaccatcaacagtgagtatttgctgctctggtggacagccttcccccaaattctccacagaaagtggtcagccagaaatgacccgaaaaaggatatgccacggggagaactaaaacttgggatggaggagcacatgctttgataggcaaaagctgtctacactcgttttgcctcagaaaatccccaaccactctccacccccagattctcttcagtgtgtagcacagcgcgtgtgctcatccatggggttctgtggctggcagctcttttcaggtttccaggagtttggtttggtttggtttcggtcggttctgtcctgcgaggcagggtgttacggtgggaaaagttaatggactggaaggctggaagcctgaacccagctctgctgccaggcagctgtgggaagtcaggcagatgctgctccctctctgggcttgggagtctccatttgagaatggaaagttctgggtcagatgattcttaaaggtagcctccagctccaaagtctaaagattcatgacaattaaata

SEQ ID NO: 123184 - DNA, 5538 bp, Homo sapiens
  Payload ID: 4190
  Gene Symbol: CELF2
  Gene Name: CUGBP, Elav-like family member 2
  Uniprot ID: O95319
  ENST ID: ENST00000631460
  CDS Start-End: 65-1591
ctgtggcattgatgtttgagcatacttctgaactggcttttgttgagactatcagtatagaagcatgcgctgtcccaaatccgctgttactatgagaaatgaagagctgcttttaagtaacggcacagccaacaagatgaacggagctttggatcactcagaccaaccagacccagatgccattaagatgtttgtcggacagatcccccggtcatggtcggaaaaggagctgaaagaactttttgagccttacggagccgtctaccagatcaacgtcctccgggaccggagtcagaaccctccgcagagtaaaggttgttgtttcgtaacattttatacaagaaaagctgcacttgaggcccagaatgcactgcacaatattaaaactttacctgggatgcatcatcccattcagatgaaacctgcagatagtgaaaagtccaacgctgtggaagacagaaaattgttcataggaatggtatcgaagaaatgtaatgagaacgacatcagggtgatgttctctccatttggccagatagaagaatgccggatcctccggggacctgatgggctgagtcgaggctgtgcgtttgtcacattttctacaagggcaatggcacagaatgcaatcaaagccatgcatcagtctcagaccatggagggctgctcttcacctatcgtggtgaagtttgctgacactcagaaggacaaagagcaaaggcgcctccagcagcagctcgctcagcagatgcagcagctcaacactgccacctgggggaacctgacagggctgggcggactgaccccacagtatctggcgctcctgcagcaggccacctcctccagcaacctgggtgcgttcagcggcattcaacaaatggcaggcatgaatgctttacagttgcagaacctggcgacgctggctgctgctgcagctgcggcccagacctcagccaccagcaccaatgcaaaccctctctctaccacgagcagcgccctgggagccctcacgagtcccgtggctgcttcaacccccaactccactgctggtgcagccatgaactccttgacctctctcgggactctgcaaggactggctggagccactgttggactgaataatattaatgcactagcaggtatggcggctctgaatggaggacttggcgccacaggcttgacgaatggcacggctggcaccatggacgccctcacccaggcctactcaggaattcaacagtacgcagccgccgcgctgcccactctgtacagccagagcctgctgcagcagcagagcgctgcaggcagccagaaggaaggtccagagggggcaaacctctttatttaccaccttccacaggaatttggagaccaggacattctgcagatgttcatgccttttggaaatgttatctctgctaaagtcttcattgacaaacagaccaatctgagcaagtgctttggttttgttagctacgacaatccagtctctgcacaagctgctatccaagctatgaatggctttcagatcggcatgaaacgcttgaaggtgcagctgaagcgttccaaaaacgacagcaaaccttactgatcctaaccccagaggctccctgctctcattttagctttcttaggacatcttcatgcccgttagttcatcgtttgcctagcatgtccctgtggcgtctcaaaaaaaagtttcatcgtcccgtcattgtttctgatgtctttctgacctcacatcatatttggttctcctactgacctttgatctagtttgacctttgaaatttgcatgtgacctcatctagctatgaattctgggaagtcaatgtgaaaaacattgctgcattcatgcaagactgaaatttattattagacaaattcattatagaaaaaacctgtggcaaaaacgtttctttcttattttttttcttttcctaaaacagacttgaaagtattatacagggattggcattcttcccggtcactggtaacaatagcaatatgtgtccagggacacagaatgttggtttctaacagactacttccaaaaacagtttgagaaaaaaactgtctgattttaagtctctagaggtctgtaatagtttttacatttttcaggcagtgtaaagttttttgataaggccattttaggtggctcactttctcattaagatatatatatagaaccactttttgtagattagtataagaaaaatatttaccctgttttggggcaaatgctacctatttgtgtcaccttttgctgaactcacagttagacaatccatggtttaatgcacatgaaattacctatattttatactgtttcaatgtacaggagaaaggttactgtaaactgtgttatgttggtgcttctgtgaattaagttgtggtttcatcatgagtcttaatgttctttgttgataagacaagtttagaattggtttacttaatacaaaaaaaaaaaaaagaatttcaaaaaaaaaagttgtttgcttaaaaaaaatttcatgtgagggaaaaaaaaaaaacctattccagaataagttttgtgttggcttgtgaagcattgatgtcattttttttaattgtggactatttagatgtgtttgtgttcagcaaaatgtgatgtttttttcttttaaagaaaaaaagtgaaaatatatagtgccaaattccaaaggtacttccttcctagagcttcagtgtgtttcttgtgagaagtaatttgataacatgggtattttattatgtgttttgtataaatccctaatatttaaaaaaaaaaacaaaacaaaaaaaggttacaaagtttgttaacttgctatcctgtggtcttgttgcctgaaattgttattgtttgttatttctctctgatgttttttgtaagacattgtataagtgcccatgtcccacttttttaaccactccgcacatcagtgctgtgaaggcaacctcaccatgtattttcttcataatctatggaaacctctaaggtgagaaagttttgaacttttaaccctttctacccagagctatctggaatgttgatgactttttatactgtcatgatttgagtttgttttggggtgtttccaatttggatttttttccctgcatctatcctctaagttgtttcggtttgactactttgttctttggttaagatccaaaagaaaacagaaaacaattccacgaggccaatctaaagggaaaaaatcctacactacttttactacttttgattatttctcatttttgggaaaagaattcctaatgtgctactagaattccttcttcagttttaacgagtaattggataaaccctgagggaaaacggaggtagattcagcacctaacaatcctgtatgcttttgagatcacgtttagtgctatgtcctagtctagaatattttcatataccttgcagtaaaacgactttgtggcaggacagtctcttgaggggttttgtttctgtttcctaaatactcctaaataatatttctaatcagccattatgctggggcatctctgatcccagtaggtacctctgaatataccaggtgtctggagttagaagcccatagccctttcccagcctttttggtttttttaattgaacacatttcatctaagtaaagctcagttctttatcacaatttactgaccaaatacctagcaccagttcctgctgccactttttaaagtgccatatgactttctacgaacaggtaccttgctgtcttgacaaatcctaatgtcacgcctacagccccaacacaagctccagtcttcctcttcggcatgccctggaagcttcttggcctcagctccccttccccgctcagcaccctgttaggatcagtgtgtgtggatgggatagccctgggatggaaaggactagcctctactgatgcaaaaaaacaaaaagcaacacaaacgtttccttcttatagcacatgcacttccttacaatgacatgatttgtattatcctcacatgtgtttactactgctggggccttccttcatcctctgagggctattttgtactttctgcagcaatcagcttaataacaacacttattgcacctgtctctctctgagaacacggtgtgtctcgacacgtaccacgtacgtggaaacacaagagcccaccacttgaatttctaagaccatttcattctgaaacttcttatcaattacctaaatctcaacgaaaaacaatttactgaagccgactcccctccccatctccctctcaacctcaacccacctgcatgcatctcccccagaggaaacactgagggtaggggacaggaggctcaggacgcgccctctgaatcgagtgtttcttcttcacaagtcaccaagagaggacatgagggggaaagtcctttttgcccttctccaaaaaataaccttccacagagacaaactgtccttctatccacttttatcttttaataaatatcaaaaggaaaaagctgcaagggtgcaaagggcctgtgccagaagaaaacacacacagggaaaccgctttttttaatcaattgtagagaatagtcatttttaatctaaattagagaattgtgatacaatggcagtcctcaaaggcgtaacgagttcatctttctttcaccataggggttatagttggcttgtgctactctggaatcattttactgtttgtttttattatcttaagtgctaattaaaaaaaaaataaaattttaaaaaaacctgtagtttcattacctttttgaataatgtcatacaaaaaatgtatttgtttttttgtgctgtgagaattgatgtttgtagattaataatcattttgtttagaattacaaaatagtttttaaatattgtctgagaaaagccaaagttaatgcaacctagtggaaactgtaagaccatttgagtattgtttgttttattgatgcatttggattttgttgtttgatggaatttgagccaaaaaaaaaatacgcaggctttcctatttctacaactgattgtacttatgcattttgtaccagtggaactttttatactggagattaaaaaaaaaatggaaatttttgtggcttgctctggtgggcccctgacaatgactgatttcaagtttgatttcgggttgattgattgattgattgatagaaagaaagttgcttttcttttgagaattaaaaactttggcttgatttcttttttccctttgcttatatctagcattagaattttgtcttaaaataacagcggtaagtttcactttttattctgtattgtgcagttacacaataaggtaattagatttagaagtactcagtcactttaagtggataaatgtattagttaaaactttagggtttgcttttttgctgtttagatcaaagttttttctgattcttctgtcctcattgtgaacataaccgtgtagttgaaacagtcaaacttatttttgtaatgtatgttattgtgtgatgcagttttttgcttctgtctccaatattaaaccattttcctaata

SEQ ID NO: 123185 - DNA, 1733 bp, Homo sapiens
  Payload ID: 4190
  Gene Symbol: CELF2
  Gene Name: CUGBP, Elav-like family member 2
  ENST ID: ENST00000633077
  CDS Start-End: 168-1733
tttcggaggggattggcggagcgcgaggagagaatgtgacaagtgccggctcggcggccgccgggggaggccgcgcgcacctgtccctgcccgtctcgcgccgcccgcggccgctcggacgcgcgcagagccgccccccgccgctgccgccgcgtgcgcccgcgaacatgacttctgccttcaagctggatttcctcccggacatgatggtcgagggccgcctgctcgttcctgacagaattaacggcacagccaacaagatgaacggagctttggatcactcagaccaaccagacccagatgccattaagatgtttgtcggacagatcccccggtcatggtcggaaaaggagctgaaagaactttttgagccttacggagccgtctaccagatcaacgtcctccgggaccggagtcagaaccctccgcagagtaaaggttgttgtttcgtaacattttatacaagaaaagctgcacttgaggcccagaatgcactgcacaatattaaaactttacctgggatgcatcatcccattcagatgaaacctgcagatagtgaaaagtccaacgctgtggaagacagaaaattgttcataggaatggtatcgaagaaatgtaatgagaacgacatcagggtgatgttctctccatttggccagatagaagaatgccggatcctccggggacctgatgggctgagtcgaggctgtgcgtttgtcacattttctacaagggcaatggcacagaatgcaatcaaagccatgcatcagtctcagaccatggagggctgctcttcacctatcgtggtgaagtttgctgacactcagaaggacaaagagcaaaggcgcctccagcagcagctcgctcagcagatgcagcagctcaacactgccacctgggggaacctgacagggctgggcggactgaccccacagtatctggcgctcctgcagcaggccacctcctccagcaacctgggtgcgttcagcggcattcaacaaatggcaggcatgaatgctttacagttgcagaacctggcgacgctggctgctgctgcagctgcggcccagacctcagccaccagcaccaatgcaaaccctctctctaccacgagcagcgccctgggagccctcacgagtcccgtggctgcttcaacccccaactccactgctggtgcagccatgaactccttgacctctctcgggactctgcaaggactggctggagccactgttggactgaataatattaatgcactagcagttgctcaaatgctctcaggtatggcggctctgaatggaggacttggcgccacaggcttgacgaatggcacggctggcaccatggacgccctcacccaggcctactcaggaattcaacagtacgcagccgccgcgctgcccactctgtacagccagagcctgctgcagcagcagagcgctgcaggcagccagaaggaaggtccagagggggcaaacctctttatttaccaccttccacaggaatttggagaccaggacattctgcagatgttcatgccttttggaaatgttatctctgctaaagtcttcattgacaaacagaccaatctgagcaagtgctttggttttgttagctacgacaatccagtctctgcacaagctgctatccaagctatgaatggctttcagatcggcatgaaacgcttgaaggtgcagctgaagcgttccaaaaacgacagcaaaccttactga

SEQ ID NO: 123186 - DNA, 3246 bp, Homo sapiens
  Payload ID: 4191
  Gene Symbol: CELF3
  Gene Name: CUGBP, Elav-like family member 3
  Uniprot ID: Q5SZQ8
  ENST ID: ENST00000290583
  CDS Start-End: 795-2192
tggaggggggaggtttttgttgaggagagcgcggccggagagcagagctccgggacccaggtgaccgggaaagcaggcagccccagcggcgggagcagccggcagcagcccaggcccggggactggggtgggggtgggaggggggctgaggggaggacctgaaggggggcggcagggcaaaagggacccctggagccctgccgccatcagagatcaagcatctggcatcagggatcttcggacccagcagaaggatccgccacaggggaggtgtcctcccagggaagccaacgagagattcacctgccccacatcaggagtgggccccccttactgacgctgctggcaaccatagcaggccccttaacccctcagtctcctccccatcaccctcctcaggccctttccccgcctccagctctcatctcaactcccagttcccagccctctaagccctagcacccccggctaccacctaaccctccaggtcttggccatactcacccccatcctgggacatttgccagatctctgggagggagatcgtttgtttaggcgatgccccctggtggcatgacagcgtctgcctagacccctgacccctagcactcaactccctgggcctcctttgtgtgaagagccgcccctctgcttagcagcgtggttgggggccaaagggaaagccagccccagctgggcccccgggccccaccacttatctccttgctgggcagctccccttggcctttgggcctctccctgctcccctcggcccctcctcctgggccgcctcaatgaaggagccggatgccatcaagctgtttgtggggcagatcccgaggcatctggaggagaaggacctgaagcccatcttcgaacagtttggtcggatctttgagctgactgtcatcaaggacaagtacaccgggctgcacaagggatgtgccttcctgacatactgtgcccgggattcagccctgaaggcccagagcgccctgcacgaacagaagacgcttccagggatgaacaggccgatccaggtcaagccagccgacagcgagagccgaggagaagaccggaagctctttgtggggatgctagggaagcagcagacagatgaggacgtccggaagatgtttgagcccttcgggaccatcgacgagtgcactgtgctccgggggccagatggcaccagcaaaggctgcgccttcgtgaagttccagacccacgctgaggcccaggcggccatcaacacccttcacagcagccggaccctgccaggtgcctcgtccagcctggtggtgaagtttgctgacactgagaaggagcgaggtctccgccgcatgcagcaggtggccacccagttgggcatgttcagccccatcgccctccagtttggagcctacagcgcctacacccaggccctgatgcagcagcaggcggccctggtagcggctcacagtgcctacctcagccccatggccaccatggctgccgtgcagatgcagcacatggctgccatcaatgccaatggcctcatcgccacccccatcaccccatcctcaggaaccagcacccctcctgccatcgctgccacgcctgtctctgccattccggctgccctgggcgtcaacggctacagcccggtgcccacccagcccactgggcagcctgcccctgatgctctgtatcccaacggggttcacccctacccagcccagagccccgcggcccccgtggaccccctgcagcaggcctacgcggggatgcagcactacacagcagcctacccagcagcctacagcctggttgcacctgcgttcccgcagcctccagccctggtcgcccagcagcccccaccaccacctcaacagcagcagcagcagcagcagcagcaacagcagcagcagcaaagagaaggccctgatggctgcaacatcttcatctaccacctgccccaggagttcactgactcagagatcctccagatgtttgtcccctttggccacgtcatctcagccaaagtctttgttgaccgagccaccaatcaaagcaaatgttttggctttgtgagtttcgacaatccggccagtgcccaggctgccatccaggccatgaatggcttccagatcggcatgaagcgcctcaaagtccagctaaagcggcctaaggatgccaaccggccctactgagggcccccaggtctggagatcccagaggaaggggcgcctcacaccctcttcccacgactggccccggccctctccgcacacctgccctgggccttgactgggttctggggcaaacgctgcttcgtggcccccgggggcacaagacaccggcccctcccacccccctgcctctctgaagggccatggctatgcttccctggctccaagggcccatttcctcctagatgcccttttggcctttgtgagggagcgaggaacaggctcgaaggctccggggtatctgccttctgctgggctcctgtgacaggccttctgtacccagcgtttgtacttgcctcccccaacagtgggcctgttctacccgtgcaggccccaggagagccgcaggggcctgccacacactcccagctcaccctcaccccagcctcttccccacattaggggtttcttggaagctggctctcactcccctccaccctcagctagaggtaggatatccctgattcctgggctcccagccctaaaactcactgcctcccccaagggccccctctaaggagggtgtgggggagccctgagggctgcctctctgccagtcagccacagagaccctcctcctttcacgaggaaaagaccttcccctgaacccctaaaaatgtttacagtctctgctggttccctctgtgtaaataccactaccacccgtgcgttatccagcccgcccggcctggcccggacgctgccatctctctttctgggagtttagacaatgttgcccttggatttttttctctctcttaatttctccctttgctttggggggtaattgggtattgggaggaggggtgtggggaggggtcaaggggtttattacctgatcattttctttaggaagaggttttagggaaaagaaaatggggtgggggtgggggtggtaaggggagaccggggagtcagtttcagacagttctctatgcttaacttatttatttattgcattttacttttaaagagttggtcttttctgtctaaataaagaaaaaagtttaaaagc

SEQ ID NO: 123187 - DNA, 2335 bp, Homo sapiens
  Payload ID: 4191
  Gene Symbol: CELF3
  Gene Name: CUGBP, Elav-like family member 3
  Uniprot ID: Q5SZQ8
  ENST ID: ENST00000290585
  CDS Start-End: 33-1280
ctcccctcggcccctcctcctgggccgcctcaatgaaggagccggatgccatcaagctgtttgtggggcagatcccgaggcatctggaggagaaggacctgaagcccatcttcgaacagtttggtcggatctttgagctgactgtcatcaaggacaagtacaccgggctgcacaagggatgtgccttcctgacatactgtgcccgggattcagccctgaaggcccagagcgccctgcacgaacagaagacgcttccagggatgaacaggccgatccaggtcaagccagccgacagcgagagccgaggagaagaccggaagctctttgtggggatgctagggaagcagcagacagatgaggacgtccggaagatgtttgagcccttcgggaccatcgacgagtgcactgtgctccgggggccagatggcaccagcaaaggctgcgccttcgtgaagttccagacccacgctgaggcccaggcggccatcaacacccttcacagcagccggaccctgccaggtgcctcgtccagcctggtggtgaagtttgctgacactgagaaggagcgaggtctccgccgcatgcagcaggtggccacccagttgggcatgttcagccccatcgccctccagtttggagcctacagcgcctacacccaggccctgatgcagcagcaggcggccctggtagcggctcacagtgcctacctcagccccatggccaccatggctgccgtgcagatgcagcacatggctgccatcaatgccaatggcctcatcgccacccccatcaccccatcctcagcccagagccccgcggcccccgtggaccccctgcagcaggcctacgcggggatgcagcactacacagcagcctacccagcagcctacagcctggttgcacctgcgttcccgcagcctccagccctggtcgcccagcagcccccaccaccacctcaacagcagcagcagcagcagcagcagcaacagcagcagcagcaaagagaaggccctgatggctgcaacatcttcatctaccacctgccccaggagttcactgactcagagatcctccagatgtttgtcccctttggccacgtcatctcagccaaagtctttgttgaccgagccaccaatcaaagcaaatgttttggctttgtgagtttcgacaatccggccagtgcccaggctgccatccaggccatgaatggcttccagatcggcatgaagcgcctcaaagtccagctaaagcggcctaaggatgccaaccggccctactgagggcccccaggtctggagatcccagaggaaggggcgcctcacaccctcttcccacgactggccccggccctctccgcacacctgccctgggccttgactgggttctggggcaaacgctgcttcgtggcccccgggggcacaagacaccggcccctcccacccccctgcctctctgaagggccatggctatgcttccctggctccaagggcccatttcctcctagatgcccttttggcctttgtgagggagcgaggaacaggctcgaaggctccggggtatctgccttctgctgggctcctgtgacaggccttctgtacccagcgtttgtacttgcctcccccaacagtgggcctgttctacccgtgcaggccccaggagagccgcaggggcctgccacacactcccagctcaccctcaccccagcctcttccccacattaggggtttcttggaagctggctctcactcccctccaccctcagctagaggtaggatatccctgattcctgggctcccagccctaaaactcactgcctcccccaagggccccctctaaggagggtgtgggggagccctgagggctgcctctctgccagtcagccacagagaccctcctcctttcacgaggaaaagaccttcccctgaacccctaaaaatgtttacagtctctgctggttccctctgtgtaaataccactaccacccgtgcgttatccagcccgcccggcctggcccggacgctgccatctctctttctgggagtttagacaatgttgcccttggatttttttctctctcttaatttctccctttgctttggggggtaattgggtattgggaggaggggtgtggggaggggtcaaggggtttattacctgatcattttctttaggaagaggttttagggaaaagaaaatggggtgggggtgggggtggtaaggggagaccggggagtcagtttcagacagttctctatgcttaacttatttatttattgcattttacttttaaagagttggtcttttctgtctaaataaagaaaaaagtttaaaagca

SEQ ID NO: 123188 - DNA, 2444 bp, Homo sapiens
  Payload ID: 4191
  Gene Symbol: CELF3
  Gene Name: CUGBP, Elav-like family member 3
  ENST ID: ENST00000420342
  CDS Start-End: 1-1400
ttgttgaggagagcgcggccggagagcagagctccgggacccagatcccgaggcatctggaggagaaggacctgaagcccatcttcgaacagtttggtcggatctttgagctgactgtcatcaaggacaagtacaccgggctgcacaagggatgtgccttcctgacatactgtgcccgggattcagccctgaaggcccagagcgccctgcacgaacagaagacgcttccagggatgaacaggccgatccaggtcaagccagccgacagcgagagccgaggagaccggaagctctttgtggggatgctagggaagcagcagacagatgaggacgtccggaagatgtttgagcccttcgggaccatcgacgagtgcactgtgctccgggggccagatggcaccagcaaaggctgcgccttcgtgaagttccagacccacgctgaggcccaggcggccatcaacacccttcacagcagccggaccctgccaggtgcctcgtccagcctggtggtgaagtttgctgacactgagaaggagcgaggtctccgccgcatgcagcaggtggccacccagttgggcatgttcagccccatcgccctccagtttggagcctacagcgcctacacccaggccctgatgcagcagcaggcggccctggtagcggctcacagtgcctacctcagccccatggccaccatggctgccgtgcagatgcagcacatggctgccatcaatgccaatggcctcatcgccacccccatcaccccatcctcaggaaccagcacccctcctgccatcgctgccacgcctgtctctgccattccggctgccctgggcgtcaacggctacagcccggtgcccacccagcccactgggcagcctgcccctgatgctctgtatcccaacggggttcacccctacccagcccagagccccgcggcccccgtggaccccctgcagcaggcctacgcggggatgcagcactacacagcagcctacccagcagcctacagcctggttgcacctgcgttcccgcagcctccagccctggtcgcccagcagcccccaccaccacctcaacagcagcagcagcagcagcagcagcaacagcagcagcagcaaagagaaggccctgatggctgcaacatcttcatctaccacctgccccaggagttcactgactcagagatcctccagatgtttgtcccctttggccacgtcatctcagccaaagtctttgttgaccgagccaccaatcaaagcaaatgttttggctttgtgagtttcgacaatccggccagtgcccaggctgccatccaggccatgaatggcttccagatcggcatgaagcgcctcaaagtccagctaaagcggcctaaggatgccaaccggccctactgagggcccccaggtctggagatcccagaggaaggggcgcctcacaccctcttcccacgactggccccggccctctccgcacacctgccctgggccttgactgggttctggggcaaacgctgcttcgtggcccccgggggcacaagacaccggcccctcccacccccctgcctctctgaagggccatggctatgcttccctggctccaagggcccatttcctcctagatgcccttttggcctttgtgagggagcgaggaacaggctcgaaggctccggggtatctgccttctgctgggctcctgtgacaggccttctgtacccagcgtttgtacttgcctcccccaacagtgggcctgttctacccgtgcaggccccaggagagccgcaggggcctgccacacactcccagctcaccctcaccccagcctcttccccacattaggggtttcttggaagctggctctcactcccctccaccctcagctagaggtaggatatccctgattcctgggctcccagccctaaaactcactgcctcccccaagggccccctctaaggagggtgtgggggagccctgagggctgcctctctgccagtcagccacagagaccctcctcctttcacgaggaaaagaccttcccctgaacccctaaaaatgtttacagtctctgctggttccctctgtgtaaataccactaccacccgtgcgttatccagcccgcccggcctggcccggacgctgccatctctctttctgggagtttagacaatgttgcccttggatttttttctctctcttaatttctccctttgctttggggggtaattgggtattgggaggaggggtgtggggaggggtcaaggggtttattacctgatcattttctttaggaagaggttttagggaaaagaaaatggggtgggggtgggggtggtaaggggagaccggggagtcagtttcagacagttctctatgcttaacttatttatttattgcattttacttttaaagagttggtcttttctgtctaaataaagaaaaaa

SEQ ID NO: 123189 - DNA, 3542 bp, Homo sapiens
  Payload ID: 4192
  Gene Symbol: CELF4
  Gene Name: CUGBP, Elav-like family member 4
  Uniprot ID: Q9BZC1
  ENST ID: ENST00000334919
  CDS Start-End: 1-1347
atgtatataaagatggccacgttagcaaacggacaggctgacaacgcaagcctcagtaccaacgggctcggcagcagcccgggcagtgccgggcacatgaacggattaagccacagcccggggaacccgtcgaccattcccatgaaggaccacgatgccatcaagctgttcattgggcagatcccccgcaacctggatgagaaggacctcaagcccctcttcgaggagtttggcaaaatctacgagcttacggttctgaaggacaggttcacaggcatgcacaaaggctgcgccttcctcacctactgcgagcgtgagtcagcgctgaaggcccagagcgcgctgcacgagcagaagactctgcccgggatgaaccggccgatccaggtgaagcctgcggacagcgagagccgaggagaagatagaaaactcttcgtgggcatgctcaacaagcaacagtccgaggacgacgtgcgccgccttttcgaggcctttgggaacatcgaggagtgcaccatcctgcgcgggcccgacggcaacagcaaggggtgcgcctttgtgaagtactcctcccacgccgaggcgcaggccgccatcaacgcgctacacggcagccagaccatgccgggagcctcgtccagtctggtggtcaagttcgccgacaccgacaaggagcgcacgatgcggcgaatgcagcagatggctggccagatgggcatgttcaaccccatggccatccctttcggggcctacggcgcctacgctcaggcactgatgcagcagcaagcggccctgatggcatcagtcgcgcagggcggctacctgaaccccatggctgccttcgctgccgcccagatgcagcagatggcggccctcaacatgaatggcctggcggccgcacctatgaccccaacctcaggtggcagcacccctccgggcatcactgcaccagccgtgcctagcatcccatcccccattggggtgaatggcttcaccggcctccccccacaggccaatgggcaacctgctgcggaagctgtgttcgccaatggcatccacccctacccagcacagagccccaccgccgcggaccccctgcagcaggcctacgccggagtgcagcagtatgcaggtccagctgcctaccctgctgcctatggtcagataagccaggcctttcctcagccgcctccaatgatcccccagcagcagagagaaggcttcgtgagcttcgacaacccggccagcgcgcagaccgccatccaggccatgaacggcttccagatcggcatgaagaggctcaaggtgcagctgaagcggcccaaagacgccaatcgcccgtactgagcgccggcgggagcgtcccccgggggagaccaggactcgcacagggcaggatgctgaacgggctacattaaaaaacaaacctctctctatatatatttataaatgagaactgttggatgacacctttgacatatcagccaatatcaatcaagctgaagactccagacactgtctgtgtgactgtaacatttcttcaaggaaagtatagcgtctatggagttcagagggcacgtgtttgggggaaaatatatatgacatgaagaagaagatgaagaaaaatgagaaaaaaacacacaaaaggcaactttaaaacaaaatatcacgagcagacggggaggctgaagggctgggagctgggaggagacgctgcttaccgatcccggggcttttccagcccacgggcgcctgacgcaggctggggcaagtggtgcgtggggcctggtccccaaggggcggctgagaggccgccactgagcatctctatctgtcattcctttagctatttagggaccaaaggaccaaactttttattgcagatgtgtagctctatgtcaaatagagggggaatggaggaccccctccttcctgcctcatggctgttcttgaaacagcttagagcgattctatgaaaaaatgtaataaaaaattaaaaaaaaaacaaaaaacaaaaaaaacaacaaaaaaaggaaaaataacgcttcaatgcttttaaaacagcaagataatagttctttgatactttgagaggcgctttgatgaccctcatccaagtctatgacactttcctatggttttctgtattctatgtctggatggagctgttaaaagatgaacaaattggtggatatttggggaaagcaacacaaatcttaaaactcacccgtgaagtgtgagaaaacaaggaggggaacaaatgggacttaccaagcaaggtcattgttgtgaaaagtctgtaaatgcttctaactcttccccctcttaaaatcataatagttgtacagaattttaaaaaggaaaagtttaaaatacctatataatagaagaaaaattagaggaaagcaaaaaataaaaaaaaaaaataaaaaaggaaaaaaaaaacctatagaagttagcattactgctaaaatcccagatgttgtaggactgtacttttgtagagtttagacagagcatcaatcccttctccccgcgagtgcagtcggatgccgttgtccccaagggccaggccgaactcgccccacacctgcgggcgcctggctgccgacgccggtggaggccacgccgtcggtcgggaacggtcgcgtcgcccgggtcgccgccgccgccgccgccgtcatcctcgcctctcgcttccctctgggagctgcgcgcgcttcactcaccttccgcttcactcgccttccacgcttgctccagagactttccgggcaagggagaactgggaactttcatcttaaaacaactagacaacacacacacacacaaaaccttaaaaaagagagagaaaaataaacaatctttgaagaatttctgaaactgtttacaaggaattttgaaaaacagggatgtttaaatgatgccggctctgtttttctgtaaataaatttgcatattttgtaggacttttaattgtaatgatagagaaaaaaacaaggaaaactatttaatgaaagcacgatatttatctttggtaaatgactttagagcagttaaagacattgcttaaaaaactcagaatcagaaaaaacactgaattatttaagaacacatatattttaaagtataacatatttattataatttatttgcacccttgggaagattgctttggcattctgccttgattccttctcattgatgtccaggtcatctggaggccgggggttctcagacctaccagtttccctttagaagaacaaatttccagttcctctagggcctcctgcctttcctttctttctgtcaattttgttgttgttgttgtttttcattttctttttttctcttgactcctccttttaggatgtccagatgtaaaaaaaaaaaaaaaaaaaagaaaaaaagaaaaaaaaaagaaaacagctgcagttcagtacaactgctcttttcacactcaactccctaaaactccttgtaaccttctgtaactattggatgacgctttctccagcttagccctaaataaagcacagttt

SEQ ID NO: 123190 - DNA, 1853 bp, Homo sapiens
  Payload ID: 4192
  Gene Symbol: CELF4
  Gene Name: CUGBP, Elav-like family member 4
  Uniprot ID: Q9BZC1
  ENST ID: ENST00000361795
  CDS Start-End: 125-1579
agagaaaccgagggggagagaacccgagtgtgtgtatgcgtgtgcgtgtgtgagcgcgagcgagcgagagagaggagcgagagagtgtgagcgagaaagaataaaaggaaagaagattttctctatgtatataaagatggccacgttagcaaacggacaggctgacaacgcaagcctcagtaccaacgggctcggcagcagcccgggcagtgccgggcacatgaacggattaagccacagcccggggaacccgtcgaccattcccatgaaggaccacgatgccatcaagctgttcattgggcagatcccccgcaacctggatgagaaggacctcaagcccctcttcgaggagtttggcaaaatctacgagcttacggttctgaaggacaggttcacaggcatgcacaaaggctgcgccttcctcacctactgcgagcgtgagtcagcgctgaaggcccagagcgcgctgcacgagcagaagactctgcccgggatgaaccggccgatccaggtgaagcctgcggacagcgagagccgaggaggtagtagctgcctgcgccagcccccttcacatagaaaactcttcgtgggcatgctcaacaagcaacagtccgaggacgacgtgcgccgccttttcgaggcctttgggaacatcgaggagtgcaccatcctgcgcgggcccgacggcaacagcaaggggtgcgcctttgtgaagtactcctcccacgccgaggcgcaggccgccatcaacgcgctacacggcagccagaccatgccgggagcctcgtccagtctggtggtcaagttcgccgacaccgacaaggagcgcacgatgcggcgaatgcagcagatggctggccagatgggcatgttcaaccccatggccatccctttcggggcctacggcgcctacgctcaggcaatgcagcagcaagcggccctgatggcatcagtcgcgcagggcggctacctgaaccccatggctgccttcgctgccgcccagatgcagcagatggcggccctcaacatgaatggcctggcggccgcacctatgaccccaacctcaggtggcagcacccctccgggcatcactgcaccagccgtgcctagcatcccatcccccattggggtgaatggcttcaccggcctccccccacaggccaatgggcaacctgctgcggaagctgtgttcgccaatggcatccacccctacccagcacagagccccaccgccgcggaccccctgcagcaggcctacgccggagtgcagcagtatgcaggtccagctgcctaccctgctgcctatggtcagataagccaggcctttcctcagccgcctccaatgatcccccagcagcagagagaagggcccgagggctgtaacctgttcatctaccatctgccccaggagtttggggacgctgagctgatgcagatgttcctccctttcggcttcgtgagcttcgacaacccggccagcgcgcagaccgccatccaggccatgaacggcttccagatcggcatgaagaggctcaaggtgcagctgaagcggcccaaagacgccaatcgcccgtactgagcgccggcgggagcgtcccccgggggagaccaggactcgcacagggcaggatgctgaacgggctacattaaaaaacaaacctctctctatatatatttataaatgagaactgttggatgacacctttgacatatcagccaatatcaatcaagctgaagactccagacactgtctgtgtgactgtaacatttcttcaaggaaagtatagcgtctatggagttcagagggcacgtgtttgggggaaaatatatatgacatgaagaagaagatgaag

SEQ ID NO: 123191 - DNA, 4052 bp, Homo sapiens
  Payload ID: 4192
  Gene Symbol: CELF4
  Gene Name: CUGBP, Elav-like family member 4
  Uniprot ID: Q9BZC1
  ENST ID: ENST00000420428
  CDS Start-End: 397-1857
gtccagcctgtttaaacggaaaggacagagatcctgtctgttcaatgtaaaaaaaaaaaaaaaaaaaaaaaaaagaaaaaaagaaaaaaaaaatcagatcagaccgagagagagaggagagagggagagagagagggagagagagagggagagagagaggagagggagggagggagagagagaggggggagagcagagagagagcgcgagcgcgagcgagcgagagaagaggagaaagagagagagcagagagcgagcggagagcgaggtgtagagaaaccgagggggagagaacccgagtgtgtgtatgcgtgtgcgtgtgtgagcgcgagcgagcgagagagaggagcgagagagtgtgagcgagaaagaataaaaggaaagaagattttctctatgtatataaagatggccacgttagcaaacggacaggctgacaacgcaagcctcagtaccaacgggctcggcagcagcccgggcagtgccgggcacatgaacggattaagccacagcccggggaacccgtcgaccattcccatgaaggaccacgatgccatcaagctgttcattgggcagatcccccgcaacctggatgagaaggacctcaagcccctcttcgaggagtttggcaaaatctacgagcttacggttctgaaggacaggttcacaggcatgcacaaaggctgcgccttcctcacctactgcgagcgtgagtcagcgctgaaggcccagagcgcgctgcacgagcagaagactctgcccgggatgaaccggccgatccaggtgaagcctgcggacagcgagagccgaggaggtagtagctgcctgcgccagcccccttcacaagatagaaaactcttcgtgggcatgctcaacaagcaacagtccgaggacgacgtgcgccgccttttcgaggcctttgggaacatcgaggagtgcaccatcctgcgcgggcccgacggcaacagcaaggggtgcgcctttgtgaagtactcctcccacgccgaggcgcaggccgccatcaacgcgctacacggcagccagaccatgccgggagcctcgtccagtctggtggtcaagttcgccgacaccgacaaggagcgcacgatgcggcgaatgcagcagatggctggccagatgggcatgttcaaccccatggccatccctttcggggcctacggcgcctacgctcaggcactgatgcagcagcaagcggccctgatggcatcagtcgcgcagggcggctacctgaaccccatggctgccttcgctgccgcccagatgcagcagatggcggccctcaacatgaatggcctggcggccgcacctatgaccccaacctcaggtggcagcacccctccgggcatcactgcaccagccgtgcctagcatcccatcccccattggggtgaatggcttcaccggcctccccccacaggccaatgggcaacctgctgcggaagctgtgttcgccaatggcatccacccctacccagcacagagccccaccgccgcggaccccctgcagcaggcctacgccggagtgcagcagtatgcaggtccagctgcctaccctgctgcctatggtcagataagccaggcctttcctcagccgcctccaatgatcccccagcagcagagagaagggcccgagggctgtaacctgttcatctaccatctgccccaggagtttggggacgctgagctgatgcagatgttcctccctttcggcttcgtgagcttcgacaacccggccagcgcgcagaccgccatccaggccatgaacggcttccagatcggcatgaagaggctcaaggtgcagctgaagcggcccaaagacgccaatcgcccgtactgagcgccggcgggagcgtcccccgggggagaccaggactcgcacagggcaggatgctgaacgggctacattaaaaaacaaacctctctctatatatatttataaatgagaactgttggatgacacctttgacatatcagccaatatcaatcaagctgaagactccagacactgtctgtgtgactgtaacatttcttcaaggaaagtatagcgtctatggagttcagagggcacgtgtttgggggaaaatatatatgacatgaagaagaagatgaagaaaaatgagaaaaaaacacacaaaaggcaactttaaaacaaaatatcacgagcagacggggaggctgaagggctgggagctgggaggagacgctgcttaccgatcccggggcttttccagcccacgggcgcctgacgcaggctggggcaagtggtgcgtggggcctggtccccaaggggcggctgagaggccgccactgagcatctctatctgtcattcctttagctatttagggaccaaaggaccaaactttttattgcagatgtgtagctctatgtcaaatagagggggaatggaggaccccctccttcctgcctcatggctgttcttgaaacagcttagagcgattctatgaaaaaatgtaataaaaaattaaaaaaaaaacaaaaaacaaaaaaaacaacaaaaaaaggaaaaataacgcttcaatgcttttaaaacagcaagataatagttctttgatactttgagaggcgctttgatgaccctcatccaagtctatgacactttcctatggttttctgtattctatgtctggatggagctgttaaaagatgaacaaattggtggatatttggggaaagcaacacaaatcttaaaactcacccgtgaagtgtgagaaaacaaggaggggaacaaatgggacttaccaagcaaggtcattgttgtgaaaagtctgtaaatgcttctaactcttccccctcttaaaatcataatagttgtacagaattttaaaaaggaaaagtttaaaatacctatataatagaagaaaaattagaggaaagcaaaaaataaaaaaaaaaaataaaaaaggaaaaaaaaaacctatagaagttagcattactgctaaaatcccagatgttgtaggactgtacttttgtagagtttagacagagcatcaatcccttctccccgcgagtgcagtcggatgccgttgtccccaagggccaggccgaactcgccccacacctgcgggcgcctggctgccgacgccggtggaggccacgccgtcggtcgggaacggtcgcgtcgcccgggtcgccgccgccgccgccgccgtcatcctcgcctctcgcttccctctgggagctgcgcgcgcttcactcaccttccgcttcactcgccttccacgcttgctccagagactttccgggcaagggagaactgggaactttcatcttaaaacaactagacaacacacacacacacaaaaccttaaaaaagagagagaaaaataaacaatctttgaagaatttctgaaactgtttacaaggaattttgaaaaacagggatgtttaaatgatgccggctctgtttttctgtaaataaatttgcatattttgtaggacttttaattgtaatgatagagaaaaaaacaaggaaaactatttaatgaaagcacgatatttatctttggtaaatgactttagagcagttaaagacattgcttaaaaaactcagaatcagaaaaaacactgaattatttaagaacacatatattttaaagtataacatatttattataatttatttgcacccttgggaagattgctttggcattctgccttgattccttctcattgatgtccaggtcatctggaggccgggggttctcagacctaccagtttccctttagaagaacaaatttccagttcctctagggcctcctgcctttcctttctttctgtcaattttgttgttgttgttgtttttcattttctttttttctcttgactcctccttttaggatgtccagatgtaaaaaaaaaaaaaaaaaaaagaaaaaaagaaaaaaaaaagaaaacagctgcagttcagtacaactgctcttttcacactcaactccctaaaactccttgtaaccttctgtaactattggatgacgctttctccagcttagccctaaataaagcacagttt

SEQ ID NO: 123192 - DNA, 1461 bp, Homo sapiens
  Payload ID: 4192
  Gene Symbol: CELF4
  Gene Name: CUGBP, Elav-like family member 4
  Uniprot ID: Q9BZC1
  ENST ID: ENST00000591282
  CDS Start-End: 1-1461
atgtatataaagatggccacgttagcaaacggacaggctgacaacgcaagcctcagtaccaacgggctcggcagcagcccgggcagtgccgggcacatgaacggattaagccacagcccggggaacccgtcgaccattcccatgaaggaccacgatgccatcaagctgttcattgggcagatcccccgcaacctggatgagaaggacctcaagcccctcttcgaggagtttggcaaaatctacgagcttacggttctgaaggacaggttcacaggcatgcacaaaggctgcgccttcctcacctactgcgagcgtgagtcagcgctgaaggcccagagcgcgctgcacgagcagaagactctgcccgggatgaaccggccgatccaggtgaagcctgcggacagcgagagccgaggaggtagtagctgcctgcgccagcccccttcacaagatagaaaactcttcgtgggcatgctcaacaagcaacagtccgaggacgacgtgcgccgccttttcgaggcctttgggaacatcgaggagtgcaccatcctgcgcgggcccgacggcaacagcaaggggtgcgcctttgtgaagtactcctcccacgccgaggcgcaggccgccatcaacgcgctacacggcagccagaccatgccgggagcctcgtccagtctggtggtcaagttcgccgacaccgacaaggagcgcacgatgcggcgaatgcagcagatggctggccagatgggcatgttcaaccccatggccatccctttcggggcctacggcgcctacgctcaggcactgatgcagcagcaagcggccctgatggcatcagtcgcgcagggcggctacctgaaccccatggctgccttcgctgccgcccagatgcagcagatggcggccctcaacatgaatggcctggcggccgcacctatgaccccaacctcaggtggcagcacccctccgggcatcactgcaccagccgtgcctagcatcccatcccccattggggtgaatggcttcaccggcctccccccacaggccaatgggcaacctgctgcggaagctgtgttcgccaatggcatccacccctacccagcacagagccccaccgccgcggaccccctgcagcaggcctacgccggagtgcagcagtatgcaggtccagctgcctaccctgctgcctatggtcagataagccaggcctttcctcagccgcctccaatgatcccccagcagcagagagaagggcccgagggctgtaacctgttcatctaccatctgccccaggagtttggggacgctgagctgatgcagatgttcctccctttcggcttcgtgagcttcgacaacccggccagcgcgcagaccgccatccaggccatgaacggcttccagatcggcatgaagaggctcaaggtgcagctgaagcggcccaaagacgccaatcgcccgtactga

SEQ ID NO: 123193 - DNA, 3757 bp, Homo sapiens
  Payload ID: 4192
  Gene Symbol: CELF4
  Gene Name: CUGBP, Elav-like family member 4
  Uniprot ID: Q9BZC1
  ENST ID: ENST00000591287
  CDS Start-End: 108-1562
gagaacccgagtgtgtgtatgcgtgtgcgtgtgtgagcgcgagcgagcgagagagaggagcgagagagtgtgagcgagaaagaataaaaggaaagaagattttctctatgtatataaagatggccacgttagcaaacggacaggctgacaacgcaagcctcagtaccaacgggctcggcagcagcccgggcagtgccgggcacatgaacggattaagccacagcccggggaacccgtcgaccattcccatgaaggaccacgatgccatcaagctgttcattgggcagatcccccgcaacctggatgagaaggacctcaagcccctcttcgaggagtttggcaaaatctacgagcttacggttctgaaggacaggttcacaggcatgcacaaaggctgcgccttcctcacctactgcgagcgtgagtcagcgctgaaggcccagagcgcgctgcacgagcagaagactctgcccgggatgaaccggccgatccaggtgaagcctgcggacagcgagagccgaggaggtagtagctgcctgcgccagcccccttcacatagaaaactcttcgtgggcatgctcaacaagcaacagtccgaggacgacgtgcgccgccttttcgaggcctttgggaacatcgaggagtgcaccatcctgcgcgggcccgacggcaacagcaaggggtgcgcctttgtgaagtactcctcccacgccgaggcgcaggccgccatcaacgcgctacacggcagccagaccatgccgggagcctcgtccagtctggtggtcaagttcgccgacaccgacaaggagcgcacgatgcggcgaatgcagcagatggctggccagatgggcatgttcaaccccatggccatccctttcggggcctacggcgcctacgctcaggcactgatgcagcagcaagcggccctgatggcatcagtcgcgcagggcggctacctgaaccccatggctgccttcgctgccgcccagatgcagcagatggcggccctcaacatgaatggcctggcggccgcacctatgaccccaacctcaggtggcagcacccctccgggcatcactgcaccagccgtgcctagcatcccatcccccattggggtgaatggcttcaccggcctccccccacaggccaatgggcaacctgctgcggaagctgtgttcgccaatggcatccacccctacccagcacagagccccaccgccgcggaccccctgcagcaggcctacgccggagtgcagcagtatgcagcagctgcctaccctgctgcctatggtcagataagccaggcctttcctcagccgcctccaatgatcccccagcagcagagagaagggcccgagggctgtaacctgttcatctaccatctgccccaggagtttggggacgctgagctgatgcagatgttcctccctttcggcttcgtgagcttcgacaacccggccagcgcgcagaccgccatccaggccatgaacggcttccagatcggcatgaagaggctcaaggtgcagctgaagcggcccaaagacgccaatcgcccgtactgagcgccggcgggagcgtcccccgggggagaccaggactcgcacagggcaggatgctgaacgggctacattaaaaaacaaacctctctctatatatatttataaatgagaactgttggatgacacctttgacatatcagccaatatcaatcaagctgaagactccagacactgtctgtgtgactgtaacatttcttcaaggaaagtatagcgtctatggagttcagagggcacgtgtttgggggaaaatatatatgacatgaagaagaagatgaagaaaaatgagaaaaaaacacacaaaaggcaactttaaaacaaaatatcacgagcagacggggaggctgaagggctgggagctgggaggagacgctgcttaccgatcccggggcttttccagcccacgggcgcctgacgcaggctggggcaagtggtgcgtggggcctggtccccaaggggcggctgagaggccgccactgagcatctctatctgtcattcctttagctatttagggaccaaaggaccaaactttttattgcagatgtgtagctctatgtcaaatagagggggaatggaggaccccctccttcctgcctcatggctgttcttgaaacagcttagagcgattctatgaaaaaatgtaataaaaaattaaaaaaaaaacaaaaaacaaaaaaaacaacaaaaaaaggaaaaataacgcttcaatgcttttaaaacagcaagataatagttctttgatactttgagaggcgctttgatgaccctcatccaagtctatgacactttcctatggttttctgtattctatgtctggatggagctgttaaaagatgaacaaattggtggatatttggggaaagcaacacaaatcttaaaactcacccgtgaagtgtgagaaaacaaggaggggaacaaatgggacttaccaagcaaggtcattgttgtgaaaagtctgtaaatgcttctaactcttccccctcttaaaatcataatagttgtacagaattttaaaaaggaaaagtttaaaatacctatataatagaagaaaaattagaggaaagcaaaaaataaaaaaaaaaaataaaaaaggaaaaaaaaaacctatagaagttagcattactgctaaaatcccagatgttgtaggactgtacttttgtagagtttagacagagcatcaatcccttctccccgcgagtgcagtcggatgccgttgtccccaagggccaggccgaactcgccccacacctgcgggcgcctggctgccgacgccggtggaggccacgccgtcggtcgggaacggtcgcgtcgcccgggtcgccgccgccgccgccgccgtcatcctcgcctctcgcttccctctgggagctgcgcgcgcttcactcaccttccgcttcactcgccttccacgcttgctccagagactttccgggcaagggagaactgggaactttcatcttaaaacaactagacaacacacacacacacaaaaccttaaaaaagagagagaaaaataaacaatctttgaagaatttctgaaactgtttacaaggaattttgaaaaacagggatgtttaaatgatgccggctctgtttttctgtaaataaatttgcatattttgtaggacttttaattgtaatgatagagaaaaaaacaaggaaaactatttaatgaaagcacgatatttatctttggtaaatgactttagagcagttaaagacattgcttaaaaaactcagaatcagaaaaaacactgaattatttaagaacacatatattttaaagtataacatatttattataatttatttgcacccttgggaagattgctttggcattctgccttgattccttctcattgatgtccaggtcatctggaggccgggggttctcagacctaccagtttccctttagaagaacaaatttccagttcctctagggcctcctgcctttcctttctttctgtcaattttgttgttgttgttgtttttcattttctttttttctcttgactcctccttttaggatgtccagatgtaaaaaaaaaaaaaaaaaaaagaaaaaaagaaaaaaaaaagaaaacagctgcagttcagtacaactgctcttttcacactcaactccctaaaactccttgtaaccttctgtaactattggatgacgctttctccagcttagccctaaataaagcacagttt

SEQ ID NO: 123194 - DNA, 426 bp, Homo sapiens
  Payload ID: 4192
  Gene Symbol: CELF4
  Gene Name: CUGBP, Elav-like family member 4
  ENST ID: ENST00000593271
  CDS Start-End: 13-426
gcggccgcacctatgaccccaacctcaggtggcagcacccctccgggcatcactgcaccagccgtgcctagcatcccatcccccattggggtgaatggcttcaccggcctccccccacaggccaatgggcaacctgctgcggaagctgtgttcgccaatggcatccacccctacccagcacagagccccaccgccgcggaccccctgcagcaggcctacgccggagtgcagcagtatgcaggtcctgcctaccctgctgcctatggtcagataagccaggcctttcctcagccgcctccaatgatcccccagcagcagagagaaggcttcgtgagcttcgacaacccggccagcgcgcagaccgccatccaggccatgaacggcttccagatcggcatgaagaggctcaaggtgcagctgaagcgg

SEQ ID NO: 123195 - DNA, 556 bp, Homo sapiens
  Payload ID: 4192
  Gene Symbol: CELF4
  Gene Name: CUGBP, Elav-like family member 4
  ENST ID: ENST00000589386
  CDS Start-End: 13-556
gcggccgcacctatgaccccaacctcaggtggcagcacccctccgggcatcactgcaccagccgtgcctagcatcccatcccccattggggtgaatggcttcaccggcctccccccacaggccaatgggcaacctgctgcggaagctgtgttcgccaatggcatccacccctacccagcacagagccccaccgccgcggaccccctgcagcaggcctacgccggagtgcagcagtatgcaggtccagctgcctaccctgctgcctatggtcagataagccaggcctttcctcagccgcctccaatgatcccccagcagcagagagaagggcccgagggctgtaacctgttcatctaccatctgccccaggagtttggggacgctgagctgatgcagatgttcctccctttcggtaatgtcatctcctcgaaagtgtttgtggatcgggcgactaaccaaagtaaatgctttggcttcgtgagcttcgacaacccggccagcgcgcagaccgccatccaggccatgaacggcttccagatcggcatgaagaggctca

SEQ ID NO: 123196 - DNA, 592 bp, Homo sapiens
  Payload ID: 4192
  Gene Symbol: CELF4
  Gene Name: CUGBP, Elav-like family member 4
  ENST ID: ENST00000589229
  CDS Start-End: 106-592
agtgcacgggagagaaagagaggctgcgccttcctcacctactgcgagcgtgagtcagcgctgaaggcccagagcgcgctgcacgagcagaagactctgcccgggatgaaccggccgatccaggtgaagcctgcggacagcgagagccgaggaggtagtagctgcctgcgccagcccccttcacaagatagaaaactcttcgtgggcatgctcaacaagcaacagtccgaggacgacgtgcgccgccttttcgaggcctttgggaacatcgaggagtgcaccatcctgcgcgggcccgacggcaacagcaaggggtgcgcctttgtgaagtactcctcccacgccgaggcgcaggccgccatcaacgcgctacacggcagccagaccatgccgggagcctcgtccagtctggtggtcaagttcgccgacaccgacaaggagcgcacgatgcggcgaatgcagcagatggctggccagatgggcatgttcaaccccatggccatccctttcggggcctacggcgcctacgctcaggcactgatgcagcagcaagcggccctgatggcatcagtcgcgcagggcggctacctga

SEQ ID NO: 123197 - DNA, 2542 bp, Homo sapiens
  Payload ID: 4192
  Gene Symbol: CELF4
  Gene Name: CUGBP, Elav-like family member 4
  ENST ID: ENST00000586009
  CDS Start-End: 1-347
caggtggcagcacccctccgggcatcactgcaccagccgtgcctagcatcccatcccccattggggtgaatggcttcaccggcctccccccacaggccaatgggcaacctgctgcggaagctgtgttcgccaatggcatccacccctacccagcacagagccccaccgccgcggaccccctgcagcaggcctacgccggagtgcagcagtatgcaggtcgcttcgtgagcttcgacaacccggccagcgcgcagaccgccatccaggccatgaacggcttccagatcggcatgaagaggctcaaggtgcagctgaagcggcccaaagacgccaatcgcccgtactgagcgccggcgggagcgtcccccgggggagaccaggactcgcacagggcaggatgctgaacgggctacattaaaaaacaaacctctctctatatatatttataaatgagaactgttggatgacacctttgacatatcagccaatatcaatcaagctgaagactccagacactgtctgtgtgactgtaacatttcttcaaggaaagtatagcgtctatggagttcagagggcacgtgtttgggggaaaatatatatgacatgaagaagaagatgaagaaaaatgagaaaaaaacacacaaaaggcaactttaaaacaaaatatcacgagcagacggggaggctgaagggctgggagctgggaggagacgctgcttaccgatcccggggcttttccagcccacgggcgcctgacgcaggctggggcaagtggtgcgtggggcctggtccccaaggggcggctgagaggccgccactgagcatctctatctgtcattcctttagctatttagggaccaaaggaccaaactttttattgcagatgtgtagctctatgtcaaatagagggggaatggaggaccccctccttcctgcctcatggctgttcttgaaacagcttagagcgattctatgaaaaaatgtaataaaaaattaaaaaaaaaacaaaaaacaaaaaaaacaacaaaaaaaggaaaaataacgcttcaatgcttttaaaacagcaagataatagttctttgatactttgagaggcgctttgatgaccctcatccaagtctatgacactttcctatggttttctgtattctatgtctggatggagctgttaaaagatgaacaaattggtggatatttggggaaagcaacacaaatcttaaaactcacccgtgaagtgtgagaaaacaaggaggggaacaaatgggacttaccaagcaaggtcattgttgtgaaaagtctgtaaatgcttctaactcttccccctcttaaaatcataatagttgtacagaattttaaaaaggaaaagtttaaaatacctatataatagaagaaaaattagaggaaagcaaaaaataaaaaaaaaaaataaaaaaggaaaaaaaaaacctatagaagttagcattactgctaaaatcccagatgttgtaggactgtacttttgtagagtttagacagagcatcaatcccttctccccgcgagtgcagtcggatgccgttgtccccaagggccaggccgaactcgccccacacctgcgggcgcctggctgccgacgccggtggaggccacgccgtcggtcgggaacggtcgcgtcgcccgggtcgccgccgccgccgccgccgtcatcctcgcctctcgcttccctctgggagctgcgcgcgcttcactcaccttccgcttcactcgccttccacgcttgctccagagactttccgggcaagggagaactgggaactttcatcttaaaacaactagacaacacacacacacacaaaaccttaaaaaagagagagaaaaataaacaatctttgaagaatttctgaaactgtttacaaggaattttgaaaaacagggatgtttaaatgatgccggctctgtttttctgtaaataaatttgcatattttgtaggacttttaattgtaatgatagagaaaaaaacaaggaaaactatttaatgaaagcacgatatttatctttggtaaatgactttagagcagttaaagacattgcttaaaaaactcagaatcagaaaaaacactgaattatttaagaacacatatattttaaagtataacatatttattataatttatttgcacccttgggaagattgctttggcattctgccttgattccttctcattgatgtccaggtcatctggaggccgggggttctcagacctaccagtttccctttagaagaacaaatttccagttcctctagggcctcctgcctttcctttctttctgtcaattttgttgttgttgttgtttttcattttctttttttctcttgactcctccttttaggatgtccagatgtaaaaaaaaaaaaaaaaaaaagaaaaaaagaaaaaaaaaagaaaacagctgcagttcagtacaactgctcttttcacactcaactccctaaaactccttgtaaccttctgtaactattggatgacgctttctccagcttagccctaaataaagcacagttt

SEQ ID NO: 123198 - DNA, 410 bp, Homo sapiens
  Payload ID: 4192
  Gene Symbol: CELF4
  Gene Name: CUGBP, Elav-like family member 4
  ENST ID: ENST00000587657
  CDS Start-End: 13-410
gcggccgcacctatgaccccaacctcaggtggcagcacccctccgggcatcactgcaccagccgtgcctagcatcccatcccccattggggtgaatggcttcaccggcctccccccacaggccaatgggcaacctgctgcggaagctgtgttcgccaatggcatccacccctacccagcacagagccccaccgccgcggaccccctgcagcaggcctacgccggagtgcagcagtatgcagcagctgcctaccctgctgcctatggtcagataagccaggcctttcctcagccgcctccaatgatcccccagcagcagagagaagggcccgagggctgtaacctgttcatctaccatctgccccaggagtttggggacgctgagctgatgcagatgttcctccctttcgg

SEQ ID NO: 123199 - DNA, 329 bp, Homo sapiens
  Payload ID: 4192
  Gene Symbol: CELF4
  Gene Name: CUGBP, Elav-like family member 4
  ENST ID: ENST00000587924
  CDS Start-End: 129-329
ctcctaccggccagaaagacagcccatggtcaagtgtggctagaggctgcgccttcctcacctactgcgagcgtgagtcagcgctgaaggcccagagcgcgctgcacgagcagaagactctgcccgggatgaaccggccgatccaggtgaagcctgcggacagcgagagccgaggaggtaaagatagaaaactcttcgtgggcatgctcaacaagcaacagtccgaggacgacgtgcgccgccttttcgaggcctttgggaacatcgaggagtgcaccatcctgcgcgggcccgacggcaacagcaaggggtgcgcctttgtgaagtac

SEQ ID NO: 123200 - DNA, 677 bp, Homo sapiens
  Payload ID: 4192
  Gene Symbol: CELF4
  Gene Name: CUGBP, Elav-like family member 4
  ENST ID: ENST00000587819
  CDS Start-End: 216-677
gggaagatgcagggtggggagactccgcggagggagcaaaatagaaaagcaaagggaggtacgagaggcagacagccgggaacaccgagaggcagagaagctccgagaacagtgcacgggagagaaagagaggctgcgccttcctcacctactgcgagcgtgagtcagcgctgaaggcccagagcgcgctgcacgagcagaagactctgcccgggatgaaccggccgatccaggtgaagcctgcggacagcgagagccgaggagatagaaaactcttcgtgggcatgctcaacaagcaacagtccgaggacgacgtgcgccgccttttcgaggcctttgggaacatcgaggagtgcaccatcctgcgcgggcccgacggcaacagcaaggggtgcgcctttgtgaagtactcctcccacgccgaggcgcaggccgccatcaacgcgctacacggcagccagaccatgccgggagcctcgtccagtctggtggtcaagttcgccgacaccgacaaggagcgcacgatgcggcgaatgcagcagatggctggccagatgggcatgttcaaccccatggccatccctttcggggcctacggcgcctacgctcaggcactgatgcagcagcaagcggccctgatggcatcagtcgcgcagggcggctacctgaaccccatg

SEQ ID NO: 123201 - DNA, 1444 bp, Homo sapiens
  Payload ID: 4192
  Gene Symbol: CELF4
  Gene Name: CUGBP, Elav-like family member 4
  ENST ID: ENST00000588597
  CDS Start-End: 11-1375
gattttctctatgtatataaagatggccacgttagcaaacggacaggctgacaacgcaagcctcagtaccaacgggctcggcagcagcccgggcagtgccgggcacatgaacggattaagccacagcccggggaacccgtcgaccattcccatgaaggaccacgatgccatcaagctgttcattgggcagatcccccgcaacctggatgagaaggacctcaagcccctcttcgaggagtttggcaaaatctacgagcttacggttctgaaggacaggttcacaggcatgcacaaaggctgcgccttcctcacctactgcgagcgtgagtcagcgctgaaggcccagagcgcgctgcacgagcagaagactctgcccgggatgaaccggccgatccaggtgaagcctgcggacagcgagagccgaggagatagaaaactcttcgtgggcatgctcaacaagcaacagtccgaggacgacgtgcgccgccttttcgaggcctttgggaacatcgaggagtgcaccatcctgcgcgggcccgacggcaacagcaaggggtgcgcctttgtgaagtactcctcccacgccgaggcgcaggccgccatcaacgcgctacacggcagccagaccatgccgggagcctcgtccagtctggtggtcaagttcgccgacaccgacaaggagcgcacgatgcggcgaatgcagcagatggctggccagatgggcatgttcaaccccatggccatccctttcggggcctacggcgcctacgctcaggcactgatgcagcagcaagcggccctgatggcatcagtcgcgcagggcggctacctgaaccccatggctgccttcgctgccgcccagatgcagcagatggcggccctcaacatgaatggcctggcggccgcacctatgaccccaacctcaggtggcagcacccctccgggcatcactgcaccagccgtgcctagcatcccatcccccattggggtgaatggcttcaccggcctccccccacaggccaatgggcaacctgctgcggaagctgtgttcgccaatggcatccacccctacccagcacagagccccaccgccgcggaccccctgcagcaggcctacgccggagtgcagcagtatgcaggtcctgcctaccctgctgcctatggtcagataagccaggcctttcctcagccgcctccaatgatcccccagcagcagagagaagggcccgagggctgtaacctgttcatctaccatctgccccaggagtttggggacgctgagctgatgcagatgttcctccctttcggtaatgtcatctcctcgaaagtgtttgtggatcgggcgactaaccaaagtaaatgctttggtgggtaaagataacaaaccaattagcttcacctaggacagggcggtgctcgcaccaacctaccggtgtccgactgc

SEQ ID NO: 123202 - DNA, 2651 bp, Homo sapiens
  Payload ID: 4192
  Gene Symbol: CELF4
  Gene Name: CUGBP, Elav-like family member 4
  ENST ID: ENST00000588591
  CDS Start-End: 1-456
gcggccgcacctatgaccccaacctcaggtggcagcacccctccgggcatcactgcaccagccgtgcctagcatcccatcccccattggggtgaatggcttcaccggcctccccccacaggccaatgggcaacctgctgcggaagctgtgttcgccaatggcatccacccctacccagcacagagccccaccgccgcggaccccctgcagcaggcctacgccggagtgcagcagtatgcaggtccagctgcctaccctgctgcctatggtcagataagccaggcctttcctcagccgcctccaatgatcccccagcagcagagagaaggcttcgtgagcttcgacaacccggccagcgcgcagaccgccatccaggccatgaacggcttccagatcggcatgaagaggctcaaggtgcagctgaagcggcccaaagacgccaatcgcccgtactgagcgccggcgggagcgtcccccgggggagaccaggactcgcacagggcaggatgctgaacgggctacattaaaaaacaaacctctctctatatatatttataaatgagaactgttggatgacacctttgacatatcagccaatatcaatcaagctgaagactccagacactgtctgtgtgactgtaacatttcttcaaggaaagtatagcgtctatggagttcagagggcacgtgtttgggggaaaatatatatgacatgaagaagaagatgaagaaaaatgagaaaaaaacacacaaaaggcaactttaaaacaaaatatcacgagcagacggggaggctgaagggctgggagctgggaggagacgctgcttaccgatcccggggcttttccagcccacgggcgcctgacgcaggctggggcaagtggtgcgtggggcctggtccccaaggggcggctgagaggccgccactgagcatctctatctgtcattcctttagctatttagggaccaaaggaccaaactttttattgcagatgtgtagctctatgtcaaatagagggggaatggaggaccccctccttcctgcctcatggctgttcttgaaacagcttagagcgattctatgaaaaaatgtaataaaaaattaaaaaaaaaacaaaaaacaaaaaaaacaacaaaaaaaggaaaaataacgcttcaatgcttttaaaacagcaagataatagttctttgatactttgagaggcgctttgatgaccctcatccaagtctatgacactttcctatggttttctgtattctatgtctggatggagctgttaaaagatgaacaaattggtggatatttggggaaagcaacacaaatcttaaaactcacccgtgaagtgtgagaaaacaaggaggggaacaaatgggacttaccaagcaaggtcattgttgtgaaaagtctgtaaatgcttctaactcttccccctcttaaaatcataatagttgtacagaattttaaaaaggaaaagtttaaaatacctatataatagaagaaaaattagaggaaagcaaaaaataaaaaaaaaaaataaaaaaggaaaaaaaaaacctatagaagttagcattactgctaaaatcccagatgttgtaggactgtacttttgtagagtttagacagagcatcaatcccttctccccgcgagtgcagtcggatgccgttgtccccaagggccaggccgaactcgccccacacctgcgggcgcctggctgccgacgccggtggaggccacgccgtcggtcgggaacggtcgcgtcgcccgggtcgccgccgccgccgccgccgtcatcctcgcctctcgcttccctctgggagctgcgcgcgcttcactcaccttccgcttcactcgccttccacgcttgctccagagactttccgggcaagggagaactgggaactttcatcttaaaacaactagacaacacacacacacacaaaaccttaaaaaagagagagaaaaataaacaatctttgaagaatttctgaaactgtttacaaggaattttgaaaaacagggatgtttaaatgatgccggctctgtttttctgtaaataaatttgcatattttgtaggacttttaattgtaatgatagagaaaaaaacaaggaaaactatttaatgaaagcacgatatttatctttggtaaatgactttagagcagttaaagacattgcttaaaaaactcagaatcagaaaaaacactgaattatttaagaacacatatattttaaagtataacatatttattataatttatttgcacccttgggaagattgctttggcattctgccttgattccttctcattgatgtccaggtcatctggaggccgggggttctcagacctaccagtttccctttagaagaacaaatttccagttcctctagggcctcctgcctttcctttctttctgtcaattttgttgttgttgttgtttttcattttctttttttctcttgactcctccttttaggatgtccagatgtaaaaaaaaaaaaaaaaaaaagaaaaaaagaaaaaaaaaagaaaacagctgcagttcagtacaactgctcttttcacactcaactccctaaaactccttgtaaccttctgtaactattggatgacgctttctccagcttagccctaaataaagcacagttt

SEQ ID NO: 123203 - DNA, 3236 bp, Homo sapiens
  Payload ID: 4192
  Gene Symbol: CELF4
  Gene Name: CUGBP, Elav-like family member 4
  ENST ID: ENST00000590112
  CDS Start-End: 53-805
gtcagcgctgaaggcccagagcgcgctgcacgagcagaagactctgcccgggatgaaccggccgatccaggtgaagcctgcggacagcgagagccgaggagatagaaaactcttcgtgggcatgctcaacaagcaacagtccgaggacgacgtgcgccgccttttcgaggcctttgggaacatcgaggagtgcaccatcctgcgcgggcccgacggcaacagcaaggggtgcgcctttgtgaagtactcctcccacgccgaggcgcaggccgccatcaacgcgctacacggcagccagaccatgccggtgagtgctggccccttggggcgggggcgagggcagcggcgggccgagaccccagcacccgccacgccccgccggctgtccagtctccccaagagacaggaaagcatgacccttattccgggcctcagacaaggacgcggaagcccagggatgttaaggaactggcctgaggttacccaggtggaaaatgcccgcggtggggttcacacctcattcccctgggcgagcgccgatgccgcctcctccaaagcgccccgaggagcgggcggggtgggcgcaggccagaggcaccgacagctgcgggcggaggctctggagcaggtgggtctcacgcgccgccccggccgcagggagcctcgtccagtctggtggtcaagttcgccgacaccgacaaggagcgcacgatgcggcgaatgcagcagatggctggccagatgggcatgttcaaccccatggccatccctttcggggcctacggcgcctacgctcaggcagtaagtggcagcgcgcacgggcagcggttctcaagctcactcccctgggagcctcagagagcgggacatgaaaccgaaaatactactctatcccttgccctctccctccagagtgaggaggggccgggaatgaacccatgaacctggggggtttaacttcagaagggtttgaaagaaggctggcccagttggggtggctgccaggaggaggtgggctgctgtcttagttctaaggggcagagctgagagaggccccacagaaaagtgggttaccctgagccttttcctctcagccagatcaacgttgaaccccaggaagcacagatgagagggtgaggttcaggtcattggttgcaaaccacccctactccatggaacggtgacttcaggccttctggtctctcctggcagggctcctgtgaggtgccctaaagccctacacacccacacttctgatatcccctcaggcctctggcccacctacttctttcttccacatgggggcccactctgtcagcctctcccggagctgcctgcagactggtaaccacagctcccatgtgggtggcactgaggcaggccacggttctgggtctgaaaatgcaagcttacctcacttctgcagtactgtccgccttggccacattccgcagcctcccctgtccgcactcacctttgtgacaacactaggggtgcctggggttctattcataattctcctgtcacttctaccaacagactccaaattaaaaccattctggacagaaacctgtgctaagtgagttctgcagaggctcatccagcatgtctctagtgctttggatgtcacttccccacgaatgacaggctgtacacagggctgactagcacccacagagccagtctcctcctctgcccctagcaacaactttggagttccaaagaccctagcattacttttaaatacagtcatctctcagggtggtggactctaatagctgttgaggtacagggcaagaatgggagaggcatcagggctttctggagtggtagttgggagcttctggggctcagagcctgggagattggtctccaggagctgaggcccctgtcggggagggatgccccctggaagcacgtgatattttttccactccctctgccccagctgatgcagcagcaagcggccctgatggcatcagtcgcgcagggcggctacctgaaccccatggctgccttcgctgccgcccagatgcagcagatggcggccctcaacatgaatggcctggcggccgcacctatgaccccaacctcaggtggcagcacccctccgggcatcactgcaccagccgtgcctagcatcccatcccccattggggtgaatggcttcaccggcctccccccacaggccaatgggcaacctgctgcggaagctgtgttcgccaatggcatccacccctacccagcacagagccccaccgccgcggaccccctgcagcaggcctacgccggagtgcagcagtatgcaggtccagctgcctaccctgctgcctatggtcagataagccaggcctttcctcagccgcctccaatgatcccccagcagcagagagaagggcccgagggctgtaacctgttcatctaccatctgccccaggagtttggggacgctgagctgatgcagatgttcctccctttcggcttcgtgagcttcgacaacccggccagcgcgcagaccgccatccaggccatgaacggcttccagatcggcatgaagaggctcaaggtgcagctgaagcggcccaaagacgccaatcgcccgtactgagcgccggcgggagcgtcccccgggggagaccaggactcgcacagggcaggatgctgaacgggctacattaaaaaacaaacctctctctatatatatttataaatgagaactgttggatgacacctttgacatatcagccaatatcaatcaagctgaagactccagacactgtctgtgtgactgtaacatttcttcaaggaaagtatagcgtctatggagttcagagggcacgtgtttgggggaaaatatatatgacatgaagaagaagatgaagaaaaatgagaaaaaaacacacaaaaggcaactttaaaacaaaatatcacgagcagacggggaggctgaagggctgggagctgggaggagacgctgcttaccgatcccggggcttttccagcccacgggcgcctgacgcaggctggggcaagtggtgcgtggggcctggtccccaaggggcggctgagaggccgccactgagcatctctatctgtcattcctttagctatttagggaccaaaggaccaaactttttattgcagatgtgtagctctatgtcaaatagagggggaatggaggaccccctccttcctgcctcatggctgttcttgaaacagcttagagcgattctatg

SEQ ID NO: 123204 - DNA, 1836 bp, Homo sapiens
  Payload ID: 4192
  Gene Symbol: CELF4
  Gene Name: CUGBP, Elav-like family member 4
  ENST ID: ENST00000601019
  CDS Start-End: 108-1562
gagaacccgagtgtgtgtatgcgtgtgcgtgtgtgagcgcgagcgagcgagagagaggagcgagagagtgtgagcgagaaagaataaaaggaaagaagattttctctatgtatataaagatggccacgttagcaaacggacaggctgacaacgcaagcctcagtaccaacgggctcggcagcagcccgggcagtgccgggcacatgaacggattaagccacagcccggggaacccgtcgaccattcccatgaaggaccacgatgccatcaagctgttcattgggcagatcccccgcaacctggatgagaaggacctcaagcccctcttcgaggagtttggcaaaatctacgagcttacggttctgaaggacaggttcacaggcatgcacaaaggctgcgccttcctcacctactgcgagcgtgagtcagcgctgaaggcccagagcgcgctgcacgagcagaagactctgcccgggatgaaccggccgatccaggtgaagcctgcggacagcgagagccgaggaggtagtagctgcctgcgccagcccccttcacatagaaaactcttcgtgggcatgctcaacaagcaacagtccgaggacgacgtgcgccgccttttcgaggcctttgggaacatcgaggagtgcaccatcctgcgcgggcccgacggcaacagcaaggggtgcgcctttgtgaagtactcctcccacgccgaggcgcaggccgccatcaacgcgctacacggcagccagaccatgccgggagcctcgtccagtctggtggtcaagttcgccgacaccgacaaggagcgcacgatgcggcgaatgcagcagatggctggccagatgggcatgttcaaccccatggccatccctttcggggcctacggcgcctacgctcagctgatgcagcagcaagcggccctgatggcatcagtcgcgcagggcggctacctgaaccccatggctgccttcgctgccgcccagatgcagcagatggcggccctcaacatgaatggcctggcggccgcacctatgaccccaacctcaggtggcagcacccctccgggcatcactgcaccagccgtgcctagcatcccatcccccattggggtgaatggcttcaccggcctccccccacaggccaatgggcaacctgctgcggaagctgtgttcgccaatggcatccacccctacccagcacagagccccaccgccgcggaccccctgcagcaggcctacgccggagtgcagcagtatgcaggtccagctgcctaccctgctgcctatggtcagataagccaggcctttcctcagccgcctccaatgatcccccagcagcagagagaagggcccgagggctgtaacctgttcatctaccatctgccccaggagtttggggacgctgagctgatgcagatgttcctccctttcggcttcgtgagcttcgacaacccggccagcgcgcagaccgccatccaggccatgaacggcttccagatcggcatgaagaggctcaaggtgcagctgaagcggcccaaagacgccaatcgcccgtactgagcgccggcgggagcgtcccccgggggagaccaggactcgcacagggcaggatgctgaacgggctacattaaaaaacaaacctctctctatatatatttataaatgagaactgttggatgacacctttgacatatcagccaatatcaatcaagctgaagactccagacactgtctgtgtgactgtaacatttcttcaaggaaagtatagcgtctatggagttcagagggcacgtgtttgggggaaaatatatatgacatgaagaagaagatgaag

SEQ ID NO: 123205 - DNA, 989 bp, Homo sapiens
  Payload ID: 4192
  Gene Symbol: CELF4
  Gene Name: CUGBP, Elav-like family member 4
  ENST ID: ENST00000601392
  CDS Start-End: 108-989
gagaacccgagtgtgtgtatgcgtgtgcgtgtgtgagcgcgagcgagcgagagagaggagcgagagagtgtgagcgagaaagaataaaaggaaagaagattttctctatgtatataaagatggccacgttagcaaacggacaggctgacaacgcaagcctcagtaccaacgggctcggcagcagcccgggcagtgccgggcacatgaacggattaagccacagcccggggaacccgtcgaccattcccatgaaggaccacgatgccatcaagctgttcattgggcagatcccccgcaacctggatgagaaggacctcaagcccctcttcgaggagtttggcaaaatctacgagcttacggttctgaaggacaggttcacaggcatgcacaaaggctgcgccttcctcacctactgcgagcgtgagtcagcgctgaaggcccagagcgcgctgcacgagcagaagactctgcccgggatgaaccggccgatccaggtgaagcctgcggacagcgagagccgaggagaagatagaaaactcttcgtgggcatgctcaacaagcaacagtccgaggacgacgtgcgccgccttttcgaggcctttgggaacatcgaggagtgcaccatcctgcgcgggcccgacggcaacagcaaggggtgcgcctttgtgaagtactcctcccacgccgaggcgcaggccgccatcaacgcgctacacggcagccagaccatgccgggagcctcgtccagtctggtggtcaagttcgccgacaccgacaaggagcgcacgatgcggcgaatgcagcagatggctggccagatgggcatgttcaaccccatggccatccctttcggggcctacggcgcctacgctcaggcactgatgcagcagcaagcggccctgatggcatcagtcgcgcagggcggctacctgaaccccatggctgccttcgctgccgcccagatgcagcagatggcggccctcaacatg

SEQ ID NO: 123206 - DNA, 532 bp, Homo sapiens
  Payload ID: 4192
  Gene Symbol: CELF4
  Gene Name: CUGBP, Elav-like family member 4
  ENST ID: ENST00000587911
  CDS Start-End: 1-209
ctgcctaccctgctgcctatggtcagataagccaggcctttcctcagccgcctccaatgatcccccagcagcagagagaaggcttcgtgagcttcgacaacccggccagcgcgcagaccgccatccaggccatgaacggcttccagatcggcatgaagaggctcaaggtgcagctgaagcggcccaaagacgccaatcgcccgtactgagcgccggcgggagcgtcccccgggggagaccaggactcgcacagggccagtcaaatccaccacagtctcgcgctgagctaggaataaagttcacgtaatcacatgagagtggagaaaagtcccccatccggcaggatgctgaacgggctacattaaaaaacaaacctctctctatatatatttataaatgagaactgttggatgacacctttgacatatcagccaatatcaatcaagctgaagactccagacactgtctgtgtgactgtaacatttcttcaaggaaagtatagcgtctatggagttcagagggcacgtgtttg

SEQ ID NO: 123207 - DNA, 1906 bp, Homo sapiens
  Payload ID: 4192
  Gene Symbol: CELF4
  Gene Name: CUGBP, Elav-like family member 4
  ENST ID: ENST00000603232
  CDS Start-End: 187-1644
cgcgagcgagcgagagaagaggagaaagagagagagcagagagcgagcggagagcgaggtgtagagaaaccgagggggagagaacccgagtgtgtgtatgcgtgtgcgtgtgtgagcgcgagcgagcgagagagaggagcgagagagtgtgagcgagaaagaataaaaggaaagaagattttctctatgtatataaagatggccacgttagcaaacggacaggctgacaacgcaagcctcagtaccaacgggctcggcagcagcccgggcagtgccgggcacatgaacggattaagccacagcccggggaacccgtcgaccattcccatgaaggaccacgatgccatcaagctgttcattgggcagatcccccgcaacctggatgagaaggacctcaagcccctcttcgaggagtttggcaaaatctacgagcttacggttctgaaggacaggttcacaggcatgcacaaaggctgcgccttcctcacctactgcgagcgtgagtcagcgctgaaggcccagagcgcgctgcacgagcagaagactctgcccgggatgaaccggccgatccaggtgaagcctgcggacagcgagagccgaggaggtagtagctgcctgcgccagcccccttcacaagatagaaaactcttcgtgggcatgctcaacaagcaacagtccgaggacgacgtgcgccgccttttcgaggcctttgggaacatcgaggagtgcaccatcctgcgcgggcccgacggcaacagcaaggggtgcgcctttgtgaagtactcctcccacgccgaggcgcaggccgccatcaacgcgctacacggcagccagaccatgccgggagcctcgtccagtctggtggtcaagttcgccgacaccgacaaggagcgcacgatgcggcgaatgcagcagatggctggccagatgggcatgttcaaccccatggccatccctttcggggcctacggcgcctacgctcaggcaatgcagcagcaagcggccctgatggcatcagtcgcgcagggcggctacctgaaccccatggctgccttcgctgccgcccagatgcagcagatggcggccctcaacatgaatggcctggcggccgcacctatgaccccaacctcaggtggcagcacccctccgggcatcactgcaccagccgtgcctagcatcccatcccccattggggtgaatggcttcaccggcctccccccacaggccaatgggcaacctgctgcggaagctgtgttcgccaatggcatccacccctacccagcacagagccccaccgccgcggaccccctgcagcaggcctacgccggagtgcagcagtatgcaggtccagctgcctaccctgctgcctatggtcagataagccaggcctttcctcagccgcctccaatgatcccccagcagcagagagaagggcccgagggctgtaacctgttcatctaccatctgccccaggagtttggggacgctgagctgatgcagatgttcctccctttcggcttcgtgagcttcgacaacccggccagcgcgcagaccgccatccaggccatgaacggcttccagatcggcatgaagaggctcaaggtgcagctgaagcggcccaaagacgccaatcgcccgtactgagcgccggcgggagcgtcccccgggggagaccaggactcgcacagggcaggatgctgaacgggctacattaaaaaacaaacctctctctatatatatttataaatgagaactgttggatgacacctttgacatatcagccaatatcaatcaagctgaagactccagacactgtctgtgtgactgtaacatttcttcaaggaaagtatagcgtctatggagttcagagggcacgtgtttgggggaaaatatatatgacatgaag

SEQ ID NO: 123208 - DNA, 1854 bp, Homo sapiens
  Payload ID: 4193
  Gene Symbol: CELF5
  Gene Name: CUGBP, Elav-like family member 5
  Uniprot ID: Q8N6W0
  ENST ID: ENST00000292672
  CDS Start-End: 38-1495
ccgccgccgccgccgccggctcggtcccgcgcccgccatggcccgcctgacggagagcgaggcgcgccggcagcagcagcagctcctgcagccgcggccctcgcccgtgggcagcagcgggcccgagccccccggggggcagcccgacggcatgaaggacctggacgccatcaaactcttcgtgggccagatcccgcggcacctggacgagaaggacctcaagccgctcttcgagcagttcggccgcatctacgagctcacggtgctcaaagacccctacacggggatgcacaaaggctgtgccttcctcacctactgtgccagggattccgccatcaaagctcagactgccctgcacgagcagaagaccttgcccggaatggcgcggccaatccaggtgaagcctgcggacagtgaaagccgcggaggtagggaccggaagctgttcgtggggatgctgaacaagcagcagtcggaggaggacgtgctgcggctgttccagcccttcggggtcattgacgagtgcaccgtgctccgggggcctgacggcagcagcaaaggctgtgctttcgtgaagttctcctcccacacggaggcgcaggcggccatccacgccttgcatgggagccagaccatgccgggagcctcctccagcctggtggtcaagttcgccgacacggacaaggagcggacgctccggcgcatgcagcagatggtgggccagctgggcatcctgacgccgtccctcacattgcccttcagcccctacagtgcctacgcccaggctctcatgcaacagcagacaacagtcctgtccacctcgggcagctacctgagtcccggcgtggccttctcaccctgtcacatccagcagataggcgccgtcagcctcaacgggctgcctgccacacccatcgctcctgcctctgggctgcactcacccccgctgctgggcaccaccgctgtgcctggcctcgtggctcccatcaccaatggctttgcaggtgtcgtgccctttccaggtgggcaccctgccctggaaaccgtctatgccaatggccttgtgccctacccagctcagagcccgactgtggccgagacactgcatcctgccttctccggagtccagcagtacacagccatgtaccccaccgcggccatcacgcccatcgcgcacagcgtcccccagccgccgcccctcctgcagcagcagcagcgagaaggtcccgagggctgtaacctgtttatctaccacctcccccaggagtttggagacacggagctgacgcagatgttcctacccttcggcaatatcatttcctccaaggtgtttatggatcgagctaccaaccagagcaagtgtttcggcttcgtgagctttgataacccggccagcgcccaggcagccatccaggccatgaacggcttccagatcggcatgaagaggctcaaagtccagctgaagcggcccaaagacccgggacacccctactgaccgcgcccacagccgccctgaggctgtaggcatggcccagacctgcgtgatttgtacaatgtactttatttctgctacgagtaatttcatgaagtttcaacttgcaaactgacttttgggacaaaccaacacacacacagaagagaaagcaaagaacttggaactttgggttgactcggtttgagttttgtgtcaaagaagatttcccgcggctgaagaggttggtgttcctgttacgtgtttcaggtgagaagcagcaaagcgtcttaatgttcaaaacgcctctctttggtctggagaaaaaaaaaaaaaaaaaaaaacaactaaaaatttatttaataaaagttttacttgctaaa

SEQ ID NO: 123209 - DNA, 1591 bp, Homo sapiens
  Payload ID: 4193
  Gene Symbol: CELF5
  Gene Name: CUGBP, Elav-like family member 5
  ENST ID: ENST00000334293
  CDS Start-End: 218-1180
attcagcctccccaggccccgtcggggaagtttgcacctgcggactccattgctttggttattttcacaaagccaggccggcggggcaggtccggccgcgggggacacggatgcccaggaccccaggctaatcggctgtgccttcctcacctactgtgccagggattccgccatcaaagctcagactgccctgcacgagcagaagaccttgcccggaatggcgcggccaatccaggtgaagcctgcggacagtgaaagccgcggaggtagggaccggaagctgttcgtggggatgctgaacaagcagcagtcggaggaggacgtgctgcggctgttccagcccttcggggtcattgacgagtgcaccgtgctccgggggcctgacggcagcagcaaaggctgtgctttcgtgaagttctcctcccacacggaggcgcaggcggccatccacgccttgcatgggagccagaccatgccgggagcctcctccagcctggtggtcaagttcgccgacacggacaaggagcggacgctccggcgcatgcagcagatggtgggccagctgggcatcctgacgccgtccctcacattgcccttcagcccctacagtgcctacgcccaggctctcatgcaacagcagacaacagtcctgtccacctcgggcagctacctgagtcccggcgtggccttctcaccctgtcacatccagcagataggcgccgtcagcctcaacgggctgcctgccacacccatcgctcctgcctctgggctgcactcacccccgctgctgggcaccaccgctgtgcctggcctcgtggctcccatcaccaatggctttgcaggtgtcgtgccctttccaggtgggcaccctgccctggaaaccgtctatgccaatggccttgtgccctacccagctcagagcccgactgtggccgagacactgcatcctgccttctccggagtccagcagtacacagccatgtaccccaccgcggccatcacgcccatcgcgcacagcgtcccccagccgccgcccctcctgcagcagcagcagcgagaaggagtttggagacacggagctgacgcagatgttcctacccttcggcaatatcatttcctccaaggtgtttatggatcgagctaccaaccagagcaagtgtttcggcttcgtgagctttgataacccggccagcgcccaggcagccatccaggccatgaacggcttccagatcggcatgaagaggctcaaagtccagctgaagcggcccaaagacccgggacacccctactgaccgcgcccacagccgccctgaggctgtaggcatggcccagacctgcgtgatttgtacaatgtactttatttctgctacgagtaatttcatgaagtttcaacttgcaaactgacttttgggacaaaccaacacacacacagaagagaaagcaaagaacttggaactttgggttgactcggtttgagttttgtgtcaaagaagatttcccgcggctgaagaggttggtgttcctgttacgtgtttcaggtgagaagcagcaaagcgtcttaatgttcaaaacgcctctctttggtctggag

SEQ ID NO: 123210 - DNA, 4268 bp, Homo sapiens
  Payload ID: 4193
  Gene Symbol: CELF5
  Gene Name: CUGBP, Elav-like family member 5
  Uniprot ID: Q8N6W0
  ENST ID: ENST00000541430
  CDS Start-End: 37-1266
cgccgccgccgccgccggctcggtcccgcgcccgccatggcccgcctgacggagagcgaggcgcgccggcagcagcagcagctcctgcagccgcggccctcgcccgtgggcagcagcgggcccgagccccccggggggcagcccgacggcatgaaggacctggacgccatcaaactcttcgtgggccagatcccgcggcacctggacgagaaggacctcaagccgctcttcgagcagttcggccgcatctacgagctcacggtgctcaaagacccctacacggggatgcacaaaggctgtgccttcctcacctactgtgccagggattccgccatcaaagctcagactgccctgcacgagcagaagaccttgcccggaatggcgcggccaatccaggtgaagcctgcggacagtgaaagccgcggaggtagggaccggaagctgttcgtggggatgctgaacaagcagcagtcggaggaggacgtgctgcggctgttccagcccttcggggtcattgacgagtgcaccgtgctccgggggcctgacggcagcagcaaaggctgtgctttcgtgaagttctcctcccacacggaggcgcaggcggccatccacgccttgcatgggagccagaccatgccgggagcctcctccagcctggtggtcaagttcgccgacacggacaaggagcggacgctccggcgcatgcagcagatggtgggccagctgggcatcctgacgccgtccctcacattgcccttcagcccctacagtgcctacgcccaggctctcatgcaacagcagacaacagtcctgtccacctcgggcagctacctgagtcccggcgtggccttctcaccctgtcacatccagcagataggcgccgtcagcctcaacgggctgcctgccacacccatcgctcctgcctctggtgtcgtgccctttccaggtgggcaccctgccctggaaaccgtctatgccaatggccttgtgccctacccagctcagagcccgactgtggccgagacactgcatcctgccttctccggagtccagcagtacacagccatgtaccccaccgcggccatcacgcccatcgcgcacagcgtcccccagccgccgcccctcctgcagcagcagcagcgagaaggagtttggagacacggagctgacgcagatgttcctacccttcggcaatatcatttcctccaaggtgtttatggatcgagctaccaaccagagcaagtgtttcggcttcgtgagctttgataacccggccagcgcccaggcagccatccaggccatgaacggcttccagatcggcatgaagaggctcaaagtccagctgaagcggcccaaagacccgggacacccctactgaccgcgcccacagccgccctgaggctgtaggcatggcccaggtgagccgccaggcggccccacccccgcccaagccccccgtcttgtctgaaaccccctcccgcggcccacttcatgctccaaaccctccccaggtggggtgatgcttcaagaggctacaagaaacctccgggttgggttggcggggacagagctggatgtagacacccccgatccccctgtggttggggctggagcagagggtgggaatggggtagggactgaggtgagccagggcccagtgaggtcggttagggaatccttcccggagaaggctttgagggctgaatagaagttcacctgagaggccaggtttgctctgggggtgggggtgcggtggggagggggttctgtcctgtcctatgagtctgttttccctgctgaaaacccaacaccagacggaaatgccaagtgcccaccccagaccccaaaccctaaggttggaccccaactcggaaccaggagtggagcgtggaaggtggggacagtgctcagggcccagtccagttggcactgacagcttccagtgtccccgctccatttccactagttcccctgggacaagcggcccctcactgggtgtcattcctacccaatgagttgatggaaaagtgggattcgtgccccacccaccatcatgcaagaaaaacaagcaaaacgaaacccagactgtagtttgccatcagggcaaaccactttctcaacatttttttgtggggggatgaacagtaaaccttgtggggccactgtggaaacttaaccgtgggtctcaaaccttgatgagcctcatctgtaaaatgggttcaagaaagtcatctccccagagacggcggaaacggtccacctagggaacagagtggggcatcttttcgcagccgagcccagaacccatcacctaaagagttctggatgattcgttttgattttttttttttttaaatcaccatcgctgtcgtcatcagagtctcgcctagggcctggcacagagtagacgctcagttagaagctgtctggccttttcaccttctcccgggtcagcacacacagatttgggagtatttacctgcacagaacgcaccttcaggaactgccaaccagaagcaaaatccaaagctgctctctgcgatcccttcacttttaactctcagtctgcactttttttttttaactgagcatctattatgtgctaggcactgttccagtgctcggggacgcagctgtgaatgaacagaaacgggggatggaggacaggggagaaacccccttcacgggccttagatggcagggggtagggaaggagagacagaaaataaacagaaatatctgtccccagctgccagaggaggaggaaatgggcttggtgatggtgacattaagttctttgaaagctgggtttgttggcctctgaactctggcctttgtgggatctgttcttttggaaaagatgggagcccctgtgttcctagatcccagcctggccgggtggagtagggtggggaggtggtgtccacctgtgtggccccgttctcactccctaacgcccgtcccttctcccccaggtgaggggccttcccatcccaggagggttttctgcttccaaccgatccaggacttacccataaattccaaccgttctttggacaccagccctttcctcccctcttctccccttgccctgcccctctactggaggccacctggagtggcgaggggcctttggggtctgtcctggggcaggggcgggggtgggggaggctcctgaatcgtgggcagaagtgttcacacgccccccctgctttgggaaacgctctcgcttcttccccacaaaacttggtgacttccccaaactaaatcacaccttttcctatatatatatatatgcatatatatatagatctatagacagtatatatatattttgagtacggatcatgggaccaaacttttccgacttccttccatccgagtagagtgaccctgggccggtcactcagcgggggacacaggaagggctgaggttggcgggaccccgcgcaacacataccaggtgccccacccccacccccaccacctcctggctggcacatcccaccaggaacccgccaacacaacatacctccaggacttttggcaccccccaccaccaattctccagggccgttgggctctgccagcttcagtgtccctggtcccagctgcagcctccagaccccacctcgccccttcgtcccagagccctgccctccgggatggatataggtacaacagagacgctctggcctgcctcagcccttctctgctcccctgcccgagtcatagccttactcatgtgaccaatagcccttagctttccgtcggagggggggggcggacagggttggggggagcccccctgcccctcaccaccccctcccaaggccaggcagccattgtccctgccttcgaatcaccagcctcgaatttaaggtcttgtaaccaggattgccaagcgtagcggaagaccctacccggaccggccaagcacccctttaactggagacgaacttgataatgaccttcatacctctacagagatttttttttttttccggtctttctgagcaggtacaaagaagaaaagagaagaaaaagatggggggaaaaaatcaaaccacaatggatttttgtttcctagttgggagtggggtggggtggggtgtctttgtgagggtgcctctgtacagctgcccaatccgcgacacccacgtcaaagcacagcatcaagttcgtttggacatccggcaaggcctcttaccaaatgaggcgccagataacttaataagctcaaaagaaaaaaacatttaaaaagaaag

SEQ ID NO: 123211 - DNA, 3115 bp, Homo sapiens
  Payload ID: 4193
  Gene Symbol: CELF5
  Gene Name: CUGBP, Elav-like family member 5
  ENST ID: ENST00000588350
  CDS Start-End: 43-930
agtgaaagccgcggaggtagggaccggaagctgttcgtggggatgctgaacaagcagcagtcggaggaggacgtgctgcggctgttccagcccttcggggtcattgacgagtgcaccgtgctccgggggcctgacggcagcagcaaaggctgtgctttcgtgaagttctcctcccacacggaggcgcaggcggccatccacgccttgcatgggagccagaccatgccgggagcctcctccagcctggtggtcaagttcgccgacacggacaaggagcggacgctccggcgcatgcagcagatggtgggccagctgggcatcctgacgccgtccctcacattgcccttcagcccctacagtgcctacgcccaggctctcatgcaacagcagacaacagtcctgtccacctcgggcagctacctgagtcccggcgtggccttctcaccctgtcacatccagcagataggcgccgtcagcctcaacgggctgcctgccacacccatcgctcctgcctctgggctgcactcacccccgctgctgggcaccaccgctgtgcctggcctcgtggctcccatcaccaatggctttgcaggtgtcgtgccctttccaggtgggcaccctgccctggaaaccgtctatgccaatggccttgtgccctacccagctcagagcccgactgtggccgagacactgcatcctgccttctccggagtccagcagtacacagccatgtaccccaccgcggccatcacgcccatcgcgcacagcgtcccccagccgccgcccctcctgcagcagcagcagcgagaaggagtttggagacacggagctgacgcagatgttcctacccttcggcaatatcatttcctccaaggtgtttatggatcgagctaccaaccagagcaagtgtttcggcttcgtgagctttgataacccggccagcgcccaggcagccatccaggccatgaacggcttccagatcggcatgaagaggctcaaagtccagctgaagcggcccaaagacccgggacacccctactgaccgcgcccacagccgccctgaggctgtaggcatggcccaggtgaggggccttcccatcccaggagggttttctgcttccaaccgatccaggacttacccataaattccaaccgttctttggacaccagccctttcctcccctcttctccccttgccctgcccctctactggaggccacctggagtggcgaggggcctttggggtctgtcctggggcaggggcgggggtgggggaggctcctgaatcgtgggcagaagtgttcacacgccccccctgctttgggaaacgctctcgcttcttccccacaaaacttggtgacttccccaaactaaatcacaccttttcctatatatatatatatgcatatatatatagatctatagacagtatatatatattttgagtacggatcatgggaccaaacttttccgacttccttccatccgagtagagtgaccctgggccggtcactcagcgggggacacaggaagggctgaggttggcgggaccccgcgcaacacataccaggtgccccacccccacccccaccacctcctggctggcacatcccaccaggaacccgccaacacaacatacctccaggacttttggcaccccccaccaccaattctccagggccgttgggctctgccagcttcagtgtccctggtcccagctgcagcctccagaccccacctcgccccttcgtcccagagccctgccctccgggatggatataggtacaacagagacgctctggcctgcctcagcccttctctgctcccctgcccgagtcatagccttactcatgtgaccaatagcccttagctttccgtcggagggggggggcggacagggttggggggagcccccctgcccctcaccaccccctcccaaggccaggcagccattgtccctgccttcgaatcaccagcctcgaatttaaggtcttgtaaccaggattgccaagcgtagcggaagaccctacccggaccggccaagcacccctttaactggagacgaacttgataatgaccttcatacctctacagagatttttttttttttccggtctttctgagcaggtacaaagaagaaaagagaagaaaaagatggggggaaaaaatcaaaccacaatggatttttgtttcctagttgggagtggggtggggtggggtgtctttgtgagggtgcctctgtacagctgcccaatccgcgacacccacgtcaaagcacagcatcaagttcgtttggacatccggcaaggcctcttaccaaatgaggcgccagataacttaataagctcaaaagaaaaaaacatttaaaaagaaagaaaaaaaaaaaaaaaaaaaccaagcatttccttttctttctaccaaaatgtgttgactgacccggagggggggcggtagggtgggggaaaccacacagaaaaaaaaaaaaaaaaaaaaaagaaaagaaaaaagaaaaaaaaatagaaaagaaaaaaaaaaatcttctgaaccaacttgtttcgatattccagagtttgataattgtttcgagactctcctctagcgtgcctgtgttccgtgtgtccccgtgtgcaagcgtgtgccatgccaatctgcctcgagggggcctcacccgtgtccgcggcgcccgccgaggcccccgagggcctgcttgggagtgtgtgccggtgtgcagttgtacgtgtctttctggtccatgtttactggctgtaaataccatttttatactccacatcgcagacctgcgtgatttgtacaatgtactttatttctgctacgagtaatttcatgaagtttcaacttgcaaactgacttttgggacaaaccaacacacacacagaagagaaagcaaagaacttggaactttgggttgactcggtttgagttttgtgtcaaagaagatttcccgcggctgaagaggttggtgttcctgttacgtgtttcaggtgagaagcagcaaagcgtcttaatgttcaaaacgcctctctttggtctggagaaaaaaaaaaaaaaaaaaaaacaactaaaaatttatttaataaaagttttacttgctaaa

SEQ ID NO: 123212 - DNA, 3345 bp, Homo sapiens
  Payload ID: 4194
  Gene Symbol: CELF6
  Gene Name: CUGBP, Elav-like family member 6
  Uniprot ID: Q96J87
  ENST ID: ENST00000287202
  CDS Start-End: 256-1701
gcacggggacctcaagccagaccccagcgttcagccgccacctcggcccgggcccgccccgccccggccccgcccctttcctgcccgccccaccccctctacgcccctccacccggaccccgccccctgggcagccccccgccctctccgcccgggctccgccccctccccctggccctcgccaccggtccagggaggggacggcgggacaggcgggaccagtgggaccggcgggagggctgacagggcggggacatggccgcggcgccgggagggtcagcgcagcccgctggccccggcccgcgcctgggtttcagcaccgcggacagcggcgtcggcatgagcgggctaaaccccggtcccgccgtacccatgaaggaccacgacgccatcaagctcttcgtggggcagatcccgcggggcttggacgagcaggacctcaagccgctgttcgaggagttcggccgcatctacgagctgacggtgctgaaggaccggctcaccggcctccacaaaggctgtgccttcctcacctactgcgcccgggactctgctctcaaggcccagagtgcactgcacgagcagaagaccctgccagggatgaatcgtccgatccaagtgaagccagctgccagtgagggccgaggagaggaccgaaagctgtttgtggggatgctgggcaagcagcagggtgaggaggacgtcagacgcctgttccagccctttggccacatcgaggagtgcacggtcctgcggagtcctgacggcaccagtaaaggctgtgcctttgtgaagttcgggagtcaaggggaagctcaggcggccatccggggtctgcacggcagccggaccatggcgggcgcctcgtccagcctcgtggtcaagctggcggacaccgaccgggagcgcgcgctgcggcggatgcagcagatggccggccacctgggcgccttccaccccgcgccactgccgctaggggcctgcggcgcctacaccacggcgatcctgcagcaccaggcggccctgctggcggcggcacagggcccaggcctaggcccggtggcggcagtggcggcccagatgcaacacgtggcggcctttagcctggtagctgcgcctctgttgcccgcggcagcagccaactccccgcctggcagcggccctggcaccctcccaggtcttccggcgcccatcggggtcaatggattcggccctctgaccccccagaccaatggccagccgggctccgacacgctctacaataacgggctctccccttatccagcccagagccccggcgtggctgaccccctgcagcaggcctacgctgggatgcaccactacgcagcagcctatccgtcggcctatgccccagtgagcacagcttttccccagcagccttcagccctgccccagcagcagagagaaggccccgaaggctgtaacctcttcatctatcacctgcctcaggagtttggtgatgcggaactcatacagacattcctgccctttggagccgttgtctctgctaaagtctttgtggatcgagccaccaaccagagcaagtgttttgggtttgttagttttgacaatccaactagtgcccagactgctattcaggcgatgaatggctttcaaattggcatgaagaggctcaaggtccagctaaagcggcccaaggatgccaaccggccttactgacctgctttcactgaccagccacagaaagaaacagaagagtgagaagaaaggagaggaaaagcacagaaacgcttgagcagcccttcccgaaggagcagctgcggacggaggtggatcggacccaaggctggtgcctggggctaaggccactctaaggattgtttttatcaagtgggttgttctgtgcctgcagcatagagcgcaggctggcagagcaaatagggctggtgaggagtgactgtccaggggaaccagcagagggcgttgggggtgccaagggcttctccgcaagggaagcccagatttacttctttcaaaatcatatcattccttagagtttagggaccaaaggactattgcttttttaagaatatatatatctatataaattaaaacaaagaaacaaacaaacaaaaaacaagacaaacaactacaaaaaaagacagtatagagtctcataaaagctgcctttaaatatccctaggagacagggtgaaggagacccttgacagccccagcctaggcagatgggggctgtggaaagattgttctgtgtctcattccctcttaagccactcccccaccctgcccttttaaaaataattaaggatttgaggtctaggctcacatgcaggtaatgagaacgttatggaagcagtgaacccacaatccacaatccccaaactcagagtgcatcccagaagaggccccaggcagagctcaggttggccctggcctttgccatcccgggaggccccctagccagcaagagtgggattgcctttcctgtggaaccactgcttccccaggcgggaagaaagagggagttctggccacctgagcctttcccttgccaatccaggtagacagaggccctgcctttggctgagctgagacacctcctgtttcccttccccttgaaccagtcccagtgtccccttgctccaggctaccttctgtctcttagtctaagtttgcccacctgtaaagtagattcaggatatctgtagagggctgtgacaacagacttggaaggtttgctactgtatatactgccattgagaaggggaaatttttcaatatgtagaagcttcagaattagaggtccctctttaccccagacctgggagggaagtagatgttttgccaaaatacttcttcattcctttaaaaactacatctttcctatgcaagagtgtctcacatgtgcttaaccgaggtgcttctagttggtgagcagtgttgagcttagaagtggtgtgtgctctgtctgtctgtctttgtctgtctgttgtatacagtgggtgccatataaagctgatcaatggtggtgcttcctgcctgcttctgtgagatgggcaaaagattcagcttagaacaccatgactcaccttgccttggtcagcctttcctgggcctgtagggccttgcacatatttttcccaggaggatttcccctccaccccacaggcatggatcagcttggtctgaggccccagctgtgtggggtccctctaatccccagatgttgctgaggctgaaggcctctgatctgataacatgtcagatagtaaaagatgtgggggtgggggtggagggctcctccttcataacagtttctaagaaaacttgttcccacctgtt

SEQ ID NO: 123213 - DNA, 1741 bp, Homo sapiens
  Payload ID: 4194
  Gene Symbol: CELF6
  Gene Name: CUGBP, Elav-like family member 6
  Uniprot ID: Q96J87
  ENST ID: ENST00000395258
  CDS Start-End: 215-1321
cgggaaggccgctgtttttccctcctggcactcagctgcctgccccccaacaataattcctcacctcccacgcacccagctcttggcagtttacaaagaccttttgcgtccccattacctcatgtgatccccacaacacccatgagaggaagatgaatcgtccgatccaagtgaagccagctgccagtgagggccgaggaggctcctgaacaggatgatctcagatcccccctcaaacaacagctggaactctgttctctatcttctagaggaccgaaagctgtttgtggggatgctgggcaagcagcagggtgaggaggacgtcagacgcctgttccagccctttggccacatcgaggagtgcacggtcctgcggagtcctgacggcaccagtaaaggctgtgcctttgtgaagttcgggagtcaaggggaagctcaggcggccatccggggtctgcacggcagccggaccatggcgggcgcctcgtccagcctcgtggtcaagctggcggacaccgaccgggagcgcgcgctgcggcggatgcagcagatggccggccacctgggcgccttccaccccgcgccactgccgctaggggcctgcggcgcctacaccacggcgatcctgcagcaccaggcggccctgctggcggcggcacagggcccaggcctaggcccggtggcggcagtggcggcccagatgcaacacgtggcggcctttagcctggtagctgcgcctctgttgcccgcggcagcagccaactccccgcctggcagcggccctggcaccctcccaggtcttccggcgcccatcggggtcaatggattcggccctctgaccccccagaccaatggccagccgggctccgacacgctctacaataacgggctctccccttatccagcccagagccccggcgtggctgaccccctgcagcaggcctacgctgggatgcaccactacgcagcagcctatccgtcggcctatgccccagtgagcacagcttttccccagcagccttcagccctgccccagcagcagagagaaggccccgaaggctgtaacctcttcatctatcacctgcctcaggagtttggtgatgcggaactcatacagacattcctgccctttggagccgttgtctctgctaaagtctttgtggatcgagccaccaaccagagcaagtgttttgggtttgttagttttgacaatccaactagtgcccagactgctattcaggcgatgaatggctttcaaattggcatgaagaggctcaaggtccagctaaagcggcccaaggatgccaaccggccttactgacctgctttcactgaccagccacagaaagaaacagaagagtgagaagaaaggagaggaaaagcacagaaacgcttgagcagcccttcccgaaggagcagctgcggacggaggtggatcggacccaaggctggtgcctggggctaaggccactctaaggattgtttttatcaagtgggttgttctgtgcctgcagcatagagcgcaggctggcagagcaaatagggctggtgaggagtgactgtccaggggaaccagcagagggcgttgggggtgccaagggcttctccgcaagggaagcccagatttacttctttcaaaatcatatcattccttagagtttagggaccaaaggactattgcttttttaagaatatatatatctatataaattaaaacaaagaaacaaacaaacaaaaaaca

SEQ ID NO: 123214 - DNA, 2497 bp, Homo sapiens
  Payload ID: 4194
  Gene Symbol: CELF6
  Gene Name: CUGBP, Elav-like family member 6
  ENST ID: ENST00000437872
  CDS Start-End: 1-402
agcgggctaaaccccggtcccgccgtacccatgaaggaccacgacgccatcaagctcttcgtggggcagatcccgcggggcttggacgagcaggacctcaagccgctgttcgaggagttcggccgcatctacgagctgacggtgctgaaggaccggctcaccggcctccacaaaggctgtgccttcctcacctactgcgcccgggactctgctctcaaggcccagagtgcactgcacgagcagaagaccctgccagggaggaccgaaagctgtttgtggggatgctgggcaagcagcagggtgaggaggacgtcagacgcctgttccagccctttggccacatcgaggagtgcacggtcctgcggagtcctgacggcaccagtaaaggctgtgcctttgtgaagttcgggagtcaaggggaagctcaggcggccatccggggtctgcacggcagccggaccatggcgggcgcctcgtccagcctcgtggtcaagctggcggacaccgaccgggagcgcgcgctgcggcggatgcagcagatggccggccacctgggcgccttccaccccgcgccactgccgctaggggcctgcggcgcctacaccacggcgatcctgcagcaccaggcggccctgctggcggcggcacagggcccaggcctaggcccggtggcggcagtggcggcccagatgcaacacgtggcggcctttagcctggtagctgcgcctctgttgcccgcggcagcagccaactccccgcctggcagcggccctggcaccctcccaggtcttccggcgcccatcggggtcaatggattcggccctctgaccccccagaccaatggccagccgggctccgacacgctctacaataacgggctctccccttatccagcccagagccccggcgtggctgaccccctgcagcaggcctacgctgggatgcaccactacgcagcagcctatccgtcggcctatgccccagtgagcacagcttttccccagcagccttcagccctgccccagcagcagagagaaggccccgaaggctgtaacctcttcatctatcacctgcctcaggagtttggtgatgcggaactcatacagacattcctgccctttggagccgttgtctctgctaaagtctttgtggatcgagccaccaaccagagcaagtgttttgggtttgttagttttgacaatccaactagtgcccagactgctattcaggcgatgaatggctttcaaattggcatgaagaggctcaaggtccagctaaagcggcccaaggatgccaaccggccttactgacctgctttcactgaccagccacagaaagaaacagaagagtgagaagaaaggagaggaaaagcacagaaacgcttgagcagcccttcccgaaggagcagctgcggacggaggtggatcggacccaaggctggtgcctggggctaaggccactctaaggattgtttttatcaagtgggttgttctgtgcctgcagcatagagcgcaggctggcagagcaaatagggctggtgaggagtgactgtccaggggaaccagcagagggcgttgggggtgccaagggcttctccgcaagggaagcccagatttacttctttcaaaatcatatcattccttagagtttagggaccaaaggactattgcttttttaagaatatatatatctatataaattaaaacaaagaaacaaacaaacaaaaaacaagacaaacaactacaaaaaaagacagtatagagtctcataaaagctgcctttaaatatccctaggagacagggtgaaggagacccttgacagccccagcctaggcagatgggggctgtggaaagattgttctgtgtctcattccctcttaagccactcccccaccctgcccttttaaaaataattaaggatttgaggtctaggctcacatgcaggtaatgagaacgttatggaagcagtgaacccacaatccacaatccccaaactcagagtgcatcccagaagaggccccaggcagagctcaggttggccctggcctttgccatcccgggaggccccctagccagcaagagtgggattgcctttcctgtggaaccactgcttccccaggcgggaagaaagagggagttctggccacctgagcctttcccttgccaatccaggtagacagaggccctgcctttggctgagctgagacacctcctgtttcccttccccttgaaccagtcccagtgtccccttgctccaggctaccttctgtctcttagtctaagtttgcccacctgtaaagtagattcaggatatctgtagagggctgtgacaacagacttggaaggtttgctactgtatatactgccattgagaaggggaaatttttcaatatgtagaagcttcagaattagaggtccctctttaccccagacctgggagggaagtagatgttttgccaaaatacttcttcattcctttaaaaactacatctttcct

SEQ ID NO: 123215 - DNA, 1676 bp, Homo sapiens
  Payload ID: 4194
  Gene Symbol: CELF6
  Gene Name: CUGBP, Elav-like family member 6
  Uniprot ID: Q96J87
  ENST ID: ENST00000543764
  CDS Start-End: 176-1210
atcagtaccccttcctccatgaacgggaaggccgctgtttttccctcctggcactcagctgcctgccccccaacaataattcctcacctcccacgcacccagctcttggcagtttacaaagaccttttgcgtccccattacctcatgtgatccccacaacacccatgagaggaagatgaatcgtccgatccaagtgaagccagctgccagtgagggccgaggagaggaccgaaagctgtttgtggggatgctgggcaagcagcagggtgaggaggacgtcagacgcctgttccagccctttggccacatcgaggagtgcacggtcctgcggagtcctgacggcaccagtaaaggctgtgcctttgtgaagttcgggagtcaaggggaagctcaggcggccatccggggtctgcacggcagccggaccatggcgggcgcctcgtccagcctcgtggtcaagctggcggacaccgaccgggagcgcgcgctgcggcggatgcagcagatggccggccacctgggcgccttccaccccgcgccactgccgctaggggcctgcggcgcctacaccacggcgatcctgcagcaccaggcggccctgctggcggcggcacagggcccaggcctaggcccggtggcggcagtggcggcccagatgcaacacgtggcggcctttagcctggtagctgcgcctctgttgcccgcggcagccaactccccgcctggcagcggccctggcaccctcccaggtcttccggcgcccatcggggtcaatggattcggccctctgaccccccagaccaatggccagccgggctccgacacgctctacaataacgggctctccccttatccagcagcctatccgtcggcctatgccccagtgagcacagcttttccccagcagccttcagccctgccccagcagcagagagaaggccccgaaggctgtaacctcttcatctatcacctgcctcaggagtttggtgatgcggaactcatacagacattcctgccctttggagccgttgtctctgctaaagtctttgtggatcgagccaccaaccagagcaagtgttttgggtttgttagttttgacaatccaactagtgcccagactgctattcaggcgatgaatggctttcaaattggcatgaagaggctcaaggtccagctaaagcggcccaaggatgccaaccggccttactgacctgctttcactgaccagccacagaaagaaacagaagagtgagaagaaaggagaggaaaagcacagaaacgcttgagcagcccttcccgaaggagcagctgcggacggaggtggatcggacccaaggctggtgcctggggctaaggccactctaaggattgtttttatcaagtgggttgttctgtgcctgcagcatagagcgcaggctggcagagcaaatagggctggtgaggagtgactgtccaggggaaccagcagagggcgttgggggtgccaagggcttctccgcaagggaagcccagatttacttctttcaaaatcatatcattccttagagtttagggaccaaaggactattgcttttttaagaatatatatatctatataaattaaaacaaagaaacaaacaaacaaaaaacaagacaaacaactacaaaaaaagacagtatagagtctcataaaagct

SEQ ID NO: 123216 - DNA, 1496 bp, Homo sapiens
  Payload ID: 4194
  Gene Symbol: CELF6
  Gene Name: CUGBP, Elav-like family member 6
  Uniprot ID: Q96J87
  ENST ID: ENST00000567083
  CDS Start-End: 9-1373
gcggggacatggccgcggcgccgggagggtcagcgcagcccgctggccccggcccgcgcctgggtttcagcaccgcggacagcggcgtcggcatgagcgggctaaaccccggtcccgccgtacccatgaaggaccacgacgccatcaagctcttcgtggggcagatcccgcggggcttggacgagcaggacctcaagccgctgttcgaggagttcggccgcatctacgagctgacggtgctgaaggaccggctcaccggcctccacaaaggctgtgccttcctcacctactgcgcccgggactctgctctcaaggcccagagtgcactgcacgagcagaagaccctgccagggatgaatcgtccgatccaagtgaagccagctgccagtgagggccgaggagaggaccgaaagctgtttgtggggatgctgggcaagcagcagggtgaggaggacgtcagacgcctgttccagccctttggccacatcgaggagtgcacggtcctgcggagtcctgacggcaccagtaaaggctgtgcctttgtgaagttcgggagtcaaggggaagctcaggcggccatccggggtctgcacggcagccggaccatggcgggcgcctcgtccagcctcgtggtcaagctggcggacaccgaccgggagcgcgcgctgcggcggatgcagcagatggccggccacctgggcgccttccaccccgcgccactgccgctaggggcctgcggcgcctacaccacggcgatcctgcagcaccaggcggccctgctggcggcggcacagggcccaggcctaggcccggtggcggcagtggcggcccagatgcaacacgtggcggcctttagcctggtagctgcgcctctgttgcccgcggcagcagccaactccccgcctggcagcggccctggcaccctcccaggtcttccggcgcccatcggggtcaatggattcggccctctgaccccccagaccaatggccagccgggctccgacacgctctacaataacgggctctccccttatccagcccagagccccggcgtggctgaccccctgcagcaggcctacgctgggatgcaccactacgcaggccccgaaggctgtaacctcttcatctatcacctgcctcaggagtttggtgatgcggaactcatacagacattcctgccctttggagccgttgtctctgctaaagtctttgtggatcgagccaccaaccagagcaagtgttttgggtttgttagttttgacaatccaactagtgcccagactgctattcaggcgatgaatggctttcaaattggcatgaagaggctcaaggtccagctaaagcggcccaaggatgccaaccggccttactgacctgctttcactgaccagccacagaaagaaacagaagagtgagaagaaaggagaggaaaagcacagaaacgcttgagcagcccttcccgaaggagcagctgcggacggaggtggatcggaccc

SEQ ID NO: 123217 - DNA, 3064 bp, Homo sapiens
  Payload ID: 4195
  Gene Symbol: CUL1
  Gene Name: cullin 1
  Uniprot ID: Q13616
  ENST ID: ENST00000325222
  CDS Start-End: 280-2610
agccccggtagctgagggacgcagctagaccttggcgggacggggctttcgccggggcccaggcccagggaccaggcggaggcgtcgcgggagcctttggggcaccacagagatgcgggtttgcctgcaatgagatttcattctctacatttaaaggacatcctttctgagctgctgtgaataaatttggaatggtactgtatattttcatctaatggagaactagctgtactttgaataaggattgctgcactggacgactttagaacatccctcacaatgtcgtcaacccggagccagaacccccacggcctgaagcagattggcctggaccagatctgggacgacctcagagccggcatccagcaggtgtacacacggcagagcatggccaagtccagatatatggagctctacactcatgtttataactactgtactagtgttcaccagtcaaaccaagcacgaggagctggagttcctccttctaagtcgaaaaaggggcagacacctggaggagctcagtttgttggcctggaattatataaacgacttaaggaatttttgaagaattacttgacaaatcttcttaaggatggagaagatttgatggatgagagtgtactgaaattctacactcaacaatgggaagattatcgattttcaagcaaagtgctgaatggaatttgtgcctacctcaatagacattgggttcgccgtgaatgtgacgaaggacgaaaaggaatatatgaaatctattcgcttgcattggtgacttggagagactgtctgttcaggccactgaataaacaggtaacaaatgctgttttaaagctgattgaaaaggaaaggaatggtgaaaccatcaatacaagattgattagtggagttgtacagtcttacgtggaattggggctgaatgaagatgatgcatttgcaaagggccctacgttaacagtgtataaagaatcctttgaatctcaatttttggctgacacagagagattttataccagagagagtactgaattcttgcagcagaacccagttactgaatatatgaaaaaggcagaggctcgtctgcttgaggaacaacgaagagttcaggtttaccttcatgaaagcacacaagatgaattagcaaggaaatgtgaacaagtcctcattgaaaaacacttggaaattttccacacagaatttcagaatttattggatgctgacaaaaatgaagatttgggacgcatgtataatcttgtatctagaatccaggatggcctaggagaattgaaaaaactgttggagacacacattcataatcagggtcttgcagccattgaaaagtgtggagaagctgctttaaatgaccccaaaatgtatgtacagacagtgcttgatgttcataaaaaatacaatgccctggtaatgtctgcattcaacaatgacgctggctttgtggctgctcttgataaggcttgtggtcgcttcataaacaacaacgcggttaccaagatggcccaatcatccagtaaatcccctgagttgctggctcgatactgtgactccttgttgaagaaaagttccaagaacccagaggaggcagaactagaagacacactcaatcaagtgatggttgtcttcaagtacatagaagacaaagacgtatttcagaagttctatgcgaagatgctcgccaagaggctcgtccaccagaacagtgcaagtgacgatgccgaagccagcatgatctccaagttaaagcaagcttgcgggttcgagtacacctctaaacttcagcgcatgtttcaagacattggcgtgagcaaagatctgaacgagcaattcaaaaagcacttgacaaactcagaacccctagacttggatttcagcattcaagtgctgagctccgggtcctggcccttccagcagtcttgtacatttgccttgccgtcagagttggaacgtagttatcagcgattcacagctttctacgccagccgccacagtggccgaaaattgacgtggttatatcagttgtctaaaggagaattggtaactaactgcttcaaaaacagatatactttgcaggcgtcgacattccagatggctatcctgcttcagtacaacacggaagatgcctacactgtgcagcagctgaccgacagcactcaaattaaaatggacattttggcgcaagttttacagattttattaaagtcgaagctattggtcttggaagatgaaaatgcaaatgttgatgaggtggaattgaagccagataccttaataaaattatatcttggttataaaaataagaaattaagggttaacatcaatgtgccaatgaaaaccgaacagaagcaggaacaagaaaccacacacaaaaacatcgaggaagaccgcaaactactgattcaggcggccatcgtgagaatcatgaagatgaggaaggttctgaaacaccagcagttacttggcgaggtcctcactcagctgtcctccaggttcaaacctcgagtccctgtgatcaagaaatgcattgacattctaattgagaaagaatatttggagcgagtggatggtgaaaaggacacctacagttacttggcttaacccttctggaagggtctgactgtgtgacccgcagcaaatagttcatgttggaaagaatgaaaacaactcaagttcatagcagccagcctgccgccattggacctcccttttaaaaactgagaccaagactcccatcagctggtctcggatttacatcggaactgctcaggattgatacatttcaagtctgtaaatacggacaccaacgccatttaccctaatttaagaacagcggggactgaccctccgtgccgagggctgcatgctaccgcactaagtcaatacatgggctccccgattcgcagctgtcgtcttggcagcacttgtcacgttggcagcactttgagagcaagtctgagtggacccacatgtaacctgctatgaaaaccatttgtatagtgtgtttcattttttaatgtgtgaaaataaagaaaattaaaggatttctgtacaa

SEQ ID NO: 123218 - DNA, 2857 bp, Homo sapiens
  Payload ID: 4195
  Gene Symbol: CUL1
  Gene Name: cullin 1
  Uniprot ID: Q13616
  ENST ID: ENST00000409469
  CDS Start-End: 527-2857
actattttatatcacgactcatgccatccgtatgtgtaatcaaagccttctaagtcttgatatgtccttacaaagacgaaggatagagtgaatgtcaaaatttgccaaacaggagttactgaaagtctgaaggggaaagcctagttaggttttatcttagaagtgatttttaaaacgaaacacgcagataagctcgagctttctggagccgattcctaaggccttgcaggtggtaagggggtcgagaattggctgaggttcctcggaagtccgcgccgattcggagggccacctctgactttctgatctggggtgcaacccccagtccctgtcccggtcgacaaaggtgtggagtcaggttccaggtttgcctgcaatgagatttcattctctacatttaaaggacatcctttctgagctgctgtgaataaatttggaatggtactgtatattttcatctaatggagaactagctgtactttgaataaggattgctgcactggacgactttagaacatccctcacaatgtcgtcaacccggagccagaacccccacggcctgaagcagattggcctggaccagatctgggacgacctcagagccggcatccagcaggtgtacacacggcagagcatggccaagtccagatatatggagctctacactcatgtttataactactgtactagtgttcaccagtcaaaccaagcacgaggagctggagttcctccttctaagtcgaaaaaggggcagacacctggaggagctcagtttgttggcctggaattatataaacgacttaaggaatttttgaagaattacttgacaaatcttcttaaggatggagaagatttgatggatgagagtgtactgaaattctacactcaacaatgggaagattatcgattttcaagcaaagtgctgaatggaatttgtgcctacctcaatagacattgggttcgccgtgaatgtgacgaaggacgaaaaggaatatatgaaatctattcgcttgcattggtgacttggagagactgtctgttcaggccactgaataaacaggtaacaaatgctgttttaaagctgattgaaaaggaaaggaatggtgaaaccatcaatacaagattgattagtggagttgtacagtcttacgtggaattggggctgaatgaagatgatgcatttgcaaagggccctacgttaacagtgtataaagaatcctttgaatctcaatttttggctgacacagagagattttataccagagagagtactgaattcttgcagcagaacccagttactgaatatatgaaaaaggcagaggctcgtctgcttgaggaacaacgaagagttcaggtttaccttcatgaaagcacacaagatgaattagcaaggaaatgtgaacaagtcctcattgaaaaacacttggaaattttccacacagaatttcagaatttattggatgctgacaaaaatgaagatttgggacgcatgtataatcttgtatctagaatccaggatggcctaggagaattgaaaaaactgttggagacacacattcataatcagggtcttgcagccattgaaaagtgtggagaagctgctttaaatgaccccaaaatgtatgtacagacagtgcttgatgttcataaaaaatacaatgccctggtaatgtctgcattcaacaatgacgctggctttgtggctgctcttgataaggcttgtggtcgcttcataaacaacaacgcggttaccaagatggcccaatcatccagtaaatcccctgagttgctggctcgatactgtgactccttgttgaagaaaagttccaagaacccagaggaggcagaactagaagacacactcaatcaagtgatggttgtcttcaagtacatagaagacaaagacgtatttcagaagttctatgcgaagatgctcgccaagaggctcgtccaccagaacagtgcaagtgacgatgccgaagccagcatgatctccaagttaaagcaagcttgcgggttcgagtacacctctaaacttcagcgcatgtttcaagacattggcgtgagcaaagatctgaacgagcaattcaaaaagcacttgacaaactcagaacccctagacttggatttcagcattcaagtgctgagctccgggtcctggcccttccagcagtcttgtacatttgccttgccgtcagagttggaacgtagttatcagcgattcacagctttctacgccagccgccacagtggccgaaaattgacgtggttatatcagttgtctaaaggagaattggtaactaactgcttcaaaaacagatatactttgcaggcgtcgacattccagatggctatcctgcttcagtacaacacggaagatgcctacactgtgcagcagctgaccgacagcactcaaattaaaatggacattttggcgcaagttttacagattttattaaagtcgaagctattggtcttggaagatgaaaatgcaaatgttgatgaggtggaattgaagccagataccttaataaaattatatcttggttataaaaataagaaattaagggttaacatcaatgtgccaatgaaaaccgaacagaagcaggaacaagaaaccacacacaaaaacatcgaggaagaccgcaaactactgattcaggcggccatcgtgagaatcatgaagatgaggaaggttctgaaacaccagcagttacttggcgaggtcctcactcagctgtcctccaggttcaaacctcgagtccctgtgatcaagaaatgcattgacattctaattgagaaagaatatttggagcgagtggatggtgaaaaggacacctacagttacttggcttaa

SEQ ID NO: 123219 - DNA, 3054 bp, Homo sapiens
  Payload ID: 4195
  Gene Symbol: CUL1
  Gene Name: cullin 1
  Uniprot ID: Q13616
  ENST ID: ENST00000602748
  CDS Start-End: 281-2611
gcgcctcgggctggcggggcgatggcgacgacggtttcccggctcccccgccccggacgccgatggcggtgcgttccggccctcccccaacagcttctcccccgcggtcgccggagccggtttgcctgcaatgagatttcattctctacatttaaaggacatcctttctgagctgctgtgaataaatttggaatggtactgtatattttcatctaatggagaactagctgtactttgaataaggattgctgcactggacgactttagaacatccctcacaatgtcgtcaacccggagccagaacccccacggcctgaagcagattggcctggaccagatctgggacgacctcagagccggcatccagcaggtgtacacacggcagagcatggccaagtccagatatatggagctctacactcatgtttataactactgtactagtgttcaccagtcaaaccaagcacgaggagctggagttcctccttctaagtcgaaaaaggggcagacacctggaggagctcagtttgttggcctggaattatataaacgacttaaggaatttttgaagaattacttgacaaatcttcttaaggatggagaagatttgatggatgagagtgtactgaaattctacactcaacaatgggaagattatcgattttcaagcaaagtgctgaatggaatttgtgcctacctcaatagacattgggttcgccgtgaatgtgacgaaggacgaaaaggaatatatgaaatctattcgcttgcattggtgacttggagagactgtctgttcaggccactgaataaacaggtaacaaatgctgttttaaagctgattgaaaaggaaaggaatggtgaaaccatcaatacaagattgattagtggagttgtacagtcttacgtggaattggggctgaatgaagatgatgcatttgcaaagggccctacgttaacagtgtataaagaatcctttgaatctcaatttttggctgacacagagagattttataccagagagagtactgaattcttgcagcagaacccagttactgaatatatgaaaaaggcagaggctcgtctgcttgaggaacaacgaagagttcaggtttaccttcatgaaagcacacaagatgaattagcaaggaaatgtgaacaagtcctcattgaaaaacacttggaaattttccacacagaatttcagaatttattggatgctgacaaaaatgaagatttgggacgcatgtataatcttgtatctagaatccaggatggcctaggagaattgaaaaaactgttggagacacacattcataatcagggtcttgcagccattgaaaagtgtggagaagctgctttaaatgaccccaaaatgtatgtacagacagtgcttgatgttcataaaaaatacaatgccctggtaatgtctgcattcaacaatgacgctggctttgtggctgctcttgataaggcttgtggtcgcttcataaacaacaacgcggttaccaagatggcccaatcatccagtaaatcccctgagttgctggctcgatactgtgactccttgttgaagaaaagttccaagaacccagaggaggcagaactagaagacacactcaatcaagtgatggttgtcttcaagtacatagaagacaaagacgtatttcagaagttctatgcgaagatgctcgccaagaggctcgtccaccagaacagtgcaagtgacgatgccgaagccagcatgatctccaagttaaagcaagcttgcgggttcgagtacacctctaaacttcagcgcatgtttcaagacattggcgtgagcaaagatctgaacgagcaattcaaaaagcacttgacaaactcagaacccctagacttggatttcagcattcaagtgctgagctccgggtcctggcccttccagcagtcttgtacatttgccttgccgtcagagttggaacgtagttatcagcgattcacagctttctacgccagccgccacagtggccgaaaattgacgtggttatatcagttgtctaaaggagaattggtaactaactgcttcaaaaacagatatactttgcaggcgtcgacattccagatggctatcctgcttcagtacaacacggaagatgcctacactgtgcagcagctgaccgacagcactcaaattaaaatggacattttggcgcaagttttacagattttattaaagtcgaagctattggtcttggaagatgaaaatgcaaatgttgatgaggtggaattgaagccagataccttaataaaattatatcttggttataaaaataagaaattaagggttaacatcaatgtgccaatgaaaaccgaacagaagcaggaacaagaaaccacacacaaaaacatcgaggaagaccgcaaactactgattcaggcggccatcgtgagaatcatgaagatgaggaaggttctgaaacaccagcagttacttggcgaggtcctcactcagctgtcctccaggttcaaacctcgagtccctgtgatcaagaaatgcattgacattctaattgagaaagaatatttggagcgagtggatggtgaaaaggacacctacagttacttggcttaacccttctggaagggtctgactgtgtgacccgcagcaaatagttcatgttggaaagaatgaaaacaactcaagttcatagcagccagcctgccgccattggacctcccttttaaaaactgagaccaagactcccatcagctggtctcggatttacatcggaactgctcaggattgatacatttcaagtctgtaaatacggacaccaacgccatttaccctaatttaagaacagcggggactgaccctccgtgccgagggctgcatgctaccgcactaagtcaatacatgggctccccgattcgcagctgtcgtcttggcagcacttgtcacgttggcagcactttgagagcaagtctgagtggacccacatgtaacctgctatgaaaaccatttgtatagtgtgtttcattttttaatgtgtgaaaataaagaaaattaaagga

SEQ ID NO: 123220 - DNA, 2508 bp, Homo sapiens
  Payload ID: 4195
  Gene Symbol: CUL1
  Gene Name: cullin 1
  ENST ID: ENST00000617797
  CDS Start-End: 125-2383
ggacatcctttctgagctgctgtgaataaatttggaatggtactgtatattttcatctaatggagaactagctgtactttgaataaggattgctgcactggacgactttagaacatccctcacaatgtcgtcaacccggagccagaacccccacggcctgaagcagattggcctggaccagatctgggacgacctcagagccggcatccagcaggtgtacacacggcagagcatggccaagtccagatatatggagctctacactcatgtttataactactgtactagtgttcaccagtttgttggcctggaattatataaacgacttaaggaatttttgaagaattacttgacaaatcttcttaaggatggagaagatttgatggatgagagtgtactgaaattctacactcaacaatgggaagattatcgattttcaagcaaagtgctgaatggaatttgtgcctacctcaatagacattgggttcgccgtgaatgtgacgaaggacgaaaaggaatatatgaaatctattcgcttgcattggtgacttggagagactgtctgttcaggccactgaataaacaggtaacaaatgctgttttaaagctgattgaaaaggaaaggaatggtgaaaccatcaatacaagattgattagtggagttgtacagtcttacgtggaattggggctgaatgaagatgatgcatttgcaaagggccctacgttaacagtgtataaagaatcctttgaatctcaatttttggctgacacagagagattttataccagagagagtactgaattcttgcagcagaacccagttactgaatatatgaaaaaggcagaggctcgtctgcttgaggaacaacgaagagttcaggtttaccttcatgaaagcacacaagatgaattagcaaggaaatgtgaacaagtcctcattgaaaaacacttggaaattttccacacagaatttcagaatttattggatgctgacaaaaatgaagatttgggacgcatgtataatcttgtatctagaatccaggatggcctaggagaattgaaaaaactgttggagacacacattcataatcagggtcttgcagccattgaaaagtgtggagaagctgctttaaatgaccccaaaatgtatgtacagacagtgcttgatgttcataaaaaatacaatgccctggtaatgtctgcattcaacaatgacgctggctttgtggctgctcttgataaggcttgtggtcgcttcataaacaacaacgcggttaccaagatggcccaatcatccagtaaatcccctgagttgctggctcgatactgtgactccttgttgaagaaaagttccaagaacccagaggaggcagaactagaagacacactcaatcaagtgatggttgtcttcaagtacatagaagacaaagacgtatttcagaagttctatgcgaagatgctcgccaagaggctcgtccaccagaacagtgcaagtgacgatgccgaagccagcatgatctccaagttaaagcaagcttgcgggttcgagtacacctctaaacttcagcgcatgtttcaagacattggcgtgagcaaagatctgaacgagcaattcaaaaagcacttgacaaactcagaacccctagacttggatttcagcattcaagtgctgagctccgggtcctggcccttccagcagtcttgtacatttgccttgccgtcagagttggaacgtagttatcagcgattcacagctttctacgccagccgccacagtggccgaaaattgacgtggttatatcagttgtctaaaggagaattggtaactaactgcttcaaaaacagatatactttgcaggcgtcgacattccagatggctatcctgcttcagtacaacacggaagatgcctacactgtgcagcagctgaccgacagcactcaaattaaaatggacattttggcgcaagttttacagattttattaaagtcgaagctattggtcttggaagatgaaaatgcaaatgttgatgaggtggaattgaagccagataccttaataaaattatatcttggttataaaaataagaaattaagggttaacatcaatgtgccaatgaaaaccgaacagaagcaggaacaagaaaccacacacaaaaacatcgaggaagaccgcaaactactgattcaggcggccatcgtgagaatcatgaagatgaggaaggttctgaaacaccagcagttacttggcgaggtcctcactcagctgtcctccaggttcaaacctcgagtccctgtgatcaagaaatgcattgacattctaattgagaaagaatatttggagcgagtggatggtgaaaaggacacctacagttacttggcttaacccttctggaagggtctgactgtgtgacccgcagcaaatagttcatgttggaaagaatgaaaacaactcaagttcatagcagccagcctgccgccattggacctcccttttaaaaactgagacca

SEQ ID NO: 123221 - DNA, 3903 bp, Homo sapiens
  Payload ID: 4196
  Gene Symbol: CUL2
  Gene Name: cullin 2
  ENST ID: ENST00000374746
  CDS Start-End: 23-2143
atttcaacactacacttgcacaatgtctttgaaaccaagagtagtagattttgatgaaacatggaacaaacttttgacgacaataaaagccgtggtcatgttggaatacgtcgaaagagcaacatggaatgaccgtttctcagatatctatgctttatgtgtggcctatcctgaaccccttggagaaagactttatacagaaactaagatttttttggaaaatcatgttcggcatttgcataagagagttttggagtcagaagaacaagtacttgttatgtatcataggtactgggaagaatacagcaagggtgcagactatatggactgcttatataggtatctcaacacccagtttattaaaaagaataaattaacagaagcggaccttcagtatggctatggtggtgtagatatgaatgaaccacttatggaaataggagagctagcattggatatgtggaggaaattgatggttgaaccacttcaggccatccttatccgaatgctgctccgagaaatcaaaaatgatcgtggtggagaagacccaaaccagaaagtaatccatggggttattaactcctttgttcatgttgaacagtataagaaaaaattccccttaaagttttatcaggaaatttttgagtctccctttctgactgaaacaggagagtattacaaacaagaagcttcaaatttattacaagaatcaaactgctcacagtatatggaaaaggttctaggtagattaaaagatgaagaaattcgatgtcgaaaatacctacatccaagttcatatactaaggtgattcatgaatgtcaacaacgaatggtagcagaccacttacagtttttacatgcagaatgtcataatataattcgacaagagaaaaaaaatgacatggcaaatatgtacgtcttactccgtgctgtgtccactggtttacctcatatgattcaggagctgcaaaaccacatccatgatgagggccttcgagcaaccagcaaccttactcaggaaaacatgccaacactatttgtggagtcagttttggaagtgcatggtaaatttgttcagcttatcaacactgttttgaatggtgatcagcattttatgagtgcgttggataaggcccttacgtcagttgtaaattacagagaacctaagtctgtttgcaaagcacctgaactgcttgctaagtactgtgacaacttactgaagaagtcagcgaaagggatgacagagaatgaagtggaagacaggctcacgagcttcatcacagtgttcaaatacattgatgacaaggacgtctttcaaaagttctacgcaagaatgctggcaaaacgtttaattcatgggttatccatgtctatggactctgaagaagccatgatcaacaaattaaagcaagcctgtggttatgagtttaccagcaagctacatcggatgtatacagatatgagtgtcagcgctgatctcaacaataagttcaacaattttatcaaaaaccaagacacagtaatagatttgggaattagttttcaaatatatgttctacaggctggtgcgtggcctcttactcaggctccttcatctacgtttgcaattccccaggaattagaaaaaagtgtacagatgtttgaattattttatagccaacatttcagtggaaggaaacttacatggttacattatctgtgtacaggtgaagttaaaatgaactatttgggcaaaccatatgtagccatggttacaacataccaaatggcagttcttcttgcctttaacaacagtgaaactgtcagttataaagagcttcaggacagcactcagatgaatgaaaaggaactgacaaaaacaatcaaatcattacttgatgtgaaaatgattaaccatgattcagaaaaggaagatattgatgcagaatcttcgttttcattaaatatgaactttagcagtaaaagaacaaaatttaaaattactacatcaatgcagaaagacacaccacaagtgattagccagtcaagagctaggtttaatcccagtatcagcatgattaagaagtgtattgaagttctgatagacaaacaatacatagaacgcagccaggcgtcggcagatgaatacagctacgtcgcgtgatgtcgctctcctccagcgtggtgtgagaagatcattgccatcaccatttggtgtgttcctgtgggaaaaagcaggactgtgcctccataatttggtcatttggcagcccctgttttctgctgtttacaacatcaccagtgccacgtcatgagcgtcaaagaaaatgcctagagatatttcaagctcatgtcattatgacatttcttaaaactttattaaaagaatgagtgaagtattgctgaaaagtggaaattcggttgggtaccatgctttttctccccttcacgtttgcagttgatgtgtctttttttttttttttaatgtatcttaaaggacataaaatttaaaaacttaaatattgtaatatgacagataacctaataattgtatctacattaaaatgacaaacatgatactgctgcttgtcaaataaaaaaaaaataaagaaatagaatgccttttttatgtggatggagtatcaggttgaccacaaaatatattgactcaaagcagctaatgcatctttagttgcgtttttatctgaatggtttaattcacttgtactcctatttaaatcctacatgaaaaatgtctagattattgttcttgactgcataggactgcattcagcataaagaatgctttatttttatggattagatatattggatctaaacattttgaatcttgaagatgtaattccatcagcagtttctggtggtgtgctactccacagacatcgcagagtgtgagcaggatgcttggtgacctcaagtctggcacagagagagcttttcattcaaaagttgtctttcttcggttgcataatccattaattctagcatagactagtaccctagctctgtggccttccctgagtcttaggaaatctatgataccaacatattccttctatatgcctcccctacctgttacccttacaaccctcctccaacagtttagatactagagtcactctcatcaatcacagatgtgcttagcaatgcataacctaaatacttttttaaaaaagaaaattgtacattgtactgggtgccacatatataaatcccattattttgtttattttatatatatatatatatataatatatatatatatatatctcaacagcagtgttaagagtactgcgatctattatcatatttattgtctatccacaccatcaccaccaccaccacacccctcctccctcaacatacaatttttctttattttaaaaaaaataagagacggggtttcgccatgtttcccaggctagtctggaacttctggcctcaagcaatcctatctctgtctcccaaagtgctgggattacaagcatgagccactgcatccatccaacacaaaatttttaaaatcggaatattttaaagcaaatcacacaaattatttcacttataatacttcagtaaggcctttaaaaaatccacagtgatattattactcctaacaaaaacaataattacttagtatcatctaatatgtggttcatatttaaatttgttgttttgagatgggtcttacaattggtttattcaattgcattttttctaactcgtgtctcaagtgttttaaaaatctactgaacttataatgacttatataatgtatttctcattttacctttcttccaaaagaggaaataatggcaaaccatataatattgtacattcactgtcaaaaagcaaacccttgttttgataacttgttgattgataaaagttttccaaattga

SEQ ID NO: 123222 - DNA, 4312 bp, Homo sapiens
  Payload ID: 4196
  Gene Symbol: CUL2
  Gene Name: cullin 2
  Uniprot ID: Q13617
  ENST ID: ENST00000374748
  CDS Start-End: 315-2552
cggcggccggccggggaggcggcctcggcgcacagtaatggcagcgctgtgagcaggggaacgcgagctgacagccgccgccgccgccgcctccgcccaccttcctcgccggggcttcgtctttcactccttcgggctgcctccccctccccttgtcccctgccccttgccctgcttctgcagaagagcgctgacccgtaagccctgccaccccctggactggatcccgggcctccccaacccgatcttggccgcctctcccgcggccccattttccttcgaaggagggaagatttcaacactacacttgcacaatgtctttgaaaccaagagtagtagattttgatgaaacatggaacaaacttttgacgacaataaaagccgtggtcatgttggaatacgtcgaaagagcaacatggaatgaccgtttctcagatatctatgctttatgtgtggcctatcctgaaccccttggagaaagactttatacagaaactaagatttttttggaaaatcatgttcggcatttgcataagagagttttggagtcagaagaacaagtacttgttatgtatcataggtactgggaagaatacagcaagggtgcagactatatggactgcttatataggtatctcaacacccagtttattaaaaagaataaattaacagaagcggaccttcagtatggctatggtggtgtagatatgaatgaaccacttatggaaataggagagctagcattggatatgtggaggaaattgatggttgaaccacttcaggccatccttatccgaatgctgctccgagaaatcaaaaatgatcgtggtggagaagacccaaaccagaaagtaatccatggggttattaactcctttgttcatgttgaacagtataagaaaaaattccccttaaagttttatcaggaaatttttgagtctccctttctgactgaaacaggagagtattacaaacaagaagcttcaaatttattacaagaatcaaactgctcacagtatatggaaaaggttctaggtagattaaaagatgaagaaattcgatgtcgaaaatacctacatccaagttcatatactaaggtgattcatgaatgtcaacaacgaatggtagcagaccacttacagtttttacatgcagaatgtcataatataattcgacaagagaaaaaaaatgacatggcaaatatgtacgtcttactccgtgctgtgtccactggtttacctcatatgattcaggagctgcaaaaccacatccatgatgagggccttcgagcaaccagcaaccttactcaggaaaacatgccaacactatttgtggagtcagttttggaagtgcatggtaaatttgttcagcttatcaacactgttttgaatggtgatcagcattttatgagtgcgttggataaggcccttacgtcagttgtaaattacagagaacctaagtctgtttgcaaagcacctgaactgcttgctaagtactgtgacaacttactgaagaagtcagcgaaagggatgacagagaatgaagtggaagacaggctcacgagcttcatcacagtgttcaaatacattgatgacaaggacgtctttcaaaagttctacgcaagaatgctggcaaaacgtttaattcatgggttatccatgtctatggactctgaagaagccatgatcaacaaattaaagcaagcctgtggttatgagtttaccagcaagctacatcggatgtatacagatatgagtgtcagcgctgatctcaacaataagttcaacaattttatcaaaaaccaagacacagtaatagatttgggaattagttttcaaatatatgttctacaggctggtgcgtggcctcttactcaggctccttcatctacgtttgcaattccccaggaattagaaaaaagtgtacagatgtttgaattattttatagccaacatttcagtggaaggaaacttacatggttacattatctgtgtacaggtgaagttaaaatgaactatttgggcaaaccatatgtagccatggttacaacataccaaatggcagttcttcttgcctttaacaacagtgaaactgtcagttataaagagcttcaggacagcactcagatgaatgaaaaggaactgacaaaaacaatcaaatcattacttgatgtgaaaatgattaaccatgattcagaaaaggaagatattgatgcagaatcttcgttttcattaaatatgaactttagcagtaaaagaacaaaatttaaaattactacatcaatgcagaaagacacaccacaagaaatggagcagactagaagtgcagttgatgaggaccggaaaatgtatctccaagctgctatagttcgtatcatgaaagcacgaaaagtgcttcggcacaatgcccttattcaagaggtgattagccagtcaagagctaggtttaatcccagtatcagcatgattaagaagtgtattgaagttctgatagacaaacaatacatagaacgcagccaggcgtcggcagatgaatacagctacgtcgcgtgatgtcgctctcctccagcgtggtgtgagaagatcattgccatcaccatttggtgtgttcctgtgggaaaaagcaggactgtgcctccataatttggtcatttggcagcccctgttttctgctgtttacaacatcaccagtgccacgtcatgagcgtcaaagaaaatgcctagagatatttcaagctcatgtcattatgacatttcttaaaactttattaaaagaatgagtgaagtattgctgaaaagtggaaattcggttgggtaccatgctttttctccccttcacgtttgcagttgatgtgtctttttttttttttttaatgtatcttaaaggacataaaatttaaaaacttaaatattgtaatatgacagataacctaataattgtatctacattaaaatgacaaacatgatactgctgcttgtcaaataaaaaaaaaataaagaaatagaatgccttttttatgtggatggagtatcaggttgaccacaaaatatattgactcaaagcagctaatgcatctttagttgcgtttttatctgaatggtttaattcacttgtactcctatttaaatcctacatgaaaaatgtctagattattgttcttgactgcataggactgcattcagcataaagaatgctttatttttatggattagatatattggatctaaacattttgaatcttgaagatgtaattccatcagcagtttctggtggtgtgctactccacagacatcgcagagtgtgagcaggatgcttggtgacctcaagtctggcacagagagagcttttcattcaaaagttgtctttcttcggttgcataatccattaattctagcatagactagtaccctagctctgtggccttccctgagtcttaggaaatctatgataccaacatattccttctatatgcctcccctacctgttacccttacaaccctcctccaacagtttagatactagagtcactctcatcaatcacagatgtgcttagcaatgcataacctaaatacttttttaaaaaagaaaattgtacattgtactgggtgccacatatataaatcccattattttgtttattttatatatatatatatatataatatatatatatatatatctcaacagcagtgttaagagtactgcgatctattatcatatttattgtctatccacaccatcaccaccaccaccacacccctcctccctcaacatacaatttttctttattttaaaaaaaataagagacggggtttcgccatgtttcccaggctagtctggaacttctggcctcaagcaatcctatctctgtctcccaaagtgctgggattacaagcatgagccactgcatccatccaacacaaaatttttaaaatcggaatattttaaagcaaatcacacaaattatttcacttataatacttcagtaaggcctttaaaaaatccacagtgatattattactcctaacaaaaacaataattacttagtatcatctaatatgtggttcatatttaaatttgttgttttgagatgggtcttacaattggtttattcaattgcattttttctaactcgtgtctcaagtgttttaaaaatctactgaacttataatgacttatataatgtatttctcattttacctttcttccaaaagaggaaataatggcaaaccatataatattgtacattcactgtcaaaaagcaaacccttgttttgataacttgttgattgataaaagttttccaaattga

SEQ ID NO: 123223 - DNA, 4208 bp, Homo sapiens
  Payload ID: 4196
  Gene Symbol: CUL2
  Gene Name: cullin 2
  Uniprot ID: Q13617
  ENST ID: ENST00000374749
  CDS Start-End: 211-2448
ggcggcggccggccggggaggcggcctcggcgcacagtaatggcagcgctgtgagcaggggaacgcgagctgacagccgccgccgccgccgcctccgcccaccttcctcgccggggcttcgtctttcactccttcgggctgcctccccctccccttgtcccctgccccttgccctgcttctgcagaagatttcaacactacacttgcacaatgtctttgaaaccaagagtagtagattttgatgaaacatggaacaaacttttgacgacaataaaagccgtggtcatgttggaatacgtcgaaagagcaacatggaatgaccgtttctcagatatctatgctttatgtgtggcctatcctgaaccccttggagaaagactttatacagaaactaagatttttttggaaaatcatgttcggcatttgcataagagagttttggagtcagaagaacaagtacttgttatgtatcataggtactgggaagaatacagcaagggtgcagactatatggactgcttatataggtatctcaacacccagtttattaaaaagaataaattaacagaagcggaccttcagtatggctatggtggtgtagatatgaatgaaccacttatggaaataggagagctagcattggatatgtggaggaaattgatggttgaaccacttcaggccatccttatccgaatgctgctccgagaaatcaaaaatgatcgtggtggagaagacccaaaccagaaagtaatccatggggttattaactcctttgttcatgttgaacagtataagaaaaaattccccttaaagttttatcaggaaatttttgagtctccctttctgactgaaacaggagagtattacaaacaagaagcttcaaatttattacaagaatcaaactgctcacagtatatggaaaaggttctaggtagattaaaagatgaagaaattcgatgtcgaaaatacctacatccaagttcatatactaaggtgattcatgaatgtcaacaacgaatggtagcagaccacttacagtttttacatgcagaatgtcataatataattcgacaagagaaaaaaaatgacatggcaaatatgtacgtcttactccgtgctgtgtccactggtttacctcatatgattcaggagctgcaaaaccacatccatgatgagggccttcgagcaaccagcaaccttactcaggaaaacatgccaacactatttgtggagtcagttttggaagtgcatggtaaatttgttcagcttatcaacactgttttgaatggtgatcagcattttatgagtgcgttggataaggcccttacgtcagttgtaaattacagagaacctaagtctgtttgcaaagcacctgaactgcttgctaagtactgtgacaacttactgaagaagtcagcgaaagggatgacagagaatgaagtggaagacaggctcacgagcttcatcacagtgttcaaatacattgatgacaaggacgtctttcaaaagttctacgcaagaatgctggcaaaacgtttaattcatgggttatccatgtctatggactctgaagaagccatgatcaacaaattaaagcaagcctgtggttatgagtttaccagcaagctacatcggatgtatacagatatgagtgtcagcgctgatctcaacaataagttcaacaattttatcaaaaaccaagacacagtaatagatttgggaattagttttcaaatatatgttctacaggctggtgcgtggcctcttactcaggctccttcatctacgtttgcaattccccaggaattagaaaaaagtgtacagatgtttgaattattttatagccaacatttcagtggaaggaaacttacatggttacattatctgtgtacaggtgaagttaaaatgaactatttgggcaaaccatatgtagccatggttacaacataccaaatggcagttcttcttgcctttaacaacagtgaaactgtcagttataaagagcttcaggacagcactcagatgaatgaaaaggaactgacaaaaacaatcaaatcattacttgatgtgaaaatgattaaccatgattcagaaaaggaagatattgatgcagaatcttcgttttcattaaatatgaactttagcagtaaaagaacaaaatttaaaattactacatcaatgcagaaagacacaccacaagaaatggagcagactagaagtgcagttgatgaggaccggaaaatgtatctccaagctgctatagttcgtatcatgaaagcacgaaaagtgcttcggcacaatgcccttattcaagaggtgattagccagtcaagagctaggtttaatcccagtatcagcatgattaagaagtgtattgaagttctgatagacaaacaatacatagaacgcagccaggcgtcggcagatgaatacagctacgtcgcgtgatgtcgctctcctccagcgtggtgtgagaagatcattgccatcaccatttggtgtgttcctgtgggaaaaagcaggactgtgcctccataatttggtcatttggcagcccctgttttctgctgtttacaacatcaccagtgccacgtcatgagcgtcaaagaaaatgcctagagatatttcaagctcatgtcattatgacatttcttaaaactttattaaaagaatgagtgaagtattgctgaaaagtggaaattcggttgggtaccatgctttttctccccttcacgtttgcagttgatgtgtctttttttttttttttaatgtatcttaaaggacataaaatttaaaaacttaaatattgtaatatgacagataacctaataattgtatctacattaaaatgacaaacatgatactgctgcttgtcaaataaaaaaaaaataaagaaatagaatgccttttttatgtggatggagtatcaggttgaccacaaaatatattgactcaaagcagctaatgcatctttagttgcgtttttatctgaatggtttaattcacttgtactcctatttaaatcctacatgaaaaatgtctagattattgttcttgactgcataggactgcattcagcataaagaatgctttatttttatggattagatatattggatctaaacattttgaatcttgaagatgtaattccatcagcagtttctggtggtgtgctactccacagacatcgcagagtgtgagcaggatgcttggtgacctcaagtctggcacagagagagcttttcattcaaaagttgtctttcttcggttgcataatccattaattctagcatagactagtaccctagctctgtggccttccctgagtcttaggaaatctatgataccaacatattccttctatatgcctcccctacctgttacccttacaaccctcctccaacagtttagatactagagtcactctcatcaatcacagatgtgcttagcaatgcataacctaaatacttttttaaaaaagaaaattgtacattgtactgggtgccacatatataaatcccattattttgtttattttatatatatatatatatataatatatatatatatatatctcaacagcagtgttaagagtactgcgatctattatcatatttattgtctatccacaccatcaccaccaccaccacacccctcctccctcaacatacaatttttctttattttaaaaaaaataagagacggggtttcgccatgtttcccaggctagtctggaacttctggcctcaagcaatcctatctctgtctcccaaagtgctgggattacaagcatgagccactgcatccatccaacacaaaatttttaaaatcggaatattttaaagcaaatcacacaaattatttcacttataatacttcagtaaggcctttaaaaaatccacagtgatattattactcctaacaaaaacaataattacttagtatcatctaatatgtggttcatatttaaatttgttgttttgagatgggtcttacaattggtttattcaattgcattttttctaactcgtgtctcaagtgttttaaaaatctactgaacttataatgacttatataatgtatttctcattttacctttcttccaaaagaggaaataatggcaaaccatataatattgtacattcactgtcaaaaagcaaacccttgttttgataacttgttgattgataaaagttttccaaattga

SEQ ID NO: 123224 - DNA, 4233 bp, Homo sapiens
  Payload ID: 4196
  Gene Symbol: CUL2
  Gene Name: cullin 2
  Uniprot ID: Q13617
  ENST ID: ENST00000374751
  CDS Start-End: 236-2473
attgctttccgggtggcgggggggatttggcagcagcggaagaaggagaccggagggtgtgtgttgggcaaagccggaggcagaggaggacgattgttttacggatcccgtgatcggcccgtccttctcccctttccccccctccctaccgcccctgtcccgccggggagcggcggcggccttggactttgctgtctttcctcgcggagacagatttcaacactacacttgcacaatgtctttgaaaccaagagtagtagattttgatgaaacatggaacaaacttttgacgacaataaaagccgtggtcatgttggaatacgtcgaaagagcaacatggaatgaccgtttctcagatatctatgctttatgtgtggcctatcctgaaccccttggagaaagactttatacagaaactaagatttttttggaaaatcatgttcggcatttgcataagagagttttggagtcagaagaacaagtacttgttatgtatcataggtactgggaagaatacagcaagggtgcagactatatggactgcttatataggtatctcaacacccagtttattaaaaagaataaattaacagaagcggaccttcagtatggctatggtggtgtagatatgaatgaaccacttatggaaataggagagctagcattggatatgtggaggaaattgatggttgaaccacttcaggccatccttatccgaatgctgctccgagaaatcaaaaatgatcgtggtggagaagacccaaaccagaaagtaatccatggggttattaactcctttgttcatgttgaacagtataagaaaaaattccccttaaagttttatcaggaaatttttgagtctccctttctgactgaaacaggagagtattacaaacaagaagcttcaaatttattacaagaatcaaactgctcacagtatatggaaaaggttctaggtagattaaaagatgaagaaattcgatgtcgaaaatacctacatccaagttcatatactaaggtgattcatgaatgtcaacaacgaatggtagcagaccacttacagtttttacatgcagaatgtcataatataattcgacaagagaaaaaaaatgacatggcaaatatgtacgtcttactccgtgctgtgtccactggtttacctcatatgattcaggagctgcaaaaccacatccatgatgagggccttcgagcaaccagcaaccttactcaggaaaacatgccaacactatttgtggagtcagttttggaagtgcatggtaaatttgttcagcttatcaacactgttttgaatggtgatcagcattttatgagtgcgttggataaggcccttacgtcagttgtaaattacagagaacctaagtctgtttgcaaagcacctgaactgcttgctaagtactgtgacaacttactgaagaagtcagcgaaagggatgacagagaatgaagtggaagacaggctcacgagcttcatcacagtgttcaaatacattgatgacaaggacgtctttcaaaagttctacgcaagaatgctggcaaaacgtttaattcatgggttatccatgtctatggactctgaagaagccatgatcaacaaattaaagcaagcctgtggttatgagtttaccagcaagctacatcggatgtatacagatatgagtgtcagcgctgatctcaacaataagttcaacaattttatcaaaaaccaagacacagtaatagatttgggaattagttttcaaatatatgttctacaggctggtgcgtggcctcttactcaggctccttcatctacgtttgcaattccccaggaattagaaaaaagtgtacagatgtttgaattattttatagccaacatttcagtggaaggaaacttacatggttacattatctgtgtacaggtgaagttaaaatgaactatttgggcaaaccatatgtagccatggttacaacataccaaatggcagttcttcttgcctttaacaacagtgaaactgtcagttataaagagcttcaggacagcactcagatgaatgaaaaggaactgacaaaaacaatcaaatcattacttgatgtgaaaatgattaaccatgattcagaaaaggaagatattgatgcagaatcttcgttttcattaaatatgaactttagcagtaaaagaacaaaatttaaaattactacatcaatgcagaaagacacaccacaagaaatggagcagactagaagtgcagttgatgaggaccggaaaatgtatctccaagctgctatagttcgtatcatgaaagcacgaaaagtgcttcggcacaatgcccttattcaagaggtgattagccagtcaagagctaggtttaatcccagtatcagcatgattaagaagtgtattgaagttctgatagacaaacaatacatagaacgcagccaggcgtcggcagatgaatacagctacgtcgcgtgatgtcgctctcctccagcgtggtgtgagaagatcattgccatcaccatttggtgtgttcctgtgggaaaaagcaggactgtgcctccataatttggtcatttggcagcccctgttttctgctgtttacaacatcaccagtgccacgtcatgagcgtcaaagaaaatgcctagagatatttcaagctcatgtcattatgacatttcttaaaactttattaaaagaatgagtgaagtattgctgaaaagtggaaattcggttgggtaccatgctttttctccccttcacgtttgcagttgatgtgtctttttttttttttttaatgtatcttaaaggacataaaatttaaaaacttaaatattgtaatatgacagataacctaataattgtatctacattaaaatgacaaacatgatactgctgcttgtcaaataaaaaaaaaataaagaaatagaatgccttttttatgtggatggagtatcaggttgaccacaaaatatattgactcaaagcagctaatgcatctttagttgcgtttttatctgaatggtttaattcacttgtactcctatttaaatcctacatgaaaaatgtctagattattgttcttgactgcataggactgcattcagcataaagaatgctttatttttatggattagatatattggatctaaacattttgaatcttgaagatgtaattccatcagcagtttctggtggtgtgctactccacagacatcgcagagtgtgagcaggatgcttggtgacctcaagtctggcacagagagagcttttcattcaaaagttgtctttcttcggttgcataatccattaattctagcatagactagtaccctagctctgtggccttccctgagtcttaggaaatctatgataccaacatattccttctatatgcctcccctacctgttacccttacaaccctcctccaacagtttagatactagagtcactctcatcaatcacagatgtgcttagcaatgcataacctaaatacttttttaaaaaagaaaattgtacattgtactgggtgccacatatataaatcccattattttgtttattttatatatatatatatatataatatatatatatatatatctcaacagcagtgttaagagtactgcgatctattatcatatttattgtctatccacaccatcaccaccaccaccacacccctcctccctcaacatacaatttttctttattttaaaaaaaataagagacggggtttcgccatgtttcccaggctagtctggaacttctggcctcaagcaatcctatctctgtctcccaaagtgctgggattacaagcatgagccactgcatccatccaacacaaaatttttaaaatcggaatattttaaagcaaatcacacaaattatttcacttataatacttcagtaaggcctttaaaaaatccacagtgatattattactcctaacaaaaacaataattacttagtatcatctaatatgtggttcatatttaaatttgttgttttgagatgggtcttacaattggtttattcaattgcattttttctaactcgtgtctcaagtgttttaaaaatctactgaacttataatgacttatataatgtatttctcattttacctttcttccaaaagaggaaataatggcaaaccatataatattgtacattcactgtcaaaaagcaaacccttgttttgataacttgttgattgataaaagttttccaaattga

SEQ ID NO: 123225 - DNA, 4440 bp, Homo sapiens
  Payload ID: 4196
  Gene Symbol: CUL2
  Gene Name: cullin 2
  ENST ID: ENST00000374754
  CDS Start-End: 487-759
attgctttccgggtggcgggggggatttggcagcagcggaagaaggagaccggagggtgtgtgttgggcaaagccggaggcagaggaggacgattgttttacggatcccgtgatcggcccgtccttctcccctttccccccctccctaccgcccctgtcccgccggggagcggcggcggccttggactttgctgtctttcctcgcggagacaggtgagtgtcggcgcgcgggctccccgggcttcgctccccaccccccgcgtctccggggccggtggcggcggccggccggggaggcggcctcggcgcacagtaatggcagcgctgtgagcaggggaacgcgagctgacagccgccgccgccgccgcctccgcccaccttcctcgccggggcttcgtctttcactccttcgggctgcctccccctccccttgtcccctgccccttgccctgcttctgcagaagatttcaacactacacttgcacaatgtctttgaaaccaagagtagtagattttgatgaaacatggaacaaacttttgacgacaataaaagccgtggtcatgttggaatacgtcgaaagagcaacatggaatgaccgtttctcagatatctatgctttatgtgtggcctatcctgaaccccttggagaaagactttatacagaaactaagatttttttggaaaatcatgttcggcatttgcataaggtactgggaagaatacagcaagggtgcagactatatggactgcttatataggtatctcaacacccagtttattaaaaagaataaattaacagaagcggaccttcagtatggctatggtggtgtagatatgaatgaaccacttatggaaataggagagctagcattggatatgtggaggaaattgatggttgaaccacttcaggccatccttatccgaatgctgctccgagaaatcaaaaatgatcgtggtggagaagacccaaaccagaaagtaatccatggggttattaactcctttgttcatgttgaacagtataagaaaaaattccccttaaagttttatcaggaaatttttgagtctccctttctgactgaaacaggagagtattacaaacaagaagcttcaaatttattacaagaatcaaactgctcacagtatatggaaaaggttctaggtagattaaaagatgaagaaattcgatgtcgaaaatacctacatccaagttcatatactaaggtgattcatgaatgtcaacaacgaatggtagcagaccacttacagtttttacatgcagaatgtcataatataattcgacaagagaaaaaaaatgacatggcaaatatgtacgtcttactccgtgctgtgtccactggtttacctcatatgattcaggagctgcaaaaccacatccatgatgagggccttcgagcaaccagcaaccttactcaggaaaacatgccaacactatttgtggagtcagttttggaagtgcatggtaaatttgttcagcttatcaacactgttttgaatggtgatcagcattttatgagtgcgttggataaggcccttacgtcagttgtaaattacagagaacctaagtctgtttgcaaagcacctgaactgcttgctaagtactgtgacaacttactgaagaagtcagcgaaagggatgacagagaatgaagtggaagacaggctcacgagcttcatcacagtgttcaaatacattgatgacaaggacgtctttcaaaagttctacgcaagaatgctggcaaaacgtttaattcatgggttatccatgtctatggactctgaagaagccatgatcaacaaattaaagcaagcctgtggttatgagtttaccagcaagctacatcggatgtatacagatatgagtgtcagcgctgatctcaacaataagttcaacaattttatcaaaaaccaagacacagtaatagatttgggaattagttttcaaatatatgttctacaggctggtgcgtggcctcttactcaggctccttcatctacgtttgcaattccccaggaattagaaaaaagtgtacagatgtttgaattattttatagccaacatttcagtggaaggaaacttacatggttacattatctgtgtacaggtgaagttaaaatgaactatttgggcaaaccatatgtagccatggttacaacataccaaatggcagttcttcttgcctttaacaacagtgaaactgtcagttataaagagcttcaggacagcactcagatgaatgaaaaggaactgacaaaaacaatcaaatcattacttgatgtgaaaatgattaaccatgattcagaaaaggaagatattgatgcagaatcttcgttttcattaaatatgaactttagcagtaaaagaacaaaatttaaaattactacatcaatgcagaaagacacaccacaagaaatggagcagactagaagtgcagttgatgaggaccggaaaatgtatctccaagctgctatagttcgtatcatgaaagcacgaaaagtgcttcggcacaatgcccttattcaagaggtgattagccagtcaagagctaggtttaatcccagtatcagcatgattaagaagtgtattgaagttctgatagacaaacaatacatagaacgcagccaggcgtcggcagatgaatacagctacgtcgcgtgatgtcgctctcctccagcgtggtgtgagaagatcattgccatcaccatttggtgtgttcctgtgggaaaaagcaggactgtgcctccataatttggtcatttggcagcccctgttttctgctgtttacaacatcaccagtgccacgtcatgagcgtcaaagaaaatgcctagagatatttcaagctcatgtcattatgacatttcttaaaactttattaaaagaatgagtgaagtattgctgaaaagtggaaattcggttgggtaccatgctttttctccccttcacgtttgcagttgatgtgtctttttttttttttttaatgtatcttaaaggacataaaatttaaaaacttaaatattgtaatatgacagataacctaataattgtatctacattaaaatgacaaacatgatactgctgcttgtcaaataaaaaaaaaataaagaaatagaatgccttttttatgtggatggagtatcaggttgaccacaaaatatattgactcaaagcagctaatgcatctttagttgcgtttttatctgaatggtttaattcacttgtactcctatttaaatcctacatgaaaaatgtctagattattgttcttgactgcataggactgcattcagcataaagaatgctttatttttatggattagatatattggatctaaacattttgaatcttgaagatgtaattccatcagcagtttctggtggtgtgctactccacagacatcgcagagtgtgagcaggatgcttggtgacctcaagtctggcacagagagagcttttcattcaaaagttgtctttcttcggttgcataatccattaattctagcatagactagtaccctagctctgtggccttccctgagtcttaggaaatctatgataccaacatattccttctatatgcctcccctacctgttacccttacaaccctcctccaacagtttagatactagagtcactctcatcaatcacagatgtgcttagcaatgcataacctaaatacttttttaaaaaagaaaattgtacattgtactgggtgccacatatataaatcccattattttgtttattttatatatatatatatatataatatatatatatatatatctcaacagcagtgttaagagtactgcgatctattatcatatttattgtctatccacaccatcaccaccaccaccacacccctcctccctcaacatacaatttttctttattttaaaaaaaataagagacggggtttcgccatgtttcccaggctagtctggaacttctggcctcaagcaatcctatctctgtctcccaaagtgctgggattacaagcatgagccactgcatccatccaacacaaaatttttaaaatcggaatattttaaagcaaatcacacaaattatttcacttataatacttcagtaaggcctttaaaaaatccacagtgatattattactcctaacaaaaacaataattacttagtatcatctaatatgtggttcatatttaaatttgttgttttgagatgggtcttacaattggtttattcaattgcattttttctaactcgtgtctcaagtgttttaaaaatctactgaacttataatgacttatataatgtatttctcattttacctttcttccaaaagaggaaataatggcaaaccatataatattgtacattcactgtcaaaaagcaaacccttgttttgataacttgttgattgataaaagttttccaaattga

SEQ ID NO: 123226 - DNA, 2376 bp, Homo sapiens
  Payload ID: 4196
  Gene Symbol: CUL2
  Gene Name: cullin 2
  Uniprot ID: Q13617
  ENST ID: ENST00000421317
  CDS Start-End: 63-2357
atgttgcagttgagcccaaactgaatgctgtctgtagaaggaaacaacaaactttgtactttatgtacagagtaacatggtcaactttttggcttagatttcaacactacacttgcacaatgtctttgaaaccaagagtagtagattttgatgaaacatggaacaaacttttgacgacaataaaagccgtggtcatgttggaatacgtcgaaagagcaacatggaatgaccgtttctcagatatctatgctttatgtgtggcctatcctgaaccccttggagaaagactttatacagaaactaagatttttttggaaaatcatgttcggcatttgcataagagagttttggagtcagaagaacaagtacttgttatgtatcataggtactgggaagaatacagcaagggtgcagactatatggactgcttatataggtatctcaacacccagtttattaaaaagaataaattaacagaagcggaccttcagtatggctatggtggtgtagatatgaatgaaccacttatggaaataggagagctagcattggatatgtggaggaaattgatggttgaaccacttcaggccatccttatccgaatgctgctccgagaaatcaaaaatgatcgtggtggagaagacccaaaccagaaagtaatccatggggttattaactcctttgttcatgttgaacagtataagaaaaaattccccttaaagttttatcaggaaatttttgagtctccctttctgactgaaacaggagagtattacaaacaagaagcttcaaatttattacaagaatcaaactgctcacagtatatggaaaaggttctaggtagattaaaagatgaagaaattcgatgtcgaaaatacctacatccaagttcatatactaaggtgattcatgaatgtcaacaacgaatggtagcagaccacttacagtttttacatgcagaatgtcataatataattcgacaagagaaaaaaaatgacatggcaaatatgtacgtcttactccgtgctgtgtccactggtttacctcatatgattcaggagctgcaaaaccacatccatgatgagggccttcgagcaaccagcaaccttactcaggaaaacatgccaacactatttgtggagtcagttttggaagtgcatggtaaatttgttcagcttatcaacactgttttgaatggtgatcagcattttatgagtgcgttggataaggcccttacgtcagttgtaaattacagagaacctaagtctgtttgcaaagcacctgaactgcttgctaagtactgtgacaacttactgaagaagtcagcgaaagggatgacagagaatgaagtggaagacaggctcacgagcttcatcacagtgttcaaatacattgatgacaaggacgtctttcaaaagttctacgcaagaatgctggcaaaacgtttaattcatgggttatccatgtctatggactctgaagaagccatgatcaacaaattaaagcaagcctgtggttatgagtttaccagcaagctacatcggatgtatacagatatgagtgtcagcgctgatctcaacaataagttcaacaattttatcaaaaaccaagacacagtaatagatttgggaattagttttcaaatatatgttctacaggctggtgcgtggcctcttactcaggctccttcatctacgtttgcaattccccaggaattagaaaaaagtgtacagatgtttgaattattttatagccaacatttcagtggaaggaaacttacatggttacattatctgtgtacaggtgaagttaaaatgaactatttgggcaaaccatatgtagccatggttacaacataccaaatggcagttcttcttgcctttaacaacagtgaaactgtcagttataaagagcttcaggacagcactcagatgaatgaaaaggaactgacaaaaacaatcaaatcattacttgatgtgaaaatgattaaccatgattcagaaaaggaagatattgatgcagaatcttcgttttcattaaatatgaactttagcagtaaaagaacaaaatttaaaattactacatcaatgcagaaagacacaccacaagaaatggagcagactagaagtgcagttgatgaggaccggaaaatgtatctccaagctgctatagttcgtatcatgaaagcacgaaaagtgcttcggcacaatgcccttattcaagaggtgattagccagtcaagagctaggtttaatcccagtatcagcatgattaagaagtgtattgaagttctgatagacaaacaatacatagaacgcagccaggcgtcggcagatgaatacagctacgtcgcgtgatgtcgctctcctccagcgt

SEQ ID NO: 123227 - DNA, 4271 bp, Homo sapiens
  Payload ID: 4196
  Gene Symbol: CUL2
  Gene Name: cullin 2
  ENST ID: ENST00000537177
  CDS Start-End: 236-2512
gtcacagtagggagtaccaggaggagaggaagcttgggtgccatgttgcagttgagcccaaactgaatgctgtctgtagaaggaaacaacaaactttgtactttatgtacagagtaacatggtcaactttttggcttaggtaggttatttttgtgtctttgataagggcaagatctgagattctgatcttgaagtcaagaactttgttttgtccactgtatcctcagagcttggaatggtgcctggcaaggaatttcaacactacacttgcacaatgtctttgaaaccaagagtagtagattttgatgaaacatggaacaaacttttgacgacaataaaagccgtggtcatgttggaatacgtcgaaagagcaacatggaatgaccgtttctcagatatctatgctttatgtgtggcctatcctgaaccccttggagaaagactttatacagaaactaagatttttttggaaaatcatgttcggcatttgcataagagagttttggagtcagaagaacaagtacttgttatgtatcataggtactgggaagaatacagcaagggtgcagactatatggactgcttatataggtatctcaacacccagtttattaaaaagaataaattaacagaagcggaccttcagtatggctatggtggtgtagatatgaatgaaccacttatggaaataggagagctagcattggatatgtggaggaaattgatggttgaaccacttcaggccatccttatccgaatgctgctccgagaaatcaaaaatgatcgtggtggagaagacccaaaccagaaagtaatccatggggttattaactcctttgttcatgttgaacagtataagaaaaaattccccttaaagttttatcaggaaatttttgagtctccctttctgactgaaacaggagagtattacaaacaagaagcttcaaatttattacaagaatcaaactgctcacagtatatggaaaaggttctaggtagattaaaagatgaagaaattcgatgtcgaaaatacctacatccaagttcatatactaaggtgattcatgaatgtcaacaacgaatggtagcagaccacttacagtttttacatgcagaatgtcataatataattcgacaagagaaaaaaaatgacatggcaaatatgtacgtcttactccgtgctgtgtccactggtttacctcatatgattcaggagctgcaaaaccacatccatgatgagggccttcgagcaaccagcaaccttactcaggaaaacatgccaacactatttgtggagtcagttttggaagtgcatggtaaatttgttcagcttatcaacactgttttgaatggtgatcagcattttatgagtgcgttggataaggcccttacgtcagttgtaaattacagagaacctaagtctgtttgcaaagcacctgaactgcttgctaagtactgtgacaacttactgaagaagtcagcgaaagggatgacagagaatgaagtggaagacaggctcacgagcttcatcacagtgttcaaatacattgatgacaaggacgtctttcaaaagttctacgcaagaatgctggcaaaacgtttaattcatgggttatccatgtctatggactctgaagaagccatgatcaacaaattaaagcaagcctgtggttatgagtttaccagcaagctacatcggatgtatacagatatgagtgtcagcgctgatctcaacaataagttcaacaattttatcaaaaaccaagacacagtaatagatttgggaattagttttcaaatatatgttctacaggctggtgcgtggcctcttactcaggctccttcatctacgtttgcaattccccaggaattagaaaaaagtgtacagatgtttgaattattttatagccaacatttcagtggaaggaaacttacatggttacattatctgtgtacaggtgaagttaaaatgaactatttgggcaaaccatatgtagccatggttacaacataccaaatggcagttcttcttgcctttaacaacagtgaaactgtcagttataaagagcttcaggacagcactcagatgaatgaaaaggaactgacaaaaacaatcaaatcattacttgatgtgaaaatgattaaccatgattcagaaaaggaagatattgatgcagaatcttcgttttcattaaatatgaactttagcagtaaaagaacaaaatttaaaattactacatcaatgcagaaagacacaccacaagaaatggagcagactagaagtgcagttgatgaggaccggaaaatgtatctccaagctgctatagttcgtatcatgaaagcacgaaaagtgcttcggcacaatgcccttattcaagaggtgattagccagtcaagagctaggtttaatcccagtatcagcatgattaagaagtgtattgaagttctgatagacaaacaatacatagaacgcagccaggcgtcggcagatgaatacagctacgtcgcgtgatgtcgctctcctccagcgtggtgtgagaagatcattgccatcaccatttggtgtgttcctgtgggaaaaagcaggactgtgcctccataatttggtcatttggcagcccctgttttctgctgtttacaacatcaccagtgccacgtcatgagcgtcaaagaaaatgcctagagatatttcaagctcatgtcattatgacatttcttaaaactttattaaaagaatgagtgaagtattgctgaaaagtggaaattcggttgggtaccatgctttttctccccttcacgtttgcagttgatgtgtctttttttttttttttaatgtatcttaaaggacataaaatttaaaaacttaaatattgtaatatgacagataacctaataattgtatctacattaaaatgacaaacatgatactgctgcttgtcaaataaaaaaaaaataaagaaatagaatgccttttttatgtggatggagtatcaggttgaccacaaaatatattgactcaaagcagctaatgcatctttagttgcgtttttatctgaatggtttaattcacttgtactcctatttaaatcctacatgaaaaatgtctagattattgttcttgactgcataggactgcattcagcataaagaatgctttatttttatggattagatatattggatctaaacattttgaatcttgaagatgtaattccatcagcagtttctggtggtgtgctactccacagacatcgcagagtgtgagcaggatgcttggtgacctcaagtctggcacagagagagcttttcattcaaaagttgtctttcttcggttgcataatccattaattctagcatagactagtaccctagctctgtggccttccctgagtcttaggaaatctatgataccaacatattccttctatatgcctcccctacctgttacccttacaaccctcctccaacagtttagatactagagtcactctcatcaatcacagatgtgcttagcaatgcataacctaaatacttttttaaaaaagaaaattgtacattgtactgggtgccacatatataaatcccattattttgtttattttatatatatatatatatataatatatatatatatatatctcaacagcagtgttaagagtactgcgatctattatcatatttattgtctatccacaccatcaccaccaccaccacacccctcctccctcaacatacaatttttctttattttaaaaaaaataagagacggggtttcgccatgtttcccaggctagtctggaacttctggcctcaagcaatcctatctctgtctcccaaagtgctgggattacaagcatgagccactgcatccatccaacacaaaatttttaaaatcggaatattttaaagcaaatcacacaaattatttcacttataatacttcagtaaggcctttaaaaaatccacagtgatattattactcctaacaaaaacaataattacttagtatcatctaatatgtggttcatatttaaatttgttgttttgagatgggtcttacaattggtttattcaattgcattttttctaactcgtgtctcaagtgttttaaaaatctactgaacttataatgacttatataatgtatttctcattttacctttcttccaaaagaggaaataatggcaaaccatataatattgtacattcactgtcaaaaagcaaacccttgttttgataacttgttgattgataaaagttttccaaattg

SEQ ID NO: 123228 - DNA, 4115 bp, Homo sapiens
  Payload ID: 4196
  Gene Symbol: CUL2
  Gene Name: cullin 2
  ENST ID: ENST00000626172
  CDS Start-End: 236-2356
attgctttccgggtggcgggggggatttggcagcagcggaagaaggagaccggagggtgtgtgttgggcaaagccggaggcagaggaggacgattgttttacggatcccgtgatcggcccgtccttctcccctttccccccctccctaccgcccctgtcccgccggggagcggcggcggccttggactttgctgtctttcctcgcggagacagatttcaacactacacttgcacaatgtctttgaaaccaagagtagtagattttgatgaaacatggaacaaacttttgacgacaataaaagccgtggtcatgttggaatacgtcgaaagagcaacatggaatgaccgtttctcagatatctatgctttatgtgtggcctatcctgaaccccttggagaaagactttatacagaaactaagatttttttggaaaatcatgttcggcatttgcataagagagttttggagtcagaagaacaagtacttgttatgtatcataggtactgggaagaatacagcaagggtgcagactatatggactgcttatataggtatctcaacacccagtttattaaaaagaataaattaacagaagcggaccttcagtatggctatggtggtgtagatatgaatgaaccacttatggaaataggagagctagcattggatatgtggaggaaattgatggttgaaccacttcaggccatccttatccgaatgctgctccgagaaatcaaaaatgatcgtggtggagaagacccaaaccagaaagtaatccatggggttattaactcctttgttcatgttgaacagtataagaaaaaattccccttaaagttttatcaggaaatttttgagtctccctttctgactgaaacaggagagtattacaaacaagaagcttcaaatttattacaagaatcaaactgctcacagtatatggaaaaggttctaggtagattaaaagatgaagaaattcgatgtcgaaaatacctacatccaagttcatatactaaggtgattcatgaatgtcaacaacgaatggtagcagaccacttacagtttttacatgcagaatgtcataatataattcgacaagagaaaaaaaatgacatggcaaatatgtacgtcttactccgtgctgtgtccactggtttacctcatatgattcaggagctgcaaaaccacatccatgatgagggccttcgagcaaccagcaaccttactcaggaaaacatgccaacactatttgtggagtcagttttggaagtgcatggtaaatttgttcagcttatcaacactgttttgaatggtgatcagcattttatgagtgcgttggataaggcccttacgtcagttgtaaattacagagaacctaagtctgtttgcaaagcacctgaactgcttgctaagtactgtgacaacttactgaagaagtcagcgaaagggatgacagagaatgaagtggaagacaggctcacgagcttcatcacagtgttcaaatacattgatgacaaggacgtctttcaaaagttctacgcaagaatgctggcaaaacgtttaattcatgggttatccatgtctatggactctgaagaagccatgatcaacaaattaaagcaagcctgtggttatgagtttaccagcaagctacatcggatgtatacagatatgagtgtcagcgctgatctcaacaataagttcaacaattttatcaaaaaccaagacacagtaatagatttgggaattagttttcaaatatatgttctacaggctggtgcgtggcctcttactcaggctccttcatctacgtttgcaattccccaggaattagaaaaaagtgtacagatgtttgaattattttatagccaacatttcagtggaaggaaacttacatggttacattatctgtgtacaggtgaagttaaaatgaactatttgggcaaaccatatgtagccatggttacaacataccaaatggcagttcttcttgcctttaacaacagtgaaactgtcagttataaagagcttcaggacagcactcagatgaatgaaaaggaactgacaaaaacaatcaaatcattacttgatgtgaaaatgattaaccatgattcagaaaaggaagatattgatgcagaatcttcgttttcattaaatatgaactttagcagtaaaagaacaaaatttaaaattactacatcaatgcagaaagacacaccacaagtgattagccagtcaagagctaggtttaatcccagtatcagcatgattaagaagtgtattgaagttctgatagacaaacaatacatagaacgcagccaggcgtcggcagatgaatacagctacgtcgcgtgatgtcgctctcctccagcgtggtgtgagaagatcattgccatcaccatttggtgtgttcctgtgggaaaaagcaggactgtgcctccataatttggtcatttggcagcccctgttttctgctgtttacaacatcaccagtgccacgtcatgagcgtcaaagaaaatgcctagagatatttcaagctcatgtcattatgacatttcttaaaactttattaaaagaatgagtgaagtattgctgaaaagtggaaattcggttgggtaccatgctttttctccccttcacgtttgcagttgatgtgtctttttttttttttttaatgtatcttaaaggacataaaatttaaaaacttaaatattgtaatatgacagataacctaataattgtatctacattaaaatgacaaacatgatactgctgcttgtcaaataaaaaaaaaataaagaaatagaatgccttttttatgtggatggagtatcaggttgaccacaaaatatattgactcaaagcagctaatgcatctttagttgcgtttttatctgaatggtttaattcacttgtactcctatttaaatcctacatgaaaaatgtctagattattgttcttgactgcataggactgcattcagcataaagaatgctttatttttatggattagatatattggatctaaacattttgaatcttgaagatgtaattccatcagcagtttctggtggtgtgctactccacagacatcgcagagtgtgagcaggatgcttggtgacctcaagtctggcacagagagagcttttcattcaaaagttgtctttcttcggttgcataatccattaattctagcatagactagtaccctagctctgtggccttccctgagtcttaggaaatctatgataccaacatattccttctatatgcctcccctacctgttacccttacaaccctcctccaacagtttagatactagagtcactctcatcaatcacagatgtgcttagcaatgcataacctaaatacttttttaaaaaagaaaattgtacattgtactgggtgccacatatataaatcccattattttgtttattttatatatatatatatatataatatatatatatatatatctcaacagcagtgttaagagtactgcgatctattatcatatttattgtctatccacaccatcaccaccaccaccacacccctcctccctcaacatacaatttttctttattttaaaaaaaataagagacggggtttcgccatgtttcccaggctagtctggaacttctggcctcaagcaatcctatctctgtctcccaaagtgctgggattacaagcatgagccactgcatccatccaacacaaaatttttaaaatcggaatattttaaagcaaatcacacaaattatttcacttataatacttcagtaaggcctttaaaaaatccacagtgatattattactcctaacaaaaacaataattacttagtatcatctaatatgtggttcatatttaaatttgttgttttgagatgggtcttacaattggtttattcaattgcattttttctaactcgtgtctcaagtgttttaaaaatctactgaacttataatgacttatataatgtatttctcattttacctttcttccaaaagaggaaataatggcaaaccatataatattgtacattcactgtcaaaaagcaaacccttgttttgataacttgttgattgataaaagttttccaaattg

SEQ ID NO: 123229 - DNA, 6741 bp, Homo sapiens
  Payload ID: 4197
  Gene Symbol: CUL3
  Gene Name: cullin 3
  Uniprot ID: Q13618
  ENST ID: ENST00000264414
  CDS Start-End: 340-2646
cctgcgcagtgagatgtttgtccgtcgccgccgccgccgccatcgcggaggagcgcgataaagggagccgagccggacgtgagggggaccccgcggagccgccgcgccagcgcagccccccagccgcatcggagtcgccagagtccgagccgccgccgccgccgccgccgcccccgccgccgccgcggctgcccaggggccggccagctccccagccctgcccgggggtcgcgccgccgccgcccccagcgtcgcccctagcctgcctgcccgccttaaatgtgacaccggcgtcgcggagcgcgacctgaagccgccgccggggaggggacgagcaccatgtcgaatctgagcaaaggcacgggcagccggaaggacaccaagatgcggatccgggcctttccgatgaccatggatgaaaaatatgtaaacagcatttgggaccttctgaaaaatgcaattcaagaaatccagcgtaagaataacagtggtcttagttttgaggagctctatagaaatgcatatacaatggttttgcataaacatggagaaaagctctacactggactaagagaagttgttaccgaacatctcataaataaggtgcgagaagatgtactaaattcattgaataacaactttcttcaaacgctaaatcaagcttggaatgatcatcaaacagctatggtgatgattagagacatactaatgtacatggaccgtgtgtatgtacaacaaaataatgtggagaacgtctacaatttgggattaattatttttcgagatcaagttgtacgttatgggtgtattagggatcatctacggcaaactctattggatatgattgcaagagagcggaaaggagaagtcgtagacagaggcgcaataagaaatgcttgccagatgttaatgattttaggtctcgaaggaagatcagtctatgaagaagattttgaggctccttttttggaaatgtctgcagaattttttcagatggaaagccagaaatttttagcagaaaatagtgcttcagtatatataaagaaagtagaagctagaattaatgaagaaatagaacgagtgatgcactgccttgacaaatcaacggaagaaccaattgtaaaggtggttgaaagggaactcatttccaagcacatgaagactatagtagaaatggagaattctgggctagtacatatgttgaaaaatggaaagacagaagaccttggttgcatgtacaagttatttagtcgtgtgccaaatggtttgaaaacaatgtgtgagtgtatgagttcctatttgagggagcaaggtaaagctcttgtttctgaagaaggagaaggaaagaatcctgttgactatatccagggcttattggatctgaagagtaggttcgatcgcttcctcctggaatcattcaacaatgaccgtctctttaaacaaactattgcgggtgactttgagtattttctcaacctcaactccaggtctcctgaatacctctcattatttattgatgataagctgaaaaagggagtcaaagggctaacagaacaagaagtagaaacaatattggataaagcaatggtcctttttaggtttatgcaagaaaaagatgtatttgaacgttattataaacaacacttggcaaggagacttctcacaaataaaagtgtttctgatgactctgaaaaaaacatgatatctaagttaaagactgaatgtggatgtcagttcacgtcaaaactggaaggaatgtttagggatatgagcatctcaaacacaacgatggatgaattcaggcaacatctacaggcaactggtgtatctttaggtggtgttgatcttacagtccgggtgctcacgacaggatattggcccactcagtcagccacaccaaagtgcaacatcccaccagcaccaagacatgcttttgagatattcagaaggttctacttagccaaacacagtggtcgacagctcacactccagcatcatatgggttctgcagatctcaatgccacattttatggaccagttaaaaaggaagatggatctgaagttggtgttggaggtgcacaagtaactggctctaatacacggaagcacatattgcaagtttccactttccagatgaccatattaatgctctttaataatagagaaaaatacacatttgaggaaattcagcaagagacagatatccctgaaagagagcttgttagagccctacagtccctcgcctgtggtaaaccaacacagcgggttcttacaaaagaacccaaatcaaaggaaatagaaaatggtcatatatttacagttaatgatcaattcacatccaaactacacagagtcaagattcaaacagttgctgccaaacaaggtgaatccgacccagagaggaaagaaacaaggcagaaagtagacgacgacagaaaacatgagatagaagctgctatagtgcggataatgaaatctagaaagaagatgcagcacaatgttctagtagcggaggtaactcagcagttgaaggcgcgattcttaccaagtccagttgttattaagaaacgtattgaaggacttattgagagagaatatttggcacgaacacctgaggatcgcaaagtatacacatatgtagcataaaatgcgttcagaaatttgatttattcttggactgtactcttcgcatggactgggaagttcttttaaatcattaaatattaagacgaccatctcttctattaaattacagtacatgttctagaccattgagatcaagcctttactccctttgagagtttccaacatcagttgattgagcttcaggctttacaacgtttatccctgtagagatcatctttacagttcctcgggaaaatgtgaatgtgctgcgttttgttttctttactgtatgaaaacaggaaaataaaagagaaatttagaaaatacagctcattacaataaaattgttggatttcatttccccaggtcttcagtgttgatgtaaatgtgttttgtagtgttgcttagcactttgcgcattgtgtaagttgggtaacaaaaatggcaaaagaaatgcagatttcccagttatcttgctctgaagacatttctttagctagtcttatttaattttaaaggtttgataaatatacaaagacccaagcatacaatttgagcatgctgtattctaccacttgcacttactcatcttctagccttatgaccaggaacctttgttttgggctcaagtacacatcctgatttggtttctccctgttgtaatttgagatttcccaaattaagtcttataatgattaggttttgttctgagttatttctagagaaagaaagtattttagtatgtgtaaattgtacaataatttttttgctgttgtactcactgctaatagtggattgtatagggtggtgtttttatttcatttattgtagacaaaaataatgaatttagtatacacatacccactaattcaagtatgtcagagcacaaagttggcagctggttatatttaattcagcccctctgaaaagcacatacagtctatactttgtttataaataccctaggtcctccctgcccctaaatatatattttggtgaagctgtggtgcactattaattttctgtttcaaaatgcaatctaaagatgcaataaatatgatgaccttgatagttttaatgaaatcttcaattcttgcagctgtgttttggaaagtgattaagcaatatttctcaaacctgatgattcttggatatttagctattgtcctccaaagagtcatcgtttcacgttttcaaacatgtgctttgtgctgaagattcttgtcagatatcctgtgcttccagagtatttttatcttcaattttatttaattttgtttcattttgttttcataagacaatgtttcagatatgtaatggggcaaaccactatagatttctgttggatagaaaaatgaaatgttactaataagtttaaattgacccttcgttgactatcagtactgttgatacatttattagaatgtatgtctcagaagatggtttctgtttaaatttatggtcaagttacaacaactgaattctaatatggattaaaaactccacataaatatttttccccatgcgtcttgggttataattttccttttagacttgcaaatatgcttttattgcaattttgtctccatctgtactgtagaattacaagccttgtgctctttatctctacattttccacttctacatgatgcaattaagatgccaatgaaaagtattgtgaacattattctcaggacacttttaccatacttgagtagtactaagtcaggtgtaacatggaaagctaagggtttcaccttctgattttgacataattggaaattttctataatggtaagatgtttataggaaagtaatggtagttcatgtttgagaatttttttattgctttcatttcccagttaaatgatatttaacacctgggaaaacaggacagctcagattgtcgagttagtaaacatgagcgatgtaaaaactttatttgaaatctcctaagtgagacattaaacattttagtgctagtttaagccattaaaagtaaagtttaagtttacgtcattgtctcaagtgtggctgtaaaaatcagatctagagtttagagacatacttgttaactttggagcacaggtttgatatttatgcttctaaatacattaaaacatttctgaattgcagttgaatggttggagattgctggcgatgtgatgctgcactgaaaaaactggtcacacaaaatgtttatatgtttgactgcataagtattattttaggtcataaaggttataacaaaatacatttaacattgctttctttttagcaagaggtcacagatgctattttttctcagtttttaatgctttaatttgaaagaaaaatgcatcctaaccattccatcctgttggtgcagagaaattttggtgatttattagaagacttttaaggagggtggatacatagtttttcaactgcaaaaatcatgtcatctcttcagtaactgttaaagtgtaattctctgccttcattatcaagtccaggacagtgtttattttgaatcgttaacattatttaaagactgaaaattcattgcaattagggaacgcacagcctcacaaaaagtggttgtgattgcaaggattctttatgtcagtgaacttaaaaagggaatgggggaagagatgcatgcctttctaaaggtatgctagagtcacctgtgtagcattgtaattatgtactatcaaacccccaagatgctgatgataggccttctctgtaagaatccttctcatagtgaagcactgttgatgttttgttcaccggatatgttgggtagcagaaaaggcctagaaccagttttaagattatgcctacatctctagaagactagtacactggcatcatcttaggtttctaaatattatttaattccttaatttggaaagcagttttaatgtttacagtttaagatactcattttcagtaactagtgttaaagatttttatctttgcctgtctactgtaacttaagactttcatagaataattttttatagagtatatggtatattgtgtcaatcttggaaggaaagctgttgcatatcaattgtaggtcatgtattttactatatgttgcatagtattttgcattctgtaaatacgaatgttaaaacatttcaggtcagcaaaattagaagtcatttctagtcctcaaagcagaaataattagaaatgttaacatttaagtgcttatcatatgccagatactattctgaatattttatgtatattcattcatttagttgtcatattggctttatgtgacataactgtcattataccagtgttgtccaaggttgctagcaggaaatggcagagccaggagttggacctaggtttaatcctatccatattccatgttacaaattgacatgattttccatattaaaaaattttcatttattttgtacctcattcacatgaatagtaatgtgacaaactaaagttaatacatgaagcattgcaatatggaattttgcacatttttgttagctttacattatttgctgataccaacttttggtaggaaggaaaacagggaaggtgattgctgctattctggaatgtgtccattgaaaagaaaataggcgctttgtctcctacaatcttagagaaagttttacatacttaagtgggtaccacagataggcatgtaccttaaattcaaatctacagttttacaaaatgttttcctttgtgtgcctttcctatgtcaaattagccagaaggaagaagagacgttaagaatggcagataaatttaacaggtaatgatacagagattggccattacgccagctctcaggagaaaaacaactaggatgtcttgaaacccgtgcatttaattttagaaatggcaaatttgtaagcgtgtcatttaagtaatttgatgctcagttttagggtctaagttgacctcgagtgagccatgcaaaaatagctttaaaattatacatgagcagctcaaagtaaacgtgtattttttagtaacaatgaaattgtcaaatttcaagattttaataacaggacagttcaactaataaactttattgcatacaagatttattgcaatgtgggaaaattaaaattctcagtctcagaa

SEQ ID NO: 123230 - DNA, 6592 bp, Homo sapiens
  Payload ID: 4197
  Gene Symbol: CUL3
  Gene Name: cullin 3
  Uniprot ID: Q13618
  ENST ID: ENST00000344951
  CDS Start-End: 389-2497
tctcgctcaggcggaggaggagaaggaggaggaggaggacgacgttcggcctgcgcagtgagatgtttgtccgtcgccgccgccgccgccatcgcggaggagcgcgataaagggagccgagccggacgtgagggggaccccgcggagccgccgcgccagcgcagccccccagccgcatcggagtcgccagagtccgagccgccgccgccgccgccgccgcccccgccgccgccgcggctgcccaggggccggccagctccccagccctgcccgggggtcgcgccgccgccgcccccagcgtcgcccctagcctgcctgcccgccttaaatgtgacaccggcgtcgcggagcgcgacctgaagccgccgccggggaggggacgagcaccatgtcgaatctgagcaaaggcacgggcagccggaaggacaccaagatgcggatccgggcctttccggtgcgagaagatgtactaaattcattgaataacaactttcttcaaacgctaaatcaagcttggaatgatcatcaaacagctatggtgatgattagagacatactaatgtacatggaccgtgtgtatgtacaacaaaataatgtggagaacgtctacaatttgggattaattatttttcgagatcaagttgtacgttatgggtgtattagggatcatctacggcaaactctattggatatgattgcaagagagcggaaaggagaagtcgtagacagaggcgcaataagaaatgcttgccagatgttaatgattttaggtctcgaaggaagatcagtctatgaagaagattttgaggctccttttttggaaatgtctgcagaattttttcagatggaaagccagaaatttttagcagaaaatagtgcttcagtatatataaagaaagtagaagctagaattaatgaagaaatagaacgagtgatgcactgccttgacaaatcaacggaagaaccaattgtaaaggtggttgaaagggaactcatttccaagcacatgaagactatagtagaaatggagaattctgggctagtacatatgttgaaaaatggaaagacagaagaccttggttgcatgtacaagttatttagtcgtgtgccaaatggtttgaaaacaatgtgtgagtgtatgagttcctatttgagggagcaaggtaaagctcttgtttctgaagaaggagaaggaaagaatcctgttgactatatccagggcttattggatctgaagagtaggttcgatcgcttcctcctggaatcattcaacaatgaccgtctctttaaacaaactattgcgggtgactttgagtattttctcaacctcaactccaggtctcctgaatacctctcattatttattgatgataagctgaaaaagggagtcaaagggctaacagaacaagaagtagaaacaatattggataaagcaatggtcctttttaggtttatgcaagaaaaagatgtatttgaacgttattataaacaacacttggcaaggagacttctcacaaataaaagtgtttctgatgactctgaaaaaaacatgatatctaagttaaagactgaatgtggatgtcagttcacgtcaaaactggaaggaatgtttagggatatgagcatctcaaacacaacgatggatgaattcaggcaacatctacaggcaactggtgtatctttaggtggtgttgatcttacagtccgggtgctcacgacaggatattggcccactcagtcagccacaccaaagtgcaacatcccaccagcaccaagacatgcttttgagatattcagaaggttctacttagccaaacacagtggtcgacagctcacactccagcatcatatgggttctgcagatctcaatgccacattttatggaccagttaaaaaggaagatggatctgaagttggtgttggaggtgcacaagtaactggctctaatacacggaagcacatattgcaagtttccactttccagatgaccatattaatgctctttaataatagagaaaaatacacatttgaggaaattcagcaagagacagatatccctgaaagagagcttgttagagccctacagtccctcgcctgtggtaaaccaacacagcgggttcttacaaaagaacccaaatcaaaggaaatagaaaatggtcatatatttacagttaatgatcaattcacatccaaactacacagagtcaagattcaaacagttgctgccaaacaaggtgaatccgacccagagaggaaagaaacaaggcagaaagtagacgacgacagaaaacatgagatagaagctgctatagtgcggataatgaaatctagaaagaagatgcagcacaatgttctagtagcggaggtaactcagcagttgaaggcgcgattcttaccaagtccagttgttattaagaaacgtattgaaggacttattgagagagaatatttggcacgaacacctgaggatcgcaaagtatacacatatgtagcataaaatgcgttcagaaatttgatttattcttggactgtactcttcgcatggactgggaagttcttttaaatcattaaatattaagacgaccatctcttctattaaattacagtacatgttctagaccattgagatcaagcctttactccctttgagagtttccaacatcagttgattgagcttcaggctttacaacgtttatccctgtagagatcatctttacagttcctcgggaaaatgtgaatgtgctgcgttttgttttctttactgtatgaaaacaggaaaataaaagagaaatttagaaaatacagctcattacaataaaattgttggatttcatttccccaggtcttcagtgttgatgtaaatgtgttttgtagtgttgcttagcactttgcgcattgtgtaagttgggtaacaaaaatggcaaaagaaatgcagatttcccagttatcttgctctgaagacatttctttagctagtcttatttaattttaaaggtttgataaatatacaaagacccaagcatacaatttgagcatgctgtattctaccacttgcacttactcatcttctagccttatgaccaggaacctttgttttgggctcaagtacacatcctgatttggtttctccctgttgtaatttgagatttcccaaattaagtcttataatgattaggttttgttctgagttatttctagagaaagaaagtattttagtatgtgtaaattgtacaataatttttttgctgttgtactcactgctaatagtggattgtatagggtggtgtttttatttcatttattgtagacaaaaataatgaatttagtatacacatacccactaattcaagtatgtcagagcacaaagttggcagctggttatatttaattcagcccctctgaaaagcacatacagtctatactttgtttataaataccctaggtcctccctgcccctaaatatatattttggtgaagctgtggtgcactattaattttctgtttcaaaatgcaatctaaagatgcaataaatatgatgaccttgatagttttaatgaaatcttcaattcttgcagctgtgttttggaaagtgattaagcaatatttctcaaacctgatgattcttggatatttagctattgtcctccaaagagtcatcgtttcacgttttcaaacatgtgctttgtgctgaagattcttgtcagatatcctgtgcttccagagtatttttatcttcaattttatttaattttgtttcattttgttttcataagacaatgtttcagatatgtaatggggcaaaccactatagatttctgttggatagaaaaatgaaatgttactaataagtttaaattgacccttcgttgactatcagtactgttgatacatttattagaatgtatgtctcagaagatggtttctgtttaaatttatggtcaagttacaacaactgaattctaatatggattaaaaactccacataaatatttttccccatgcgtcttgggttataattttccttttagacttgcaaatatgcttttattgcaattttgtctccatctgtactgtagaattacaagccttgtgctctttatctctacattttccacttctacatgatgcaattaagatgccaatgaaaagtattgtgaacattattctcaggacacttttaccatacttgagtagtactaagtcaggtgtaacatggaaagctaagggtttcaccttctgattttgacataattggaaattttctataatggtaagatgtttataggaaagtaatggtagttcatgtttgagaatttttttattgctttcatttcccagttaaatgatatttaacacctgggaaaacaggacagctcagattgtcgagttagtaaacatgagcgatgtaaaaactttatttgaaatctcctaagtgagacattaaacattttagtgctagtttaagccattaaaagtaaagtttaagtttacgtcattgtctcaagtgtggctgtaaaaatcagatctagagtttagagacatacttgttaactttggagcacaggtttgatatttatgcttctaaatacattaaaacatttctgaattgcagttgaatggttggagattgctggcgatgtgatgctgcactgaaaaaactggtcacacaaaatgtttatatgtttgactgcataagtattattttaggtcataaaggttataacaaaatacatttaacattgctttctttttagcaagaggtcacagatgctattttttctcagtttttaatgctttaatttgaaagaaaaatgcatcctaaccattccatcctgttggtgcagagaaattttggtgatttattagaagacttttaaggagggtggatacatagtttttcaactgcaaaaatcatgtcatctcttcagtaactgttaaagtgtaattctctgccttcattatcaagtccaggacagtgtttattttgaatcgttaacattatttaaagactgaaaattcattgcaattagggaacgcacagcctcacaaaaagtggttgtgattgcaaggattctttatgtcagtgaacttaaaaagggaatgggggaagagatgcatgcctttctaaaggtatgctagagtcacctgtgtagcattgtaattatgtactatcaaacccccaagatgctgatgataggccttctctgtaagaatccttctcatagtgaagcactgttgatgttttgttcaccggatatgttgggtagcagaaaaggcctagaaccagttttaagattatgcctacatctctagaagactagtacactggcatcatcttaggtttctaaatattatttaattccttaatttggaaagcagttttaatgtttacagtttaagatactcattttcagtaactagtgttaaagatttttatctttgcctgtctactgtaacttaagactttcatagaataattttttatagagtatatggtatattgtgtcaatcttggaaggaaagctgttgcatatcaattgtaggtcatgtattttactatatgttgcatagtattttgcattctgtaaatacgaatgttaaaacatttcaggtcagcaaaattagaagtcatttctagtcctcaaagcagaaataattagaaatgttaacatttaagtgcttatcatatgccagatactattctgaatattttatgtatattcattcatttagttgtcatattggctttatgtgacataactgtcattataccagtgttgtccaaggttgctagcaggaaatggcagagccaggagttggacctaggtttaatcctatccatattccatgttacaaattgacatgattttccatattaaaaaattttcatttattttgtacctcattcacatgaatagtaatgtgacaaactaaagttaatacatgaagcattgcaatatggaattttgcacatttttgttagctttacattatttgctgataccaacttttggtaggaaggaaaacagggaaggtgattgctgctattctggaatgtgtccattgaaaagaaaataggcgctttgtctcctacaatcttagagaaagttttacatacttaagtgggtaccacagataggcatgtaccttaaattcaaatctacagttttacaaaatgttttcctttgtgtgcctttcctatgtcaaattagccagaaggaagaagagacgttaagaatggcagataaatttaacaggtaatgatacagagattggccattacgccagctctcaggagaaaaacaactaggatgtcttgaaacccgtgcatttaattttagaaatggcaaatttgtaagcgtgtcatttaagtaatttgatgctcagttttagggtctaagttgacctcgagtgagccatgcaaaaatagctttaaaattatacatgagcagctcaaagtaaacgtgtattttttagtaacaatgaaattgtcaaatttcaagattttaataacaggacagttcaactaataaactttattgcatacaagatttattgcaatgtgggaaaattaaaattctcagtctcagaa

SEQ ID NO: 123231 - DNA, 3147 bp, Homo sapiens
  Payload ID: 4197
  Gene Symbol: CUL3
  Gene Name: cullin 3
  Uniprot ID: Q13618
  ENST ID: ENST00000409777
  CDS Start-End: 607-2841
aggacagagttctcagggtgaaaatgatttaaatggctctggaaaagtagtatacaagagatgtaggggaataatgttttctaaaagaaagctacgttatactgaggtgcatttatcatagtgttattcttaaggtgcctttgttttagctcatatctgtatatttgctaagcttgaaaaagctatatttctttctgacatttatttgatgactgtcgatgagcgttcaagagattctatcattgggcactttcctttgttgatgcatgagggattatactgtgctctgggctgtgttaaatctactgacgttctcatttaatcttcatgacagccctttgagatagatgctgttattgaacccaggacttaattttctcaaggtcacatggcttgtgagtaacaaagctgtggcacaaacctaaggctgtctgacagcaaaacccatgttctctaccagtatactaactatgtttaccaagataatcagtgactgtgatgttactttaccatattagcacaatggaatgtgacattagtccactgatttggactaggttttgggatatataagttctaatcccagctctatgattttggatgaccatggatgaaaaatatgtaaacagcatttgggaccttctgaaaaatgcaattcaagaaatccagcgtaagaataacagtggtcttagttttgaggagctctatagaaatgcatatacaatggttttgcataaacatggagaaaagctctacactggactaagagaagttgttaccgaacatctcataaataaggtgcgagaagatgtactaaattcattgaataacaactttcttcaaacgctaaatcaagcttggaatgatcatcaaacagctatggtgatgattagagacatactaatgtacatggaccgtgtgtatgtacaacaaaataatgtggagaacgtctacaatttgggattaattatttttcgagatcaagttgtacgttatgggtgtattagggatcatctacggcaaactctattggatatgattgcaagagagcggaaaggagaagtcgtagacagaggcgcaataagaaatgcttgccagatgttaatgattttaggtctcgaaggaagatcagtctatgaagaagattttgaggctccttttttggaaatgtctgcagaattttttcagatggaaagccagaaatttttagcagaaaatagtgcttcagtatatataaagaaagtagaagctagaattaatgaagaaatagaacgagtgatgcactgccttgacaaatcaacggaagaaccaattgtaaaggtggttgaaagggaactcatttccaagcacatgaagactatagtagaaatggagaattctgggctagtacatatgttgaaaaatggaaagacagaagaccttggttgcatgtacaagttatttagtcgtgtgccaaatggtttgaaaacaatgtgtgagtgtatgagttcctatttgagggagcaaggtaaagctcttgtttctgaagaaggagaaggaaagaatcctgttgactatatccagggcttattggatctgaagagtaggttcgatcgcttcctcctggaatcattcaacaatgaccgtctctttaaacaaactattgcgggtgactttgagtattttctcaacctcaactccaggtctcctgaatacctctcattatttattgatgataagctgaaaaagggagtcaaagggctaacagaacaagaagtagaaacaatattggataaagcaatggtcctttttaggtttatgcaagaaaaagatgtatttgaacgttattataaacaacacttggcaaggagacttctcacaaataaaagtgtttctgatgactctgaaaaaaacatgatatctaagttaaagactgaatgtggatgtcagttcacgtcaaaactggaaggaatgtttagggatatgagcatctcaaacacaacgatggatgaattcaggcaacatctacaggcaactggtgtatctttaggtggtgttgatcttacagtccgggtgctcacgacaggatattggcccactcagtcagccacaccaaagtgcaacatcccaccagcaccaagacatgcttttgagatattcagaaggttctacttagccaaacacagtggtcgacagctcacactccagcatcatatgggttctgcagatctcaatgccacattttatggaccagttaaaaaggaagatggatctgaagttggtgttggaggtgcacaagtaactggctctaatacacggaagcacatattgcaagtttccactttccagatgaccatattaatgctctttaataatagagaaaaatacacatttgaggaaattcagcaagagacagatatccctgaaagagagcttgttagagccctacagtccctcgcctgtggtaaaccaacacagcgggttcttacaaaagaacccaaatcaaaggaaatagaaaatggtcatatatttacagttaatgatcaattcacatccaaactacacagagtcaagattcaaacagttgctgccaaacaaggtgaatccgacccagagaggaaagaaacaaggcagaaagtagacgacgacagaaaacatgagatagaagctgctatagtgcggataatgaaatctagaaagaagatgcagcacaatgttctagtagcggaggtaactcagcagttgaaggcgcgattcttaccaagtccagttgttattaagaaacgtattgaaggacttattgagagagaatatttggcacgaacacctgaggatcgcaaagtatacacatatgtagcataaaatgcgttcagaaatttgatttattcttggactgtactcttcgcatggactgggaagttcttttaaatcattaaatattaagacgaccatctcttctattaaattacagtacatgttctagaccattgagatcaagcctttactccctttgagagtttccaacatcagttgattgagcttcaggctttacaacgtttatccctgtagagatcatctttacagttcctcgggaaaatgtgaatgtgctgcgttttgttttctttactgtatgaaaacaggaaaataaaagagaaatttagaaaatac

SEQ ID NO: 123232 - DNA, 2701 bp, Homo sapiens
  Payload ID: 4197
  Gene Symbol: CUL3
  Gene Name: cullin 3
  Uniprot ID: Q13618
  ENST ID: ENST00000409096
  CDS Start-End: 144-2378
gtagaaaattattcacagaggactaaagacttcttgtcctttgtatgtagtagatgttaagaattcacttcttttcatttagttttaatttgtctcatgatgtagttctctcagtaatcacagaaccttcaagatgtatgaccatggatgaaaaatatgtaaacagcatttgggaccttctgaaaaatgcaattcaagaaatccagcgtaagaataacagtggtcttagttttgaggagctctatagaaatgcatatacaatggttttgcataaacatggagaaaagctctacactggactaagagaagttgttaccgaacatctcataaataaggtgcgagaagatgtactaaattcattgaataacaactttcttcaaacgctaaatcaagcttggaatgatcatcaaacagctatggtgatgattagagacatactaatgtacatggaccgtgtgtatgtacaacaaaataatgtggagaacgtctacaatttgggattaattatttttcgagatcaagttgtacgttatgggtgtattagggatcatctacggcaaactctattggatatgattgcaagagagcggaaaggagaagtcgtagacagaggcgcaataagaaatgcttgccagatgttaatgattttaggtctcgaaggaagatcagtctatgaagaagattttgaggctccttttttggaaatgtctgcagaattttttcagatggaaagccagaaatttttagcagaaaatagtgcttcagtatatataaagaaagtagaagctagaattaatgaagaaatagaacgagtgatgcactgccttgacaaatcaacggaagaaccaattgtaaaggtggttgaaagggaactcatttccaagcacatgaagactatagtagaaatggagaattctgggctagtacatatgttgaaaaatggaaagacagaagaccttggttgcatgtacaagttatttagtcgtgtgccaaatggtttgaaaacaatgtgtgagtgtatgagttcctatttgagggagcaaggtaaagctcttgtttctgaagaaggagaaggaaagaatcctgttgactatatccagggcttattggatctgaagagtaggttcgatcgcttcctcctggaatcattcaacaatgaccgtctctttaaacaaactattgcgggtgactttgagtattttctcaacctcaactccaggtctcctgaatacctctcattatttattgatgataagctgaaaaagggagtcaaagggctaacagaacaagaagtagaaacaatattggataaagcaatggtcctttttaggtttatgcaagaaaaagatgtatttgaacgttattataaacaacacttggcaaggagacttctcacaaataaaagtgtttctgatgactctgaaaaaaacatgatatctaagttaaagactgaatgtggatgtcagttcacgtcaaaactggaaggaatgtttagggatatgagcatctcaaacacaacgatggatgaattcaggcaacatctacaggcaactggtgtatctttaggtggtgttgatcttacagtccgggtgctcacgacaggatattggcccactcagtcagccacaccaaagtgcaacatcccaccagcaccaagacatgcttttgagatattcagaaggttctacttagccaaacacagtggtcgacagctcacactccagcatcatatgggttctgcagatctcaatgccacattttatggaccagttaaaaaggaagatggatctgaagttggtgttggaggtgcacaagtaactggctctaatacacggaagcacatattgcaagtttccactttccagatgaccatattaatgctctttaataatagagaaaaatacacatttgaggaaattcagcaagagacagatatccctgaaagagagcttgttagagccctacagtccctcgcctgtggtaaaccaacacagcgggttcttacaaaagaacccaaatcaaaggaaatagaaaatggtcatatatttacagttaatgatcaattcacatccaaactacacagagtcaagattcaaacagttgctgccaaacaaggtgaatccgacccagagaggaaagaaacaaggcagaaagtagacgacgacagaaaacatgagatagaagctgctatagtgcggataatgaaatctagaaagaagatgcagcacaatgttctagtagcggaggtaactcagcagttgaaggcgcgattcttaccaagtccagttgttattaagaaacgtattgaaggacttattgagagagaatatttggcacgaacacctgaggatcgcaaagtatacacatatgtagcataaaatgcgttcagaaatttgatttattcttggactgtactcttcgcatggactgggaagttcttttaaatcattaaatattaagacgaccatctcttctattaaattacagtacatgttctagaccattgagatcaagcctttactccctttgagagtttccaacatcagttgattgagcttcaggctttacaacgtttatccctgtagagatcatctttacagttcctcgggaaaatgtgaatgtgctgcgttttgttttctttactgtatgaaaacaggaaaataaaagagaaatttagaaaatacagctcattacaataaaa

SEQ ID NO: 123233 - DNA, 688 bp, Homo sapiens
  Payload ID: 4197
  Gene Symbol: CUL3
  Gene Name: cullin 3
  ENST ID: ENST00000454323
  CDS Start-End: 1-132
cacatattgcaagtttccactttccagatgaccatattaatgctctttaataatagagaaaaatacacatttgagttgctgccaaacaaggtgaatccgacccagagaggaaagaaacaaggcagaaagtagacgacgacagaaaacatgagatagaagctgctatagtgcggataatgaaatctagaaagaagatgcagcacaatgttctagtagcggaggtaactcagcagttgaaggcgcgattcttaccaagtccagttgttattaagaaacgtattgaaggacttattgagagagaatatttggcacgaacacctgaggatcgcaaagtatacacatatgtagcataaaatgcgttcagaaatttgatttattcttggactgtactcttcgcatggactgggaagttcttttaaatcattaaatattaagacgaccatctcttctattaaattacagtacatgttctagaccattgagatcaagcctttactccctttgagagtttccaacatcagttgattgagcttcaggctttacaacgtttatccctgtagagatcatctttacagttcctcgggaaaatgtgaatgtgctgcgttttgttttctttactgtatgaaaacaggaaaataaaagagaaatttagaaaatacagctcattacaataaaattgttggatttc

SEQ ID NO: 123234 - DNA, 576 bp, Homo sapiens
  Payload ID: 4197
  Gene Symbol: CUL3
  Gene Name: cullin 3
  ENST ID: ENST00000436172
  CDS Start-End: 1-576
agtagagagtgacaagagccaaggacagagttctcagggtgaaaatgatttaaatggctctggaaaagtagtatacaagagatgtaggggaataatgttttctaaaagaaagctacgttatactgagatgaccatggatgaaaaatatgtaaacagcatttgggaccttctgaaaaatgcaattcaagaaatccagcgtaagaataacagtggtcttagttttgaggagctctatagaaatgcatatacaatggttttgcataaacatggagaaaagctctacactggactaagagaagttgttaccgaacatctcataaataaggtgcgagaagatgtactaaattcattgaataacaactttcttcaaacgctaaatcaagcttggaatgatcatcaaacagctatggtgatgattagagacatactaatgtacatggaccgtgtgtatgtacaacaaaataatgtggagaacgtctacaatttgggattaattatttttcgagatcaagttgtacgttatgggtgtattagggatcatctacggcaaactctattggatatgattgcaagaga

SEQ ID NO: 123235 - DNA, 546 bp, Homo sapiens
  Payload ID: 4197
  Gene Symbol: CUL3
  Gene Name: cullin 3
  ENST ID: ENST00000451538
  CDS Start-End: 1-334
gctcacactccagcatcatatgggttctgcagatctcaatgccacattttatggaccagttaaaaaggaagatggatctgaagttggtgttggaggtgcacaagtaactggctctaatacacggaagcacatattgcaagtttccactttccagatgaccatattaatgctctttaataatagagaaaaatacacatttgaggtaactcagcagttgaaggcgcgattcttaccaagtccagttgttattaagaaacgtattgaaggacttattgagagagaatatttggcacgaacacctgaggatcgcaaagtatacacatatgtagcataaaatgcgttcagaaatttgatttattcttggactgtactcttcgcatggactgggaagttcttttaaatcattaaatattaagacgaccatctcttctattaaattacagtacatgttctagaccattgagatcaagcctttactccctttgagagtttccaacatcagttgattgagcttcaggctttacaacgtttatccctgtagagatc

SEQ ID NO: 123236 - DNA, 1426 bp, Homo sapiens
  Payload ID: 4197
  Gene Symbol: CUL3
  Gene Name: cullin 3
  ENST ID: ENST00000617432
  CDS Start-End: 87-1115
aaagggagtcaaagggctaacagaacaagaagtagaaacaatattggataaagcaatggtcctttttaggtttatgcaagaaaaagatgtatttgaacgttattataaacaacacttggcaaggagacttctcacaaataaaagtgtttctgatgactctgaaaaacatgatatctaagttaaagactgaatgtggatgtcagttcacgtcaaaactggaaggaatgtttagggatatgagcatctcaaacacaacgatggatgaattcaggcaacatctacaggcaactggtgtatctttaggtggtgttgatcttacagtccgggtgctcacgacaggatattggcccactcagtcagccacaccaaagtgcaacatcccaccagcaccaagacatgcttttgagatattcagaaggttctacttagccaaacacagtggtcgacagctcacactccagcatcatatgggttctgcagatctcaatgccacattttatggaccagttaaaaaggaagatggatctgaagttggtgttggaggtgcacaagtaactggctctaatacacggaagcacatattgcaagtttccactttccagatgaccatattaatgctctttaataatagagaaaaatacacatttgaggaaattcagcaagagacagatatccctgaaagagagcttgttagagccctacagtccctcgcctgtggtaaaccaacacagcgggttcttacaaaagaacccaaatcaaaggaaatagaaaatggtcatatatttacagttaatgatcaattcacatccaaactacacagagtcaagattcaaacagttgctgccaaacaaggtgaatccgacccagagaggaaagaaacaaggcagaaagtagacgacgacagaaaacatgagatagaagctgctatagtgcggataatgaaatctagaaagaagatgcagcacaatgttctagtagcggaggtaactcagcagttgaaggcgcgattcttaccaagtccagttgttattaagaaacgtattgaaggacttattgagagagaatatttggcacgaacacctgaggatcgcaaagtatacacatatgtagcataaaatgcgttcagaaatttgatttattcttggactgtactcttcgcatggactgggaagttcttttaaatcattaaatattaagacgaccatctcttctattaaattacagtacatgttctagaccattgagatcaagcctttactccctttgagagtttccaacatcagttgattgagcttcaggctttacaacgtttatccctgtagagatcatctttacagttcctcgggaaaatgtgaatgtgctgcgttttgttttctttactgtatgaaaacaggaaaataaaagagaaatttagaaaatacagctc

SEQ ID NO: 123237 - DNA, 587 bp, Homo sapiens
  Payload ID: 4197
  Gene Symbol: CUL3
  Gene Name: cullin 3
  ENST ID: ENST00000432260
  CDS Start-End: 1-168
gaccttctgaaaaatgcaattcaagaaatccagcgtaagaataacagtggtcttagttttgaggagctctatagaaatgcatatacaatggttttgcataaacatggagaaaagctctacactggactaagagaagttgttaccgaacatctcataaataaggaataatacataagtgatgttgtgtcctcagtgcatcacatcaggaggcacttgatgtcagtttatcccattattggtgatgttaactttgatcattggtgtccgccagatttctccactgtaaaggtgcgagaagatgtactaaattcattgaataacaactttcttcaaacgctaaatcaagcttggaatgatcatcaaacagctatggtgatgattagagacatactaatgtacatggaccgtgtgtatgtacaacaaaataatgtggagaacgtctacaatttgggattaattatttttcgagatcaagttgtacgttatgggtgtattagggatcatctacggcaaactctattggatatgattgcaagagagcggaaaggagaagtcgtagacagaggcgcaataagaaatgcttgcca

SEQ ID NO: 123238 - DNA, 3705 bp, Homo sapiens
  Payload ID: 4198
  Gene Symbol: CUL4A
  Gene Name: cullin 4A
  ENST ID: ENST00000326335
  CDS Start-End: 212-2215
acttccggccctcggtccgtctgggtcctggcgcccccggccccgccgcgggtgcgcagacagacctcggctgcccgacaactacacgcaggacacgtggcggaagctgcacgaggcggtgcgggccgtgcagagcagcacctccatcaggtacaacctcgaggagctctaccaggctgtggaaaatctctgttctcacaaagtctccccaatgctctacaagcaactgcgtcaggcctgtgaagaccacgtccaggcacagatccttccgtttagagaagactcactagatagtgttttatttttaaagaagattaacacgtgctggcaggaccactgcagacaaatgatcatgatcagaagcatcttcctgttcttggaccgcacctatgtgctgcagaactccacgctgccctccatctgtcctgtttcttactgtctatacagggatatgggattagaactgtttagaacccatattattagtgataaaatggttcagagtaaaaccattgatggaatcctactgctgatcgagcgcgagaggagcggcgaggccgtggaccggagcctgttgcggagcctcctgggcatgctgtctgacctgcaggtgtataaagattcatttgaactgaaatttttggaagagactaattgcttatatgctgccgaaggccaaaggttaatgcaggaaagagaggttccagaatatcttaaccatgtaagtaaacgcttagaggaagagggagacagagtaatcacttacttggaccacagcacacagaaaccactgattgcttgtgtggagaaacagctattaggagaacatttaacagcaattctgcagaaagggctcgaccacttactggatgagaacagagtgccggacctcgcacagatgtaccagctgttcagccgggtgaggggcgggcagcaggcgctgctgcagcactggagcgagtacatcaagacttttggaacagcgatcgtaatcaatcctgagaaagacaaagacatggtccaagacctgttggacttcaaggacaaggtggaccacgtgatcgaggtctgcttccagaagaatgagcggttcgtcaacctgatgaaggagtcctttgagacgttcatcaacaagagacccaacaagcctgcagaactgatcgcaaagcatgtggattcaaagttaagagcaggcaacaaagaagccacagacgaggagctggagcggacgttggacaagatcatgatcctgttcaggtttatccacggtaaagatgtctttgaagcattttataaaaaagatttggcaaaaagactccttgttgggaaaagtgcctcagtcgatgctgaaaagtctatgttgtcaaagctcaagcatgagtgcggtgcagccttcaccagcaagctggaaggcatgttcaaggacatggagctttcgaaggacatcatggttcatttcaagcagcatatgcagaatcagagtgactcaggccctatagacctcacagtgaacatactcacaatgggctactggccaacatacacgcccatggaagtgcacttaaccccagaaatgattaaacttcaggaagtatttaaggcattttatcttggaaagcacagtggtcgaaaacttcagtggcaaactactttgggacatgctgttttaaaagcggagtttaaagaagggaagaaggaattccaggtgtccctcttccagacactggtgctcctcatgttcaacgagggagatggcttcagctttgaggagataaaaatggccacggggatagaggatagtgaattgcgcagaacgctgcagtccctggcctgtggcaaagcacgtgtgctgattaaaagtcccaaaggaaaggaagtggaagatggagacaagttcatttttaatggagagttcaagcacaagttgtttagaataaagatcaatcaaattcagatgaaggaaactgttgaggaacaggttagcaccactgagagagtgtttcaggatagacaatatcagattgatgctgctatcgtcagaataatgaagatgagaaagactcttggtcataatcttctagtttctgaattatataatcagctgaaatttccagtaaagcctggagatttgaaaaagagaattgaatctctgatagacagagactatatggagagagacaaagacaatccgaatcagtaccactacgtggcctgacgcatctgcagacggttccccttcatgaaacactagaatgtaccctcagagcaggaagcacacctgtgccatttctgggactctgattgatccagctgtggacattggaaggcgaaggaagggaggtggctcctgggtcatctttcacaaggctcaagacttcaacctgcagatgtatctttttccctccagtttttcctctagttcttttaggcatttaaattgtttctgttactctgtgcaaaataactttgagattggacaagaagatgttactaaagagaagttcctttaaaaggtcttgttcttgtgtcaaaaagctgcaagtttggtttgttctcgtgtgtgatcatgagtgcacaatgaagaagaccctagatgctgcattttttagctctgaagattccttaggtatccctgaagacagctcgctcagatgatcagcatttagagtgaaaacaagggcccttcatgggtgaacattagaaagagccagggttcaaagctggcgaatggatgacgcaccctagccactggcccctctctgtttcatgtatttccaaaagttgtaaactttgatggctgatttttcgtaagtcaggtttctaagtgagctccctgaggtgccaaggccatggtgtccgccctgctgcgtctgttcgtcagctgagttccttgtgaatctctgttttagggtttggggctagtgtgtttgtgtttccattctaagattgagtctggcagtccctgtttttttgcattggggtaactgctctttgattttttttaattgcagtatttgtgtgattgcaataataaagtttggtttggtttttacagtcatgcgcagggacgatccttgttctctgctgtaaactgtaaaaagtttatggagacttaaagtcttgatgttgtgaagcagaggttattttgtggaaagattaaaaggattttgttggtacctggttttgtgttgtgtatatatacatgaggttgaacagtgaaaggaaagttcagtagtgatgttagaagggtaactatgacaaagatacttttgagataacatttaaaagtactttatattttacataatagcatgtttcattttgattaaaagctaccaaaggaattttgatcatggcataagtgtttaaagcaatattttctggaatataccaagtttatataatttgattttgtgctaaattattaagagtctctttttgaaacatgcgggtttgaaatatgacaccttgtgggtttccatattaaaatcctcactctttaattgtcatttctatctttgaaaattttcatttatgagttccatgatatgtggtctaagaaagaccaaacagatttctattttttttttcttataagttcgttgtgtctagagattgttaatattgtaatttaatgtagacttactttgaataaaattagtttaattggccttaaaattacattaataaaactttgtgatatgc

SEQ ID NO: 123239 - DNA, 2364 bp, Homo sapiens
  Payload ID: 4198
  Gene Symbol: CUL4A
  Gene Name: cullin 4A
  Uniprot ID: Q13619
  ENST ID: ENST00000375440
  CDS Start-End: 85-2364
ggaggccgcgcggaccggggcgggcggagcggagctcggcgggcggcggcgctcggggcggggcgcggcggttccggcccagccatggcggacgaggccccgcggaagggcagcttctcggcgctcgtgggccgcaccaacggcctcaccaagcccgcggccctggccgccgcgcccgccaagccggggggcgcgggcggctccaagaagctggtcatcaagaacttccgagacagacctcggctgcccgacaactacacgcaggacacgtggcggaagctgcacgaggcggtgcgggccgtgcagagcagcacctccatcaggtacaacctcgaggagctctaccaggctgtggaaaatctctgttctcacaaagtctccccaatgctctacaagcaactgcgtcaggcctgtgaagaccacgtccaggcacagatccttccgtttagagaagactcactagatagtgttttatttttaaagaagattaacacgtgctggcaggaccactgcagacaaatgatcatgatcagaagcatcttcctgttcttggaccgcacctatgtgctgcagaactccacgctgccctccatctgggatatgggattagaactgtttagaacccatattattagtgataaaatggttcagagtaaaaccattgatggaatcctactgctgatcgagcgcgagaggagcggcgaggccgtggaccggagcctgttgcggagcctcctgggcatgctgtctgacctgcaggtgtataaagattcatttgaactgaaatttttggaagagactaattgcttatatgctgccgaaggccaaaggttaatgcaggaaagagaggttccagaatatcttaaccatgtaagtaaacgcttagaggaagagggagacagagtaatcacttacttggaccacagcacacagaaaccactgattgcttgtgtggagaaacagctattaggagaacatttaacagcaattctgcagaaagggctcgaccacttactggatgagaacagagtgccggacctcgcacagatgtaccagctgttcagccgggtgaggggcgggcagcaggcgctgctgcagcactggagcgagtacatcaagacttttggaacagcgatcgtaatcaatcctgagaaagacaaagacatggtccaagacctgttggacttcaaggacaaggtggaccacgtgatcgaggtctgcttccagaagaatgagcggttcgtcaacctgatgaaggagtcctttgagacgttcatcaacaagagacccaacaagcctgcagaactgatcgcaaagcatgtggattcaaagttaagagcaggcaacaaagaagccacagacgaggagctggagcggacgttggacaagatcatgatcctgttcaggtttatccacggtaaagatgtctttgaagcattttataaaaaagatttggcaaaaagactccttgttgggaaaagtgcctcagtcgatgctgaaaagtctatgttgtcaaagctcaagcatgagtgcggtgcagccttcaccagcaagctggaaggcatgttcaaggacatggagctttcgaaggacatcatggttcatttcaagcagcatatgcagaatcagagtgactcaggccctatagacctcacagtgaacatactcacaatgggctactggccaacatacacgcccatggaagtgcacttaaccccagaaatgattaaacttcaggaagtatttaaggcattttatcttggaaagcacagtggtcgaaaacttcagtggcaaactactttgggacatgctgttttaaaagcggagtttaaagaagggaagaaggaattccaggtgtccctcttccagacactggtgctcctcatgttcaacgagggagatggcttcagctttgaggagataaaaatggccacggggatagaggatagtgaattgcgcagaacgctgcagtccctggcctgtggcaaagcacgtgtgctgattaaaagtcccaaaggaaaggaagtggaagatggagacaagttcatttttaatggagagttcaagcacaagttgtttagaataaagatcaatcaaattcagatgaaggaaactgttgaggaacaggttagcaccactgagagagtgtttcaggatagacaatatcagattgatgctgctatcgtcagaataatgaagatgagaaagactcttggtcataatcttctagtttctgaattatataatcagctgaaatttccagtaaagcctggagatttgaaaaagagaattgaatctctgatagacagagactatatggagagagacaaagacaatccgaatcagtaccactacgtggcctga

SEQ ID NO: 123240 - DNA, 4037 bp, Homo sapiens
  Payload ID: 4198
  Gene Symbol: CUL4A
  Gene Name: cullin 4A
  Uniprot ID: Q13619
  ENST ID: ENST00000375441
  CDS Start-End: 568-2547
attcatcccgcatcctgctgggaaacagcgtccatccgacacagcaccgcccacagcgggccctcggcgtggcccgcaggcccttcggaccgcctgggagcgcggccacacgtgccagcaagtgagggcagcgacctgggaccgccgcgtctacttacaccgcgacgactccgcgatccacggacaccgcccggcccccacggcggccctgcaggggagaactcgggccgccttcccgagtcccggccgccgctgttcggctcgcgcggctgcccgccggggacccgaacggaagaagggtggcgaggcgggaaaggaaaaggcctgagggtccaaggcaggaggggacacacggaacacgccgagggccaaccacgccgccgcgcgctccccggctaggacccacctgctgcagacagacctcggctgcccgacaactacacgcaggacacgtggcggaagctgcacgaggcggtgcgggccgtgcagagcagcacctccatcaggtacaacctcgaggagctctaccaggctgtggaaaatctctgttctcacaaagtctccccaatgctctacaagcaactgcgtcaggcctgtgaagaccacgtccaggcacagatccttccgtttagagaagactcactagatagtgttttatttttaaagaagattaacacgtgctggcaggaccactgcagacaaatgatcatgatcagaagcatcttcctgttcttggaccgcacctatgtgctgcagaactccacgctgccctccatctgggatatgggattagaactgtttagaacccatattattagtgataaaatggttcagagtaaaaccattgatggaatcctactgctgatcgagcgcgagaggagcggcgaggccgtggaccggagcctgttgcggagcctcctgggcatgctgtctgacctgcaggtgtataaagattcatttgaactgaaatttttggaagagactaattgcttatatgctgccgaaggccaaaggttaatgcaggaaagagaggttccagaatatcttaaccatgtaagtaaacgcttagaggaagagggagacagagtaatcacttacttggaccacagcacacagaaaccactgattgcttgtgtggagaaacagctattaggagaacatttaacagcaattctgcagaaagggctcgaccacttactggatgagaacagagtgccggacctcgcacagatgtaccagctgttcagccgggtgaggggcgggcagcaggcgctgctgcagcactggagcgagtacatcaagacttttggaacagcgatcgtaatcaatcctgagaaagacaaagacatggtccaagacctgttggacttcaaggacaaggtggaccacgtgatcgaggtctgcttccagaagaatgagcggttcgtcaacctgatgaaggagtcctttgagacgttcatcaacaagagacccaacaagcctgcagaactgatcgcaaagcatgtggattcaaagttaagagcaggcaacaaagaagccacagacgaggagctggagcggacgttggacaagatcatgatcctgttcaggtttatccacggtaaagatgtctttgaagcattttataaaaaagatttggcaaaaagactccttgttgggaaaagtgcctcagtcgatgctgaaaagtctatgttgtcaaagctcaagcatgagtgcggtgcagccttcaccagcaagctggaaggcatgttcaaggacatggagctttcgaaggacatcatggttcatttcaagcagcatatgcagaatcagagtgactcaggccctatagacctcacagtgaacatactcacaatgggctactggccaacatacacgcccatggaagtgcacttaaccccagaaatgattaaacttcaggaagtatttaaggcattttatcttggaaagcacagtggtcgaaaacttcagtggcaaactactttgggacatgctgttttaaaagcggagtttaaagaagggaagaaggaattccaggtgtccctcttccagacactggtgctcctcatgttcaacgagggagatggcttcagctttgaggagataaaaatggccacggggatagaggatagtgaattgcgcagaacgctgcagtccctggcctgtggcaaagcacgtgtgctgattaaaagtcccaaaggaaaggaagtggaagatggagacaagttcatttttaatggagagttcaagcacaagttgtttagaataaagatcaatcaaattcagatgaaggaaactgttgaggaacaggttagcaccactgagagagtgtttcaggatagacaatatcagattgatgctgctatcgtcagaataatgaagatgagaaagactcttggtcataatcttctagtttctgaattatataatcagctgaaatttccagtaaagcctggagatttgaaaaagagaattgaatctctgatagacagagactatatggagagagacaaagacaatccgaatcagtaccactacgtggcctgacgcatctgcagacggttccccttcatgaaacactagaatgtaccctcagagcaggaagcacacctgtgccatttctgggactctgattgatccagctgtggacattggaaggcgaaggaagggaggtggctcctgggtcatctttcacaaggctcaagacttcaacctgcagatgtatctttttccctccagtttttcctctagttcttttaggcatttaaattgtttctgttactctgtgcaaaataactttgagattggacaagaagatgttactaaagagaagttcctttaaaaggtcttgttcttgtgtcaaaaagctgcaagtttggtttgttctcgtgtgtgatcatgagtgcacaatgaagaagaccctagatgctgcattttttagctctgaagattccttaggtatccctgaagacagctcgctcagatgatcagcatttagagtgaaaacaagggcccttcatgggtgaacattagaaagagccagggttcaaagctggcgaatggatgacgcaccctagccactggcccctctctgtttcatgtatttccaaaagttgtaaactttgatggctgatttttcgtaagtcaggtttctaagtgagctccctgaggtgccaaggccatggtgtccgccctgctgcgtctgttcgtcagctgagttccttgtgaatctctgttttagggtttggggctagtgtgtttgtgtttccattctaagattgagtctggcagtccctgtttttttgcattggggtaactgctctttgattttttttaattgcagtatttgtgtgattgcaataataaagtttggtttggtttttacagtcatgcgcagggacgatccttgttctctgctgtaaactgtaaaaagtttatggagacttaaagtcttgatgttgtgaagcagaggttattttgtggaaagattaaaaggattttgttggtacctggttttgtgttgtgtatatatacatgaggttgaacagtgaaaggaaagttcagtagtgatgttagaagggtaactatgacaaagatacttttgagataacatttaaaagtactttatattttacataatagcatgtttcattttgattaaaagctaccaaaggaattttgatcatggcataagtgtttaaagcaatattttctggaatataccaagtttatataatttgattttgtgctaaattattaagagtctctttttgaaacatgcgggtttgaaatatgacaccttgtgggtttccatattaaaatcctcactctttaattgtcatttctatctttgaaaattttcatttatgagttccatgatatgtggtctaagaaagaccaaacagatttctattttttttttcttataagttcgttgtgtctagagattgttaatattgtaatttaatgtagacttactttgaataaaattagtttaattggccttaaaattacattaataaaactttgtgatatgc

SEQ ID NO: 123241 - DNA, 3724 bp, Homo sapiens
  Payload ID: 4198
  Gene Symbol: CUL4A
  Gene Name: cullin 4A
  Uniprot ID: Q13619
  ENST ID: ENST00000451881
  CDS Start-End: 250-2229
cctggggaccggctcggcgacgcgctcgggctgagggggcccggggtctttctgccggggccccgtcctctcagccgggacgccagcggctctgattacagacctcggctgcccgacaactacacgcaggacacgtggcggaagctgcacgaggcggtgcgggccgtgcagagcagcacctccatcaggtacaacctcgaggagctctaccaggctgtggaaaatctctgttctcacaaagtctccccaatgctctacaagcaactgcgtcaggcctgtgaagaccacgtccaggcacagatccttccgtttagagaagactcactagatagtgttttatttttaaagaagattaacacgtgctggcaggaccactgcagacaaatgatcatgatcagaagcatcttcctgttcttggaccgcacctatgtgctgcagaactccacgctgccctccatctgggatatgggattagaactgtttagaacccatattattagtgataaaatggttcagagtaaaaccattgatggaatcctactgctgatcgagcgcgagaggagcggcgaggccgtggaccggagcctgttgcggagcctcctgggcatgctgtctgacctgcaggtgtataaagattcatttgaactgaaatttttggaagagactaattgcttatatgctgccgaaggccaaaggttaatgcaggaaagagaggttccagaatatcttaaccatgtaagtaaacgcttagaggaagagggagacagagtaatcacttacttggaccacagcacacagaaaccactgattgcttgtgtggagaaacagctattaggagaacatttaacagcaattctgcagaaagggctcgaccacttactggatgagaacagagtgccggacctcgcacagatgtaccagctgttcagccgggtgaggggcgggcagcaggcgctgctgcagcactggagcgagtacatcaagacttttggaacagcgatcgtaatcaatcctgagaaagacaaagacatggtccaagacctgttggacttcaaggacaaggtggaccacgtgatcgaggtctgcttccagaagaatgagcggttcgtcaacctgatgaaggagtcctttgagacgttcatcaacaagagacccaacaagcctgcagaactgatcgcaaagcatgtggattcaaagttaagagcaggcaacaaagaagccacagacgaggagctggagcggacgttggacaagatcatgatcctgttcaggtttatccacggtaaagatgtctttgaagcattttataaaaaagatttggcaaaaagactccttgttgggaaaagtgcctcagtcgatgctgaaaagtctatgttgtcaaagctcaagcatgagtgcggtgcagccttcaccagcaagctggaaggcatgttcaaggacatggagctttcgaaggacatcatggttcatttcaagcagcatatgcagaatcagagtgactcaggccctatagacctcacagtgaacatactcacaatgggctactggccaacatacacgcccatggaagtgcacttaaccccagaaatgattaaacttcaggaagtatttaaggcattttatcttggaaagcacagtggtcgaaaacttcagtggcaaactactttgggacatgctgttttaaaagcggagtttaaagaagggaagaaggaattccaggtgtccctcttccagacactggtgctcctcatgttcaacgagggagatggcttcagctttgaggagataaaaatggccacggggatagaggatagtgaattgcgcagaacgctgcagtccctggcctgtggcaaagcacgtgtgctgattaaaagtcccaaaggaaaggaagtggaagatggagacaagttcatttttaatggagagttcaagcacaagttgtttagaataaagatcaatcaaattcagatgaaggaaactgttgaggaacaggttagcaccactgagagagtgtttcaggatagacaatatcagattgatgctgctatcgtcagaataatgaagatgagaaagactcttggtcataatcttctagtttctgaattatataatcagctgaaatttccagtaaagcctggagatttgaaaaagagaattgaatctctgatagacagagactatatggagagagacaaagacaatccgaatcagtaccactacgtggcctgacgcatctgcagacggttccccttcatgaaacactagaatgtaccctcagagcaggaagcacacctgtgccatttctgggactctgattgatccagctgtggacattggaaggcgaaggaagggaggtggctcctgggtcatctttcacaaggctcaagacttcaacctgcagatgtatctttttccctccagtttttcctctagttcttttaggcatttaaattgtttctgttactctgtgcaaaataactttgagattggacaagaagatgttactaaagagaagttcctttaaaaggtcttgttcttgtgtcaaaaagctgcaagtttggtttgttctcgtgtgtgatcatgagtgcacaatgaagaagaccctagatgctgcattttttagctctgaagattccttaggtatccctgaagacagctcgctcagatgatcagcatttagagtgaaaacaagggcccttcatgggtgaacattagaaagagccagggttcaaagctggcgaatggatgacgcaccctagccactggcccctctctgtttcatgtatttccaaaagttgtaaactttgatggctgatttttcgtaagtcaggtttctaagtgagctccctgaggtgccaaggccatggtgtccgccctgctgcgtctgttcgtcagctgagttccttgtgaatctctgttttagggtttggggctagtgtgtttgtgtttccattctaagattgagtctggcagtccctgtttttttgcattggggtaactgctctttgattttttttaattgcagtatttgtgtgattgcaataataaagtttggtttggtttttacagtcatgcgcagggacgatccttgttctctgctgtaaactgtaaaaagtttatggagacttaaagtcttgatgttgtgaagcagaggttattttgtggaaagattaaaaggattttgttggtacctggttttgtgttgtgtatatatacatgaggttgaacagtgaaaggaaagttcagtagtgatgttagaagggtaactatgacaaagatacttttgagataacatttaaaagtactttatattttacataatagcatgtttcattttgattaaaagctaccaaaggaattttgatcatggcataagtgtttaaagcaatattttctggaatataccaagtttatataatttgattttgtgctaaattattaagagtctctttttgaaacatgcgggtttgaaatatgacaccttgtgggtttccatattaaaatcctcactctttaattgtcatttctatctttgaaaattttcatttatgagttccatgatatgtggtctaagaaagaccaaacagatttctattttttttttcttataagttcgttgtgtctagagattgttaatattgtaatttaatgtagacttactttgaataaaattagtttaattggccttaaaattacattaataaaactttgtgatatgcaaatg

SEQ ID NO: 123242 - DNA, 1111 bp, Homo sapiens
  Payload ID: 4198
  Gene Symbol: CUL4A
  Gene Name: cullin 4A
  ENST ID: ENST00000488558
  CDS Start-End: 29-553
ggcggggcgcggcggttccggcccagccatggcggacgaggccccgcggaagggcagcttctcggcgctcgtgggccgcaccaacggcctcaccaagcccgcggccctggccgccgcgcccgccaagccggggggcgcgggcggctccaagaagctggtcatcaagaacttccgagacagacctcggctgcccgacaactacacgcaggacacgtggcggaagctgcacgaggcggtgcgggccgtgcagagcagcacctccatcaggtacaacctcgaggagctctaccaggctgtggaaaatctctgttctcacaaagtctccccaatgctctacaagcaactgcgtcaggcctgtgaagaccacgtccaggcacagatccttccgtttagagaagactcactagatagtgttttatttttaaagaagattaacacgtgctggcaggaccactgcagacaaatgatcatgatcagaagcatcttcctgttcttggaccgcacctatgtgctgcagaactccacgctgccctccatctgccaaaatcattaacgtgaacgtaggagtccaggtgggtcttagccttgaaacaccaggtgtctagccagcagcaaggagtggagcaggaagctcggacaggcggctgactttggtcatgagggtgaagacagagggtcttggtttctctctgacgactggaggttgagcctggagcggctctttccagcgctgcagttgaaactcggagaaagactgcctgctgcccgtggggtcgcagccctgaggctgtgcgtcccctgtggaatggcttgctcagcctcccggcctcctgagcacatagcactcatcgtccgtcatctttcggggactgtatacaccaggggttctggggcctttcctcagcagcgttcgcggccacggaccccacatgtcctctgctgacccctgtgtgtcctctgtggccaccccatggcgctgaatcctgccgcctcctgcaagccgactttggacaaaagctgtgtccggtctcaccgtctgatttgtcttgttctctgttaatgtagtgtttcattcttctcacattcatacataaaagtgatgtcgtgcctt

SEQ ID NO: 123243 - DNA, 5666 bp, Homo sapiens
  Payload ID: 4198
  Gene Symbol: CUL4A
  Gene Name: cullin 4A
  Uniprot ID: Q13619
  ENST ID: ENST00000617546
  CDS Start-End: 161-2140
gtcctctcagccgggacgccagcggctctgattacagacctcggctgcccgacaactacacgcaggacacgtggcggaagctgcacgaggcggtgcgggccgtgcagagcagcacctccatcaggctgtggaaaatctctgttctcacaaagtctccccaatgctctacaagcaactgcgtcaggcctgtgaagaccacgtccaggcacagatccttccgtttagagaagactcactagatagtgttttatttttaaagaagattaacacgtgctggcaggaccactgcagacaaatgatcatgatcagaagcatcttcctgttcttggaccgcacctatgtgctgcagaactccacgctgccctccatctgggatatgggattagaactgtttagaacccatattattagtgataaaatggttcagagtaaaaccattgatggaatcctactgctgatcgagcgcgagaggagcggcgaggccgtggaccggagcctgttgcggagcctcctgggcatgctgtctgacctgcaggtgtataaagattcatttgaactgaaatttttggaagagactaattgcttatatgctgccgaaggccaaaggttaatgcaggaaagagaggttccagaatatcttaaccatgtaagtaaacgcttagaggaagagggagacagagtaatcacttacttggaccacagcacacagaaaccactgattgcttgtgtggagaaacagctattaggagaacatttaacagcaattctgcagaaagggctcgaccacttactggatgagaacagagtgccggacctcgcacagatgtaccagctgttcagccgggtgaggggcgggcagcaggcgctgctgcagcactggagcgagtacatcaagacttttggaacagcgatcgtaatcaatcctgagaaagacaaagacatggtccaagacctgttggacttcaaggacaaggtggaccacgtgatcgaggtctgcttccagaagaatgagcggttcgtcaacctgatgaaggagtcctttgagacgttcatcaacaagagacccaacaagcctgcagaactgatcgcaaagcatgtggattcaaagttaagagcaggcaacaaagaagccacagacgaggagctggagcggacgttggacaagatcatgatcctgttcaggtttatccacggtaaagatgtctttgaagcattttataaaaaagatttggcaaaaagactccttgttgggaaaagtgcctcagtcgatgctgaaaagtctatgttgtcaaagctcaagcatgagtgcggtgcagccttcaccagcaagctggaaggcatgttcaaggacatggagctttcgaaggacatcatggttcatttcaagcagcatatgcagaatcagagtgactcaggccctatagacctcacagtgaacatactcacaatgggctactggccaacatacacgcccatggaagtgcacttaaccccagaaatgattaaacttcaggaagtatttaaggcattttatcttggaaagcacagtggtcgaaaacttcagtggcaaactactttgggacatgctgttttaaaagcggagtttaaagaagggaagaaggaattccaggtgtccctcttccagacactggtgctcctcatgttcaacgagggagatggcttcagctttgaggagataaaaatggccacggggatagaggatagtgaattgcgcagaacgctgcagtccctggcctgtggcaaagcacgtgtgctgattaaaagtcccaaaggaaaggaagtggaagatggagacaagttcatttttaatggagagttcaagcacaagttgtttagaataaagatcaatcaaattcagatgaaggaaactgttgaggaacaggttagcaccactgagagagtgtttcaggatagacaatatcagattgatgctgctatcgtcagaataatgaagatgagaaagactcttggtcataatcttctagtttctgaattatataatcagctgaaatttccagtaaagcctggagatttgaaaaagagaattgaatctctgatagacagagactatatggagagagacaaagacaatccgaatcagtaccactacgtggcctgacgcatctgcagacggttccccttcatgaaacactagaatgtaccctcagagcaggaagcacacctgtgccatttctgggactctgattgatccagctgtggacattggaaggcgaaggaagggaggtggctcctgggtcatctttcacaaggctcaagacttcaacctgcagatgtatctttttccctccagtttttcctctagttcttttaggcatttaaattgtttctgttactctgtgcaaaataactttgagattggacaagaagatgttactaaagagaagttcctttaaaaggtcttgttcttgtgtcaaaaagctgcaagtttggtttgttctcgtgtgtgatcatgagtgcacaatgaagaagaccctagatgctgcattttttagctctgaagattccttaggtatccctgaagacagctcgctcagatgatcagcatttagagtgaaaacaagggcccttcatgggtgaacattagaaagagccagggttcaaagctggcgaatggatgacgcaccctagccactggcccctctctgtttcatgtatttccaaaagttgtaaactttgatggctgatttttcgtaagtcaggtttctaagtgagctccctgaggtgccaaggccatggtgtccgccctgctgcgtctgttcgtcagctgagttccttgtgaatctctgttttagggtttggggctagtgtgtttgtgtttccattctaagattgagtctggcagtccctgtttttttgcattggggtaactgctctttgattttttttaattgcagtatttgtgtgattgcaataataaagtttggtttggtttttacagtcatgcgcagggacgatccttgttctctgctgtaaactgtaaaaagtttatggagacttaaagtcttgatgttgtgaagcagaggttattttgtggaaagattaaaaggattttgttggtacctggttttgtgttgtgtatatatacatgaggttgaacagtgaaaggaaagttcagtagtgatgttagaagggtaactatgacaaagatacttttgagataacatttaaaagtactttatattttacataatagcatgtttcattttgattaaaagctaccaaaggaattttgatcatggcataagtgtttaaagcaatattttctggaatataccaagtttatataatttgattttgtgctaaattattaagagtctctttttgaaacatgcgggtttgaaatatgacaccttgtgggtttccatattaaaatcctcactctttaattgtcatttctatctttgaaaattttcatttatgagttccatgatatgtggtctaagaaagaccaaacagatttctattttttttttcttataagttcgttgtgtctagagattgttaatattgtaatttaatgtagacttactttgaataaaattagtttaattggccttaaaattacattaataaaactttgtgatatgcaaatgacacattcttcataactctttagcagctttgactactagtgcactagacagaagtcagagcagggagcacctgtcccctctcaagtgattattctttcctggccacctctaccacaaaataccagtggggccaggtagtgacaagtgggtcttttttacttggacgattcgttgtgctgtgcctttgtttcatttgagcacagtggctcacgcctgtagtcccagctatgggagggcaaggtgggaggatcgtttgagcctgagttccagaccatcctgagcaccatagggagatcctgtttccattttagtttatttatttttaattgaggtggagtcttgctctgttgcccaagctggagtgcagtggtgcaatctcagctcactgcaccctccgcctcctgggttcaagcagttctcccacctcagtctcccaagtagctgggattacaggcacccgccatcatgcccagctaatatttgtatttttgtagagacggggtttcactatgttggccagactggtcttgaactcctaacctcaggtgatctgcccgccttggcctcccaaagtgctgggattacaggcgtgagccaccatgcccggcctgcctgtttctgttttataaaagaaaggaaaatctatttatatctattctcttatttagcaatatttaatgttttattgttaaaggtcagtgtggtaaaacaaatagtatagaagaaatcattgaaaaagaaacagcacttagacagaaatgctgtaaaagtggaaaggagaaggtgaaattacttgcaggttagatggttgcatacccaggtcatctaaggagcaaatgaaaatctgtgactgaagaaagaattcaccaagttaaccagacacaaaattaacaaaaacatcagtagctttcctataaatataggctataatggagggtcattttttatttttatttagagacagggtcttaactgtcacctggactggagtgcagtggcatgatcatgtttcacggcagcctctaccttctgggctcaagcgatcctctcttctcagccacctgagtagctgggcctacaggtgtacatcaccacgcccagataatttttattgtattttttatagaggcagtgtcttgctatgttgccaaggctgttcttgtactcctggcctcaagcgaacctcctacctcagcctccccaaatgctgggattacaggcatgagacactgcacctgaccagaagtcattttttcaatagcaacccccaaaaaagataaaatacctagtaacaaatagggaaacacctatgtgaaaggtattataacattactaaggaacacaggccctgaataagtgaaagttctgttgattctcacattttgctatacagtatcttaagatgtaaaaccttcctttaaaacacaagcggattctaaagttaaaacagaaaagcaaatatgccagactagtcaaattgttttaaattctgctgtttttagaacattgtaattgaaacagcatgatgctggccctttaaaaagattcctggaacaagaaagtccacaaataagccaaatacacaggaactcggcgtggcacaaaggggccgtgtgtgatcaggaactggaactttgcaacaactacccatgctcagaagtttgggccaccttgaaaagagaaaagttggattagactcctttttatactaagggaagttccaagtggtcaagtatttacgtgtaaaaaaatacatatatatgaaaccataatcataagatactttttttgtaaattgactattattgtataaatttatagagtataaagtgatcttataaattatgcatacattgtggactagtcaagctagttacatccatcacctcaaatacttaacatttttgtagtgagaacatctgaaatttactcttagcaattttgaaatgtacaatactcaatttttgactgtattcaccatgctgtacaatagaactcagaaaaagaaaaatatagtcctcctttctaaga

SEQ ID NO: 123244 - DNA, 3109 bp, Homo sapiens
  Payload ID: 4199
  Gene Symbol: CUL4B
  Gene Name: cullin 4B
  ENST ID: ENST00000336592
  CDS Start-End: 42-2744
ctcaagtcctgcggacctgggggcttcgggatctgggcgctatgaaaagtgtctgcccagtcacttccggtttttcttcccccagtccctcagctgctgctgctgctcaggaggtcagatctgccactgatggtaataccagcaccactccgcccacctctgccaagaagagaaagttaaacagcagcagcagtagcagcagtaacagtagtaacgagagagaagactttgattccacctcttcctcctcttccactcctcctttacaacccagggattcggcatccccttcaacctcgtccttctgcctgggggtttcagtggctgcttccagccacgtaccgatacagaagaagctgcgttttgaagacaccctggagtttgtagggtttgatgcgaagatggctgaggaatcctcctcctcctcctcctcatcttcaccaactgctgcaacatctcagcagcagcaacttaaaaataagagtatattaatctcttctgtggcttcggtgcatcatgcaaacggcctagccaaatcttctaccaccgtctctagctttgctaacagcaaacctggctctgctaagaagttagtgatcaagaactttaaagataagcctaaattaccagaaaactacacagatgaaacctggcaaaaactgaaagaagcagtggaagctattcagaatagtacttcaattaagtacaatttagaagaactctaccaggctgtagaaaatctctgttcttacaagatttctgcaaacttgtacaaacagctgagacagatctgcgaagatcacatcaaagcacagattcatcaattcagagaggattcattggatagcgttctttttttaaagaagattgatagatgctggcaaaaccattgcagacaaatgatcatgatcaggagcatttttttgtttctggatagaacttacgttcttcagaattcaatgctaccctccatttgggacatgggactggagttatttagggctcatattataagtgatcagaaagtgcagaataagacaattgatggcattcttctcttgattgagagggaaaggaatggtgaagcaattgatagaagtttacttcgaagccttttaagcatgctgtctgatttgcaaatttatcaagattcttttgaacaacgatttttggaagaaactaaccggctctatgcagctgaaggccaaaaattaatgcaagaaagagaggttcctgaatatctacatcatgttaacaaacgtctagaagaagaagcagacagacttattacttacttagatcagaccacccagaagtcattaattgctactgtagaaaaacaacttctaggtgaacacttaacagcaattcttcagaaaggtttaaataacctccttgatgaaaaccgaattcaagatttgtctcttctgtatcagctcttcagtagagttcgaggtggagttcaggttcttttgcagcagtggatcgaatatatcaaggcatttggcagcactattgtaattaatcctgaaaaagataaaaccatggttcaagaattgctggattttaaagataaggttgaccatataattgatatctgctttctgaagaatgagaaatttatcaatgccatgaaagaagcatttgaaacgttcattaacaaaagaccaaataaaccagctgaacttatagctaagtatgtagattcaaaacttcgtgcaggcaacaaagaagctacagatgaagaacttgagaaaatgttggataaaattatgatcatatttagatttatctatggcaaggatgtttttgaggccttctataagaaagatttagccaagcgcctgttagtcggaaagagtgcatctgtagatgctgaaaaatcaatgctgtccaaacttaaacatgaatgcggagctgctttcaccagcaaacttgaaggaatgtttaaagacatggaactttctaaagacatcatgattcagttcaaacagtatatgcagaatcagaatgttccgggaaatattgagttaactgtgaatatcctgacaatgggctattggccgacatatgtgcctatggaagttcatttaccaccagagatggtaaaacttcaggagattttcaagacattttacctaggcaaacatagtggcaggaaacttcagtggcagtcaaccctaggacactgtgtgttaaaagcagaatttaaagagggtaaaaaggaactccaggtctctctttttcaaacactggtgctgctaatgtttaatgagggagaggagttcagtttagaagagatcaagcaggcaactggaatagaggatggagagttaaggagaacactgcagtcattagcctgtggcaaagctagagttctggcgaaaaatccaaagggcaaagacattgaagatggtgacaagttcatttgtaatgatgatttcaaacataaacttttcaggataaagatcaatcaaatccagatgaaagaaacggttgaagaacaagcaagcactacagaaagagtatttcaagacagacagtatcaaattgatgctgcaattgttcgaattatgaagatgagaaagacacttagccacaatctccttgtttcagaagtgtacaaccagttgaaatttccagtaaagcctgctgatcttaagaagagaatagaatctttaattgaccgggactacatggaaagagataaagaaaatccaaaccagtacaactatattgcatagaatgttggccttgcagcatttggtgtcatatgcagtagccagtggataaactaacctgttgattcaatattatttgactccttttttactaccgatgaccaaatgaagcagtgtaattaatggaaatagttgagtggactttttctcagtggttaacatgcccattttaaagagtaatacttacctttaagaagaatgttgttgaactctttgcatgttatttagtatgatgtgcagaaaacacttaagaacgtacctggtcttcatgaattcctctttggaactgggaaagagatccctgtggctattaaaaaggggggagggttcttacacaccattaattatgaagcaaaaggtttatttgc

SEQ ID NO: 123245 - DNA, 4902 bp, Homo sapiens
  Payload ID: 4199
  Gene Symbol: CUL4B
  Gene Name: cullin 4B
  Uniprot ID: Q13620
  ENST ID: ENST00000371322
  CDS Start-End: 63-2750
cgcacgcaggcatataaacgtaggtttttgatgctcctctgcctgttgaccccgctattttcatgtttccaacaggtttttcttcccccagtccctcagctgctgctgctgctcaggaggtcagatctgccactgatggtaataccagcaccactccgcccacctctgccaagaagagaaagttaaacagcagcagcagtagcagcagtaacagtagtaacgagagagaagactttgattccacctcttcctcctcttccactcctcctttacaacccagggattcggcatccccttcaacctcgtccttctgcctgggggtttcagtggctgcttccagccacgtaccgatacagaagaagctgcgttttgaagacaccctggagtttgtagggtttgatgcgaagatggctgaggaatcctcctcctcctcctcctcatcttcaccaactgctgcaacatctcagcagcagcaacttaaaaataagagtatattaatctcttctgtggcttcggtgcatcatgcaaacggcctagccaaatcttctaccaccgtctctagctttgctaacagcaaacctggctctgctaagaagttagtgatcaagaactttaaagataagcctaaattaccagaaaactacacagatgaaacctggcaaaaactgaaagaagcagtggaagctattcagaatagtacttcaattaagtacaatttagaagaactctaccaggctgtagaaaatctctgttcttacaagatttctgcaaacttgtacaaacagctgagacagatctgcgaagatcacatcaaagcacagattcatcaattcagagaggattcattggatagcgttctttttttaaagaagattgatagatgctggcaaaaccattgcagacaaatgatcatgatcaggagcatttttttgtttctggatagaacttacgttcttcagaattcaatgctaccctccatttgggacatgggactggagttatttagggctcatattataagtgatcagaaagtgcagaataagacaattgatggcattcttctcttgattgagagggaaaggaatggtgaagcaattgatagaagtttacttcgaagccttttaagcatgctgtctgatttgcaaatttatcaagattcttttgaacaacgatttttggaagaaactaaccggctctatgcagctgaaggccaaaaattaatgcaagaaagagaggttcctgaatatctacatcatgttaacaaacgtctagaagaagaagcagacagacttattacttacttagatcagaccacccagaagtcattaattgctactgtagaaaaacaacttctaggtgaacacttaacagcaattcttcagaaaggtttaaataacctccttgatgaaaaccgaattcaagatttgtctcttctgtatcagctcttcagtagagttcgaggtggagttcaggttcttttgcagcagtggatcgaatatatcaaggcatttggcagcactattgtaattaatcctgaaaaagataaaaccatggttcaagaattgctggattttaaagataaggttgaccatataattgatatctgctttctgaagaatgagaaatttatcaatgccatgaaagaagcatttgaaacgttcattaacaaaagaccaaataaaccagctgaacttatagctaagtatgtagattcaaaacttcgtgcaggcaacaaagaagctacagatgaagaacttgagaaaatgttggataaaattatgatcatatttagatttatctatggcaaggatgtttttgaggccttctataagaaagatttagccaagcgcctgttagtcggaaagagtgcatctgtagatgctgaaaaatcaatgctgtccaaacttaaacatgaatgcggagctgctttcaccagcaaacttgaaggaatgtttaaagacatggaactttctaaagacatcatgattcagttcaaacagtatatgcagaatcagaatgttccgggaaatattgagttaactgtgaatatcctgacaatgggctattggccgacatatgtgcctatggaagttcatttaccaccagagatggtaaaacttcaggagattttcaagacattttacctaggcaaacatagtggcaggaaacttcagtggcagtcaaccctaggacactgtgtgttaaaagcagaatttaaagagggtaaaaaggaactccaggtctctctttttcaaacactggtgctgctaatgtttaatgagggagaggagttcagtttagaagagatcaagcaggcaactggaatagaggatggagagttaaggagaacactgcagtcattagcctgtggcaaagctagagttctggcgaaaaatccaaagggcaaagacattgaagatggtgacaagttcatttgtaatgatgatttcaaacataaacttttcaggataaagatcaatcaaatccagatgaaagaaacggttgaagaacaagcaagcactacagaaagagtatttcaagacagacagtatcaaattgatgctgcaattgttcgaattatgaagatgagaaagacacttagccacaatctccttgtttcagaagtgtacaaccagttgaaatttccagtaaagcctgctgatcttaagaagagaatagaatctttaattgaccgggactacatggaaagagataaagaaaatccaaaccagtacaactatattgcatagaatgttggccttgcagcatttggtgtcatatgcagtagccagtggataaactaacctgttgattcaatattatttgactccttttttactaccgatgaccaaatgaagcagtgtaattaatggaaatagttgagtggactttttctcagtggttaacatgcccattttaaagagtaatacttacctttaagaagaatgttgttgaactctttgcatgttatttagtatgatgtgcagaaaacacttaagaacgtacctggtcttcatgaattcctctttggaactgggaaagagatccctgtggctattaaaaaggggggagggttcttacacaccattaattatgaagcaaaaggtttatttgcttaaaatgtcatttaaagatacttaaactgcatgcaaactttatttactgtacagagttctggatgtatttatcaaatagaaaaaccacccttgacttggttgttcacccgttttgtgatttcccttgaaaagagaaatgaattgtcatagctattgatattttactaggtgatgttctgttacactgaaagggatgttttttaaaaaaaattatttggaaacaagttttcaagtagggggacagttgcttacataatatcttgtatattcacatcctaaaaattttcatttatgagtatgggatgtgtgtatatggcttagccccaagttaactgtgctgattaacaagtacttataaaaatagctaaagtagaaaattaatgatcagttgtactagaggaacatcatagaagagaaaaatccaactctttatattaaaaatgaatacaataagaaaattgcaaaagagaccaaaatgaacgtgttttgtaaattgttacaggagcaaaaactttgcaactagttttcaacatactttagactttaaatgttgtttggacagttttgtcttcaacttggaccaattgtagattgttacaggcttcctaggatttagcattcctattttctctaccaaagttttttttagaagcatcccaactcttctctttgttgataaataagcctttcctgtcatcttcattttaacttgctaaaaccctagatacaaaggtcctccctcatttttcccacagagcccctgtttgggaatttgagattctgtgtcatgctggttttcctttcagaattgcttgaaatcgagttctcttagccactggacacctagttttcaggagaatgtcccaagattgtttatatatacaaaatggcaaaagtactgtttttcgaattgataattcaagcaaaggcttctctttactgtcactgatttttttttgtttttattttgtttccttgtttctatttccttgaagctttgaagggaggagaagcagaaaattttgtttatgtttgttaaaaatcagaactacttaatgctttttgccacagcatatttccttgcctgttggagccgttaggaagattacctatgtcctaatcttcaacctgagaagatttttgactcttgtgtctactgttgattgtttgcttgagttctcaaagacctgtggccaggtattttaaaaagtcgtctatttctttctagttgcatcaacttgcacactggtgtctaactatatgtggtattcggaacttgtaattcttattgagcagccattgcctatattttctcagctcctcactgatttctttatatgagctcagctgacaagcaaatgcagctattttgtttaccctctcttcataccggaccatcaacaacagtgttctaactcatccctgatggtctgtgagatgtagactattacacaagattcaagttactcgtaagcaacttttagatagagttggtcctgttaggaggagactcttgatgtcaccttcagtatcttgaaagcgggtcccctccccgaggctcttaattctttgaaaacttgatgctgtttcagctgaaaaattagcaagactgttaaaaaaaaaaagttgaggggagctgtttaagaaactgaaaagtaattgcaaactacattggataattgtgactttcagttgttgttctgtatcagttgaatttttgtgctcttttccctgtgtacgtggtggttctatttttctccaataaaacttttatttaaaaaaagtt

SEQ ID NO: 123246 - DNA, 846 bp, Homo sapiens
  Payload ID: 4199
  Gene Symbol: CUL4B
  Gene Name: cullin 4B
  ENST ID: ENST00000371323
  CDS Start-End: 144-846
cttttttggtggagggttcattttccgggggtggttaggatccttgtgctgaagcatacaccgggtgtttctgtgcagtattttgaggtctttttcaacctattgtatttaatctgttattccttataacactgacaatcggtatgattgatccggattttgcagataagcctaaattaccagaaaactacacagatgaaacctggcaaaaactgaaagaagcagtggaagctattcagaatagtacttcaattaagtacaatttagaagaactctaccaggctgtagaaaatctctgttcttacaagatttctgcaaacttgtacaaacagctgagacagatctgcgaagatcacatcaaagcacagattcatcaattcagagaggattcattggatagcgttctttttttaaagaagattgatagatgctggcaaaaccattgcagacaaatgatcatgatcaggagcatttttttgtttctggatagaacttacgttcttcagaattcaatgctaccctccatttgggacatgggactggagttatttagggctcatattataagtgatcagaaagtgcagaataagacaattgatggcattcttctcttgattgagagggaaaggaatggtgaagcaattgatagaagtttacttcgaagccttttaagcatgctgtctgatttgcaaatttatcaagattcttttgaacaacgatttttggaagaaactaaccggctctatgcagctgaaggccaaaaattaatgcaagaaagagaggttcctgaatatctacatcatgttaacaaacgtctagaagaagaagcagacagacttattactt

SEQ ID NO: 123247 - DNA, 3264 bp, Homo sapiens
  Payload ID: 4199
  Gene Symbol: CUL4B
  Gene Name: cullin 4B
  Uniprot ID: Q13620
  ENST ID: ENST00000404115
  CDS Start-End: 403-3144
agttcagtttagaaactgccagtcttggtatagaacaacctaggcttatctgtttaagtcccataggtagtattattagagaataacccaggctttgggaactgtataactctgagatcgtttgaaattttcgttttgtttttcttttggctccaaccaggcctctgttgttagactaatggggtttcccctgcagagattggtcagccctgcagtctatcatcccggaaggtgttaaatacacatgaaagccagcctcggcgggcagaacctagcccgccgaaagggcgggcattgctaaagtgttttcaaaaggtcttcccaatcctctgctttagacagctcggaccttagatagaagaacacaacggatcctccagtgactgacgacccaaaggacggatgatgtcacagtcatctggatcaggagatgggaatgatgatgaggctactacctctaaagacggtggtttttcttcccccagtccctcagctgctgctgctgctcaggaggtcagatctgccactgatggtaataccagcaccactccgcccacctctgccaagaagagaaagttaaacagcagcagcagtagcagcagtaacagtagtaacgagagagaagactttgattccacctcttcctcctcttccactcctcctttacaacccagggattcggcatccccttcaacctcgtccttctgcctgggggtttcagtggctgcttccagccacgtaccgatacagaagaagctgcgttttgaagacaccctggagtttgtagggtttgatgcgaagatggctgaggaatcctcctcctcctcctcctcatcttcaccaactgctgcaacatctcagcagcagcaacttaaaaataagagtatattaatctcttctgtggcttcggtgcatcatgcaaacggcctagccaaatcttctaccaccgtctctagctttgctaacagcaaacctggctctgctaagaagttagtgatcaagaactttaaagataagcctaaattaccagaaaactacacagatgaaacctggcaaaaactgaaagaagcagtggaagctattcagaatagtacttcaattaagtacaatttagaagaactctaccaggctgtagaaaatctctgttcttacaagatttctgcaaacttgtacaaacagctgagacagatctgcgaagatcacatcaaagcacagattcatcaattcagagaggattcattggatagcgttctttttttaaagaagattgatagatgctggcaaaaccattgcagacaaatgatcatgatcaggagcatttttttgtttctggatagaacttacgttcttcagaattcaatgctaccctccatttgggacatgggactggagttatttagggctcatattataagtgatcagaaagtgcagaataagacaattgatggcattcttctcttgattgagagggaaaggaatggtgaagcaattgatagaagtttacttcgaagccttttaagcatgctgtctgatttgcaaatttatcaagattcttttgaacaacgatttttggaagaaactaaccggctctatgcagctgaaggccaaaaattaatgcaagaaagagaggttcctgaatatctacatcatgttaacaaacgtctagaagaagaagcagacagacttattacttacttagatcagaccacccagaagtcattaattgctactgtagaaaaacaacttctaggtgaacacttaacagcaattcttcagaaaggtttaaataacctccttgatgaaaaccgaattcaagatttgtctcttctgtatcagctcttcagtagagttcgaggtggagttcaggttcttttgcagcagtggatcgaatatatcaaggcatttggcagcactattgtaattaatcctgaaaaagataaaaccatggttcaagaattgctggattttaaagataaggttgaccatataattgatatctgctttctgaagaatgagaaatttatcaatgccatgaaagaagcatttgaaacgttcattaacaaaagaccaaataaaccagctgaacttatagctaagtatgtagattcaaaacttcgtgcaggcaacaaagaagctacagatgaagaacttgagaaaatgttggataaaattatgatcatatttagatttatctatggcaaggatgtttttgaggccttctataagaaagatttagccaagcgcctgttagtcggaaagagtgcatctgtagatgctgaaaaatcaatgctgtccaaacttaaacatgaatgcggagctgctttcaccagcaaacttgaaggaatgtttaaagacatggaactttctaaagacatcatgattcagttcaaacagtatatgcagaatcagaatgttccgggaaatattgagttaactgtgaatatcctgacaatgggctattggccgacatatgtgcctatggaagttcatttaccaccagagatggtaaaacttcaggagattttcaagacattttacctaggcaaacatagtggcaggaaacttcagtggcagtcaaccctaggacactgtgtgttaaaagcagaatttaaagagggtaaaaaggaactccaggtctctctttttcaaacactggtgctgctaatgtttaatgagggagaggagttcagtttagaagagatcaagcaggcaactggaatagaggatggagagttaaggagaacactgcagtcattagcctgtggcaaagctagagttctggcgaaaaatccaaagggcaaagacattgaagatggtgacaagttcatttgtaatgatgatttcaaacataaacttttcaggataaagatcaatcaaatccagatgaaagaaacggttgaagaacaagcaagcactacagaaagagtatttcaagacagacagtatcaaattgatgctgcaattgttcgaattatgaagatgagaaagacacttagccacaatctccttgtttcagaagtgtacaaccagttgaaatttccagtaaagcctgctgatcttaagaagagaatagaatctttaattgaccgggactacatggaaagagataaagaaaatccaaaccagtacaactatattgcatagaatgttggccttgcagcatttggtgtcatatgcagtagccagtggataaactaacctgttgattcaatattatttgactccttttttactaccgatgaccaaatgaagcagtgtaattaa

SEQ ID NO: 123248 - DNA, 6351 bp, Homo sapiens
  Payload ID: 4200
  Gene Symbol: CUL5
  Gene Name: cullin 5
  Uniprot ID: Q93034
  ENST ID: ENST00000393094
  CDS Start-End: 617-2959
agctgttgtaagcatttcaggacaatgcacctcccttaacaccgagtccgggatttggggcggggtgccggaaaacgccaggtcccgccagcagagggcacggtcccggcctcgctgcagcctcgggacccaccgaggcttccaggctcccacgctcgctcccgagcgcgtccccgccctcgcgtcacgtgacgtggccgcggaacctgagctgcggggcctaagccgagctaaattcgttgcaggtggccgcggcgggtgcaaccacaaaggctaatccgaaggagtcggggaggctcgtggagtcgatgcttcctcttccaagtcaggtcggctcccgttaccttctcagcattcgccgttccggtcttcctgagcgcgtgcatgaggtctttcgcgtggggaagctccggtgaccatgtaggggagaagagtgaggaagctcctggtgcttgggacgaggtcagcgctgtcggcgcgctgctccagcgcccaccacaccctggtgcgggccgacgggccctgggccctggtgggagctccggcctccggtcaaggcctggccgggagcgccacgaattctcgcgtcgtctcgcgagagtccaagttaaagaacatggcgacgtctaatctgttaaagaataaaggttctcttcagtttgaagacaaatgggattttatgcgcccgattgttttgaagcttttacgccaggaatctgttacaaaacagcagtggtttgatctgttttcggatgtgcatgcagtctgtctttgggatgataaaggcccagcaaaaattcatcaggctttaaaagaagatattcttgagtttattaagcaagcacaggcacgagtactgagccatcaagatgatacggctttgctaaaagcatatattgttgaatggcgaaagttctttacacaatgtgatattttaccaaaacctttttgtcaactagagattactttaatgggtaaacagggcagcaataaaaaatcaaatgtggaagacagtattgttcgaaagcttatgcttgatacatggaatgagtcaatcttttcaaacataaaaaacagactccaagatagtgcaatgaagctggtacatgctgagagattgggagaagcttttgattctcagctggttattggagtaagagaatcctatgttaacctttgttctaatcctgaggataaacttcaaatttatagggacaattttgagaaggcatacttggattcaacagagagattttatagaacacaagcaccctcgtatttacaacaaaatggtgtacagaattatatgaaatatgcagatgctaaattaaaagaagaagaaaaacgagcactacgttatttagaaacaagacgagaatgtaactccgttgaagcactcatggaatgctgtgtaaatgccctggtgacatcatttaaagagactatcttagctgagtgccaaggcatgatcaagagaaatgaaactgaaaaattacatttaatgttttcattgatggacaaagttcctaatggtatagagccaatgttgaaagacttggaggaacatatcattagtgctggcctggcagatatggtagcagctgctgaaactattactactgactctgagaaatacgttgagcagttacttacactatttaatagatttagtaaactcgtcaaagaagcttttcaagatgatccacgatttcttactgcaagagataaggcgtataaagcagttgttaatgatgctaccatatttaaacttgaattacctttgaagcagaagggggtgggattaaaaactcagcctgaatcaaaatgccctgagctgcttgccaattactgtgacatgttgctaagaaaaacaccattaagcaaaaaactaacctctgaagagattgaagcaaagcttaaagaagtgctcttggtacttaagtatgtacagaacaaagatgtttttatgaggtatcataaagctcatttgacacgacgtcttatattagacatctctgccgatagtgaaattgaagaaaacatggtagagtggctaagagaagttggtatgccagcggattatgtaaacaagcttgctagaatgtttcaggacataaaagtatctgaagatttgaaccaagcttttaaggaaatgcacaaaaataataaattggcattaccagctgattcagttaatataaaaattctgaatgctggcgcctggtcaagaagttctgagaaagtctttgtctcacttcctactgaactggaggacttgataccggaagtagaagaattctacaaaaaaaatcatagtggtagaaaattacattggcatcatctcatgtcaaatggaattataacatttaagaatgaagttggtcaatatgatttggaggtaaccacgtttcagctcgctgtattgtttgcatggaaccaaagacccagagagaaaatcagctttgaaaatcttaagcttgcaactgaactccctgatgctgaacttaggaggactttatggtctttagtagctttcccaaaactcaaacggcaagttttgttgtatgaacctcaagtcaactcacccaaagactttacagaaggtaccctcttctcagtgaaccaggagttcagtttaataaaaaatgcaaaggttcagaaaaggggtaaaatcaacttgattggacgtttgcagctcactacagaaaggatgagagaagaagagaatgaaggaatagttcaactacgaatactaagaacccaggaagctatcatacaaataatgaaaatgagaaagaaaattagtaatgctcagctgcagactgaattagtagaaattttgaaaaacatgttcttgccacaaaagaaaatgataaaagagcaaatagagtggctaatagagcacaaatacatcagaagagatgaatctgatatcaacactttcatatatatggcataattttgaatatcatggacaatatttagaacccaaattttggagtgcttgggcagaaagttgtaaagtttgtgctggagaaaggtttatttggactttgattacataaatattaaaatctctgccttaccttacaaaaacaactatattttgccaatcacattagttagcatgatggcattcccttcatgttgcacactctttgacagcatgctgttttgtggagaaacttgcattcatgaagagcccattatcaacttttaaaagtgaatttgatttgtacccaccaggagaaatacagttgggaagggtgagggtggggttcttgttgcttttttctcttttttcctctcttaaaaaatgtacttgcacaaggaaggatcttcagatattcatgcactgaaaaatgctgttatcttttgtttttaaaaaatgcaattaaaactagaaatagcactcttggtttcttttgatgaaaagagtgagctggtcaatgcaacattgggaaacggcagatgtaggtgagaagttaagtatttaatagtatcaaattgttcaaacattgctcagtataataactggattttaatggtgacctaaaaatggtattaaatattttcaactttcaaatgttggttttctttaagcaggagactgctattttagttgttgttaaatgatgaggagtttttttttttttaaatatggctggaaagcttgttttgaaaaatgaagcttatattaattgttgcttcaatagtttaaaaaatttatggagataggtaggtcattatgattgcagagccaaaatagcaaaacaaacatattaagtgtgtttactaaacatattgtgtgtttactaacacacttaatgtttatatacctaatatttattatgccatatctgaatttattaaaaacaacacagaaatctcctgctctgatatagttatgtaactgatctcttaatctgtagcatagaagtattttggtattttaaggtctcatgattagggatttgtagcctcaggtttgaatcagtcacctaggggtaagagaaaaaccacaacataagacctgaaaaacagaagcaaaattgttgcactcttaatacgagcagtaaacttgccaaatatatgtacatatatatttatatattttaaaaataaacattttttaaatcgtcagaaggcaacatttaccatgttcctttcagtctatccaaagtagcaacttaactagttgctggcaactgaatacccagagtagtggaaattttaggacttgaggacgtgaacaacttgaaagagaaaattgattccccttgaggaaagaatggctcaacgtggatttttattcattgtggtgcacgtttcaaattttcttgcaaattattttatatcttatttgatgttaagtaatatttttaaagtatggtttttgaagatagtaggaaatggagtacagaaaggcatacagtattatgttacagtggagtgctttcaagagcatttcgtaggatctgtccccatccgaagaggctttgtgaactgcctgctgaatggaaggaaagcaactttaaaacatttagagttttgctgagtatagccaaatgcctgttctgaaacttataggaaattggaattttgtttaaaattttacactttaaggtagcaaatgtcaattattagaccgagcatattgtgaagaattaaactaaaattaatacgtacagttttctctaattaggtgactgttcataatgggtatatttggaatttagaagaaataattttgtagtaattgtggcccttatgtttaacagataattcagcattggcgtatttgcttgtcccaatacaagaatgccaaaggaggaaacaggaaaaattgccgtccattttaaaaatttaggtttgttgttttaaaccataattgttctcagaacttttttggaacttctaattttgggtcatttaatttaagaatgagagtcatgatgttttgatttatgaaggtgaatttaatgcaaaagtgggtaacactacattcatagcaaagttttttattaaattttataaatttttaatagccaattatgtcctaattgtattttggggaatgaacagcagcaaatactgtaaatgtacagttttcttttttttttttttttggttatgtatacaaaagttttaactactttttggtgtttatgaaaatcatttagttgacaaggtgcctatgccattgttaaattttctttaagtaatttaacaacagatttgctaatttaaaaaaaaatgaaaaaaaaaatcttaccagcagtttgtaaaggtctggaatcacagttggcatcctttattcaggtctcttctctccagcgtacacttaaaattggtgccgagcagggatataacctgcagttaagtgaaaagaaaatccagcctccccctccaaaaaaaaaaaaaaaatttaatttttaaaaattagtggtatggcaataagacacttcagaggctatcttaacctctgaatacccatcttctagtttaaagacagagacatcccatctggaaaatgttaacttgtgttgccatctcgttgccggagtaagtagacataagacagagtttaagaagtaaaaatatagaaaaattttgatggtcacaatgagataaatattagaatattactattccaatgattaaatgaggatcttgaaataaattctgaagtcttccaatttttacatttattggaggggtccctgagttctgtcaacttttttatttaagtctcttgctcttattttgtgcataaatgttaaaccttccaaaaatgaaatgttagctttctttcttttactttttattaaatttaatagaaaatatgacctgagtagttaaaaagtattttgcattatttgcagtaagatgtctctagcactgctcaaagggcaaattttaaaacttcagtctgggtgaaagatttgctagttttacagaaagatttgctatcttaaactcaagctggtttttctgttctcatgtaagtgactgggatgctgtcttatgaattcttccaaggtcatgtttgtgaaataaacattacatgagagctttcctgtcatctacactatatgttgtctggagtgttgaacaaatttattttagtttctaagttgtaatctatcctcatatggtctatacgattttgaatgtgtgccactacatactgagatgataatgctgtacaattttaagtggtagcagtttctgtatgcagtaggctgaaatattttgatgaactgcttaatttttggattttattttttaagttgtataatttattttcttgcaaaataaaaatgtaatataaaagcttttacctatcca

SEQ ID NO: 123249 - DNA, 388 bp, Homo sapiens
  Payload ID: 4200
  Gene Symbol: CUL5
  Gene Name: cullin 5
  ENST ID: ENST00000532782
  CDS Start-End: 1-388
ggatgtgcatgcagtctgtctttgggatgataaaggcccagcaaaaattcatcaggctttaaaagaagatattcttgagtttattaagcaagcacaggcacttatgcttgatacatggaatgagtcaatcttttcaaacataaaaaacagactccaagatagtgcaatgaagctggtacatgctgagagattgggagaagcttttgattctcagctggttattggagtaagagaatcctatgttaacctttgttctaatcctgaggataaacttcaaatttatagggacaattttgagaaggcatacttggattcaacagagagattttatagaacacaagcaccctcgtatttacaacaaaatggtgtacagaattatatgaaatat

SEQ ID NO: 123250 - DNA, 3596 bp, Homo sapiens
  Payload ID: 4200
  Gene Symbol: CUL5
  Gene Name: cullin 5
  Uniprot ID: Q93034
  ENST ID: ENST00000531427
  CDS Start-End: 90-2432
ccctggtgggagctccggcctccggtcaaggcctggccgggagcgccacgaattctcgcgtcgtctcgcgagagtccaagttaaagaacatggcgacgtctaatctgttaaagaataaaggttctcttcagtttgaagacaaatgggattttatgcgcccgattgttttgaagcttttacgccaggaatctgttacaaaacagcagtggtttgatctgttttcggatgtgcatgcagtctgtctttgggatgataaaggcccagcaaaaattcatcaggctttaaaagaagatattcttgagtttattaagcaagcacaggcacgagtactgagccatcaagatgatacggctttgctaaaagcatatattgttgaatggcgaaagttctttacacaatgtgatattttaccaaaacctttttgtcaactagagattactttaatgggtaaacagggcagcaataaaaaatcaaatgtggaagacagtattgttcgaaagcttatgcttgatacatggaatgagtcaatcttttcaaacataaaaaacagactccaagatagtgcaatgaagctggtacatgctgagagattgggagaagcttttgattctcagctggttattggagtaagagaatcctatgttaacctttgttctaatcctgaggataaacttcaaatttatagggacaattttgagaaggcatacttggattcaacagagagattttatagaacacaagcaccctcgtatttacaacaaaatggtgtacagaattatatgaaatatgcagatgctaaattaaaagaagaagaaaaacgagcactacgttatttagaaacaagacgagaatgtaactccgttgaagcactcatggaatgctgtgtaaatgccctggtgacatcatttaaagagactatcttagctgagtgccaaggcatgatcaagagaaatgaaactgaaaaattacatttaatgttttcattgatggacaaagttcctaatggtatagagccaatgttgaaagacttggaggaacatatcattagtgctggcctggcagatatggtagcagctgctgaaactattactactgactctgagaaatacgttgagcagttacttacactatttaatagatttagtaaactcgtcaaagaagcttttcaagatgatccacgatttcttactgcaagagataaggcgtataaagcagttgttaatgatgctaccatatttaaacttgaattacctttgaagcagaagggggtgggattaaaaactcagcctgaatcaaaatgccctgagctgcttgccaattactgtgacatgttgctaagaaaaacaccattaagcaaaaaactaacctctgaagagattgaagcaaagcttaaagaagtgctcttggtacttaagtatgtacagaacaaagatgtttttatgaggtatcataaagctcatttgacacgacgtcttatattagacatctctgccgatagtgaaattgaagaaaacatggtagagtggctaagagaagttggtatgccagcggattatgtaaacaagcttgctagaatgtttcaggacataaaagtatctgaagatttgaaccaagcttttaaggaaatgcacaaaaataataaattggcattaccagctgattcagttaatataaaaattctgaatgctggcgcctggtcaagaagttctgagaaagtctttgtctcacttcctactgaactggaggacttgataccggaagtagaagaattctacaaaaaaaatcatagtggtagaaaattacattggcatcatctcatgtcaaatggaattataacatttaagaatgaagttggtcaatatgatttggaggtaaccacgtttcagctcgctgtattgtttgcatggaaccaaagacccagagagaaaatcagctttgaaaatcttaagcttgcaactgaactccctgatgctgaacttaggaggactttatggtctttagtagctttcccaaaactcaaacggcaagttttgttgtatgaacctcaagtcaactcacccaaagactttacagaaggtaccctcttctcagtgaaccaggagttcagtttaataaaaaatgcaaaggttcagaaaaggggtaaaatcaacttgattggacgtttgcagctcactacagaaaggatgagagaagaagagaatgaaggaatagttcaactacgaatactaagaacccaggaagctatcatacaaataatgaaaatgagaaagaaaattagtaatgctcagctgcagactgaattagtagaaattttgaaaaacatgttcttgccacaaaagaaaatgataaaagagcaaatagagtggctaatagagcacaaatacatcagaagagatgaatctgatatcaacactttcatatatatggcataattttgaatatcatggacaatatttagaacccaaattttggagtgcttgggcagaaagttgtaaagtttgtgctggagaaaggtttatttggactttgattacataaatattaaaatctctgccttaccttacaaaaacaactatattttgccaatcacattagttagcatgatggcattcccttcatgttgcacactctttgacagcatgctgttttgtggagaaacttgcattcatgaagagcccattatcaacttttaaaagtgaatttgatttgtacccaccaggagaaatacagttgggaagggtgagggtggggttcttgttgcttttttctcttttttcctctcttaaaaaatgtacttgcacaaggaaggatcttcagatattcatgcactgaaaaatgctgttatcttttgtttttaaaaaatgcaattaaaactagaaatagcactcttggtttcttttgatgaaaagagtgagctggtcaatgcaacattgggaaacggcagatgtagataattcagcattggcgtatttgcttgtcccaatacaagaatgccaaaggaggaaacaggaaaaattgccgtccattttaaaaatttaggtttgttgttttaaaccataattgttctcagaacttttttggaacttctaattttgggtcatttaatttaagaatgagagtcatgatgttttgatttatgaaggtgaatttaatgcaaaagtgggtaacactacattcatagcaaagttttttattaaattttataaatttttaatagccaattatgtcctaattgtattttggggaatgaacagcagcaaatactgtaaatgtacagttttcttttttttttttttttggttatgtatacaaaagttttaactactttttggtgtttatgaaaatcatttagttgacaaggtgcctatgccattgttaaattttctttaagtaatttaacaacagatttgctaatttaaaaaaaaatgaaaaaaaaaatcttaccagcagtttgtaaaggtctggaatcacagttggcatcctttattcaggtctcttctctccagcgtacacttaaaattggtgccgagcagggatataacctgcagttaagtgaaaagaaaatccagcctccccctccaaaaaaaaaaaaaaaa

SEQ ID NO: 123251 - DNA, 1109 bp, Homo sapiens
  Payload ID: 4200
  Gene Symbol: CUL5
  Gene Name: cullin 5
  ENST ID: ENST00000532064
  CDS Start-End: 430-573
cgtgacgtggccgcggaacctgagctgcggggcctaagccgagctaaattcgttgcaggtggccgcggcgggtgcaaccacaaaggctaatccgaaggagtcggggaggctcgtggagtcgatgcttcctcttccaagtcaggtcggctcccgttaccttctcagcattcgccgttccggtcttcctgagcgcgtgcatgaggtctttcgcgtggggaagctccggtgaccatgtaggggagaagagtgaggaagctcctggtgcttgggacgaggtcagcgctgtcggcgcgctgctccagcgcccaccacaccctggtgcgggccgacgggccctgggccctggtgggagctccggcctccggtcaaggcctggccgggagcgccacgaattctcgcgtcgtctcgcgagagtccaagttaaagaacatggcgacgtctaatctgttaaagaataaaggttctcttcagtttgaagacaaatgggattttatgcgcccgattgttttgaagcttttacgccaggaatctgttacaaaacagcagtggtttgatctgttttccgagtactgagccatcaagatgatacggctttgctaaaagcatatattgttgaatggcgaaagttctttacacaatgtgatattttaccaaaacctttttgtcaactagagattactttaatgggtaaacagggcagcaataaaaaatcaaatgtggaagacagtattgttcgaaagcttatgcttgatacatggaatgagtcaatcttttcaaacataaaaaacagactccaagatagtgcaatgaagctggtacatgctgagagattgggagaagcttttgattctcagctggttattggagtaagagaatcctatgttaacctttgttctaatcctgaggataaacttcaaatttatagggacaattttgagaaggcatacttggattcaacagagagattttatagaacacaagcaccctcgtatttacaacaaaatggtgtacagaattatatgaaatatgcagatgctaaattaaaagaagaagaaaaacgagcactacgttatttagaaacaagacgagaatgtaactccgttgaagca

SEQ ID NO: 123252 - DNA, 5254 bp, Homo sapiens
  Payload ID: 4201
  Gene Symbol: CUL7
  Gene Name: cullin 7
  Uniprot ID: Q14999
  ENST ID: ENST00000265348
  CDS Start-End: 87-5183
gtcgccgccagcgtctgtgccgcgtcccttgctctgtgaaggacaggcctcgcgccaggaccccggtggacttctgaggtgccaggatggtgggagaactccgctacagggaattcagggtgcccctggggcccggcttacatgcctatcctgatgagctgatccgccagcgcgtgggccatgatgggcatcctgagtaccagatccgttggctcatcctgcggcgtggcgatgagggggacgggggctctggccaagtggactgcaaggctgagcacatcctgctgtggatgtccaaggatgagatctatgccaactgccacaagatgctgggcgaggatggccaggtcatcgggccctcccaggagtctgcaggggaggttggggccctggacaaatctgtgctggaggagatggaaaccgacgtgaagtccctcattcagagagcccttcggcagctggaggagtgtgtgggcactatccctcctgctcctctacttcacactgtccacgtgctcagcgcctatgccagcattgagcccctcactggagtattcaaggacccaagggtcctggacttgctcatgcacatgttgagtagtcctgattatcagattcgctggagtgcaggccggatgatacaagccctgtcctcccatgacgctgggacccggactcagatccttctgtcactgagccaacaagaagccattgagaaacacctggattttgacagccgctgtgctctgctagcactgtttgcacaggccacgctctctgaacaccccatgtctttcgagggcattcagctaccacaggtcccaggaagggtgctcttctccctggtgaagcggtatttgcatgtcacctcgctcctggatcagctgaacgacagtgctgcggagccaggagcccagaacacctctgctcctgaggagttgagtggggagaggggtcaactggagctggagttcagtatggccatgggcaccctgatctcggagctggtgcaagccatgcgctgggaccaggcctcagacagaccaaggagctcagcacggtcccccggttccatcttccagcctcagctggcagatgtgagcccagggctccccgctgcccaggctcagccctccttcaggaggtcaagacgttttcgccctcgttctgagttcgcaagtggcaatacctatgctttgtatgtgcgggacacactgcagccggggatgcgagtgcggatgctggatgattatgaggagatcagtgccggggatgagggcgagtttcggcagagcaacaacggtgtgcctcctgtgcaggtattttgggagtcaacaggccgcacctattgggtgcactggcacatgctggagatcttgggctttgaggaagacattgaggacatggttgaggctgatgagtaccaaggggcagtggccagtagagtcctgggtagagccctgcctgcctggcgctggaggcccatgacagaactctatgctgtgccttatgtgctgcctgaggatgaggacactgaggagtgtgaacacctgaccctggctgagtggtgggaactcctcttcttcatcaagaagctggatggacctgaccatcaggaggttctccagatcctccaggagaacctagatggggagattctggatgatgagatcctagctgaactggccgtgcccatagaattggcccaggacttgctgctgactctgccacagcgactcaatgacagtgccctcagggacctgatcaactgccatgtctacaagaagtatgggcctgaagccctagcagggaaccaagcctacccatcccttctagaagcccaagaagatgtcctcctgctagacgcgcaggcccaggctaaggactcagaagatgcagccaaagtggaagcaaaagaacccccatctcagagtcccaacactcccctgcagcgtctggtggagggttatggtccagctgggaaaatcctcctggatctagagcaagccctcagctcagaggggacccaggagaacaaggtcaagccactcctgctgcagctgcagcggcagccgcagcccttcctggcactgatgcagagcctggacactccggagactaacaggaccctgcacctgactgtgctgagaatcctgaagcagctggtggacttccccgaggcactgctgctcccctggcacgaggccgtggatgcctgcatggcctgcctgcggtccccaaacactgatcgagaggtgctccaggaactgattttcttcctgcaccgcctgacctcagtgagcagggactatgccgtggtgctgaatcagctgggagcaagagacgctatctccaaggccctggaaaagcacctgggaaagctggagctggctcaggagctgcgggacatggtgttcaagtgtgagaagcatgcccacctctaccgcaaactcatcaccaacatcctgggaggctgcatccagatggtgctgggccagatcgaagaccacagacgaacccaccaacccatcaacatccctttctttgatgtgttcctcagatacctgtgccagggctccagtgtggaagtgaaggaggacaagtgctgggagaaggtggaggtgtcctccaacccgcaccgggccagcaagctgacggaccacaaccccaagacctattgggagtccaacggcagcgccggctcccactacatcaccctgcacatgcgccggggcatcctcatcaggcaactgactctgcttgtggctagtgaggactcgagttacatgccggcccgagtggtggtgtgcgggggtgatagcactagctctcttcacacggaactcaactcggtgaatgtgatgccctctgccagccgggtgatcctcctggagaacctgacccgcttctggcccatcatccagatccgcataaagcgctgccagcagggtggcattgatacgcgcattcgggggttagagatcctaggccccaagcccacgttctggccagtgttccgggagcagctctgtcgtcacacacgcctcttctacatggttcgggcacaggcctggagccaggacatggcagaggaccgcaggagcctcctgcacctgagttctagactcaacggtgctctgcgccaggagcagaattttgctgaccgcttcctccctgatgacgaggctgcccaagctctgggcaagacctgctgggaggccctggtcagccccgtggtgcagaacatcacctcccctgatgaggatggcattagccccctgggttggctgctggaccagtacctggagtgtcaggaagctgtcttcaacccccagagccgcggcccagctttcttctcgcgggtgcgccgtctcactcacctgctggtgcatgtcgagccctgtgaggcaccccctcctgtggtggccactcctcggcccaaaggcagaaacagaagccacgactggagctccttggctacccggggccttccaagcagcatcatgagaaacctgacgcgctgttggcgggccgtggtggagaagcaggtgaacaattttctgacctcatcctggcgggatgatgactttgtgccacgctactgtgagcactttaatattctgcagaactcaagctctgaactgtttgggcctcgggcagccttcttgctggcgctgcaaaatggctgtgcgggagccttgctgaagctcccttttctcaaagctgcccacgtgagtgagcagttcgcccggcacattgaccagcagatccagggcagccggatcggtggagcccaggaaatggagaggctggcacagctgcagcaatgcctgcaagctgtcctgattttctccggcttggagatagccaccacttttgagcattattaccagcactacatggcggaccgtctcctgggcgtggtctcgagctggctggagggggccgtgctggagcagatcggtccctgcttccccaaccgcctcccccagcagatgttgcagagcctgagcacctctaaggagctgcagcgccagttccacgtctaccagctccagcagctggatcaggaactcctgaagctggaggatacagagaagaaaatacaggtgggccttggggccagtggcaaggagcacaagagcgagaaggaagaggaagctggggcagcagcagtggtggatgtggcggagggagaggaggaagaggaggagaatgaggacctctactatgaaggggcaatgccagaagtgtctgtgcttgtcctgtcccgacactcctggcctgttgcctcaatctgccacacactgaaccccagaacctgcctgccctcctacctgaggggcactttgaacagatactccaacttctacaacaagagtcagagccaccctgcccttgagcgaggctcacagaggcgactgcagtggacgtggctgggctgggctgagctgcagtttgggaaccagaccctgcatgtgtccaccgtgcagatgtggctactgctgtatctcaacgacctgaaggcggtctctgtggagagtctgctggcgttctcagggctctccgcagacatgctcaatcaggcgattgggcccctcacctcttcaagaggccccctggaccttcacgagcaaaaggatataccaggaggggtcctcaagattcgagatggcagcaaggaacccaggtcgagatgggacattgtgcggctcatcccacctcagacgtacctgcaagctgagggtgaagacggccagaacttggagaagagacggaatcttctgaactgcctcatcgtccgaatcctcaaggcccatggagatgaggggctgcacattgaccagcttgtctgtctggtgctggaggcttggcagaagggcccgtgtcctcccaggggtttggtcagcagccttggtaaggggtctgcatgcagcagcactgacgtcctctcctgcatcctacacctcctgggcaagggcacgctgagacgccatgacgaccggccccaggtgctgtcctatgcagtccctgtgactgtcatggagcctcacactgagtccctgaacccaggctcctcaggccccaacccacccctcaccttccataccctacagattcgctcccggggtgtgccctatgcctcctgcactgccacccagagcttctctaccttccggtagccctagacttggggtcaggggaaggtagagctggagcttttacagaaataaaacccaagagtttgattata

SEQ ID NO: 123253 - DNA, 5504 bp, Homo sapiens
  Payload ID: 4201
  Gene Symbol: CUL7
  Gene Name: cullin 7
  Uniprot ID: Q14999
  ENST ID: ENST00000535468
  CDS Start-End: 88-5436
aggaggtgctgcgtcgccaaggtggcatcctcggctccgccccggcgctctcccagggcccctagctttccgctgggtcgggcggaaatgagccgtggcttttggctggcggagccgctggcagggaccgggccccaccctgccccagtggctgccgactcacgcgggtgcagctctgttccgcggaggcacgccccctcccgtctctccgtctcgaccccctcgcggggcccaggtgccaggatggtgggagaactccgctacagggaattcagggtgcccctggggcccggcttacatgcctatcctgatgagctgatccgccagcgcgtgggccatgatgggcatcctgagtaccagatccgttggctcatcctgcggcgtggcgatgagggggacgggggctctggccaagtggactgcaaggctgagcacatcctgctgtggatgtccaaggatgagatctatgccaactgccacaagatgctgggcgaggatggccaggtcatcgggccctcccaggagtctgcaggggaggttggggccctggacaaatctgtgctggaggagatggaaaccgacgtgaagtccctcattcagagagcccttcggcagctggaggagtgtgtgggcactatccctcctgctcctctacttcacactgtccacgtgctcagcgcctatgccagcattgagcccctcactggagtattcaaggacccaagggtcctggacttgctcatgcacatgttgagtagtcctgattatcagattcgctggagtgcaggccggatgatacaagccctgtcctcccatgacgctggtgaggggcagtgtggggaggaagggaaagcaggagaagggctgggtcggctcagggactcacaggacactgtggcaggagcctctgatctcatcaggacccggactcagatccttctgtcactgagccaacaagaagccattgagaaacacctggattttgacagccgctgtgctctgctagcactgtttgcacaggccacgctctctgaacaccccatgtctttcgagggcattcagctaccacaggtcccaggaagggtgctcttctccctggtgaagcggtatttgcatgtcacctcgctcctggatcagctgaacgacagtgctgcggagccaggagcccagaacacctctgctcctgaggagttgagtggggagaggggtcaactggagctggagttcagtatggccatgggcaccctgatctcggagctggtgcaagccatgcgctgggaccaggcctcagacagaccaaggagctcagcacggtcccccggttccatcttccagcctcagctggcagatgtgagcccagggctccccgctgcccaggctcagccctccttcaggaggtcaagacgttttcgccctcgttctgagttcgcaagtggcaatacctatgctttgtatgtgcgggacacactgcagccggggatgcgagtgcggatgctggatgattatgaggagatcagtgccggggatgagggcgagtttcggcagagcaacaacggtgtgcctcctgtgcaggtattttgggagtcaacaggccgcacctattgggtgcactggcacatgctggagatcttgggctttgaggaagacattgaggacatggttgaggctgatgagtaccaaggggcagtggccagtagagtcctgggtagagccctgcctgcctggcgctggaggcccatgacagaactctatgctgtgccttatgtgctgcctgaggatgaggacactgaggagtgtgaacacctgaccctggctgagtggtgggaactcctcttcttcatcaagaagctggatggacctgaccatcaggaggttctccagatcctccaggagaacctagatggggagattctggatgatgagatcctagctgaactggccgtgcccatagaattggcccaggacttgctgctgactctgccacagcgactcaatgacagtgccctcagggacctgatcaactgccatgtctacaagaagtatgggcctgaagccctagcagggaaccaagcctacccatcccttctagaagcccaagaagatgtcctcctgctagacgcgcaggcccaggctaaggactcagaagatgcagccaaagtggaagcaaaagaacccccatctcagagtcccaacactcccctgcagcgtctggtggagggttatggtccagctgggaaaatcctcctggatctagagcaagccctcagctcagaggggacccaggagaacaaggtcaagccactcctgctgcagctgcagcggcagccgcagcccttcctggcactgatgcagagcctggacactccggagactaacaggaccctgcacctgactgtgctgagaatcctgaagcagctggtggacttccccgaggcactgctgctcccctggcacgaggccgtggatgcctgcatggcctgcctgcggtccccaaacactgatcgagaggtgctccaggaactgattttcttcctgcaccgcctgacctcagtgagcagggactatgccgtggtgctgaatcagctgggagcaagagacgctatctccaaggccctggaaaagcacctgggaaagctggagctggctcaggagctgcgggacatggtgttcaagtgtgagaagcatgcccacctctaccgcaaactcatcaccaacatcctgggaggctgcatccagatggtgctgggccagatcgaagaccacagacgaacccaccaacccatcaacatccctttctttgatgtgttcctcagatacctgtgccagggctccagtgtggaagtgaaggaggacaagtgctgggagaaggtggaggtgtcctccaacccgcaccgggccagcaagctgacggaccacaaccccaagacctattgggagtccaacggcagcgccggctcccactacatcaccctgcacatgcgccggggcatcctcatcaggcaactgactctgcttgtggctagtgaggactcgagttacatgccggcccgagtggtggtgtgcgggggtgatagcactagctctcttcacacggaactcaactcggtgaatgtgatgccctctgccagccgggtgatcctcctggagaacctgacccgcttctggcccatcatccagatccgcataaagcgctgccagcagggtggcattgatacgcgcattcgggggttagagatcctaggccccaagcccacgttctggccagtgttccgggagcagctctgtcgtcacacacgcctcttctacatggttcgggcacaggcctggagccaggacatggcagaggaccgcaggagcctcctgcacctgagttctagactcaacggtgctctgcgccaggagcagaattttgctgaccgcttcctccctgatgacgaggctgcccaagctctgggcaagacctgctgggaggccctggtcagccccgtggtgcagaacatcacctcccctgatgaggatggcattagccccctgggttggctgctggaccagtacctggagtgtcaggaagctgtcttcaacccccagagccgcggcccagctttcttctcgcgggtgcgccgtctcactcacctgctggtgcatgtcgagccctgtgaggcaccccctcctgtggtggccactcctcggcccaaaggcagaaacagaagccacgactggagctccttggctacccggggccttccaagcagcatcatgagaaacctgacgcgctgttggcgggccgtggtggagaagcaggtgaacaattttctgacctcatcctggcgggatgatgactttgtgccacgctactgtgagcactttaatattctgcagaactcaagctctgaactgtttgggcctcgggcagccttcttgctggcgctgcaaaatggctgtgcgggagccttgctgaagctcccttttctcaaagctgcccacgtgagtgagcagttcgcccggcacattgaccagcagatccagggcagccggatcggtggagcccaggaaatggagaggctggcacagctgcagcaatgcctgcaagctgtcctgattttctccggcttggagatagccaccacttttgagcattattaccagcactacatggcggaccgtctcctgggcgtggtctcgagctggctggagggggccgtgctggagcagatcggtccctgcttccccaaccgcctcccccagcagatgttgcagagcctgagcacctctaaggagctgcagcgccagttccacgtctaccagctccagcagctggatcaggaactcctgaagctggaggatacagagaagaaaatacaggtgggccttggggccagtggcaaggagcacaagagcgagaaggaagaggaagctggggcagcagcagtggtggatgtggcggagggagaggaggaagaggaggagaatgaggacctctactatgaaggggcaatgccagaagtgtctgtgcttgtcctgtcccgacactcctggcctgttgcctcaatctgccacacactgaaccccagaacctgcctgccctcctacctgaggggcactttgaacagatactccaacttctacaacaagagtcagagccaccctgcccttgagcgaggctcacagaggcgactgcagtggacgtggctgggctgggctgagctgcagtttgggaaccagaccctgcatgtgtccaccgtgcagatgtggctactgctgtatctcaacgacctgaaggcggtctctgtggagagtctgctggcgttctcagggctctccgcagacatgctcaatcaggcgattgggcccctcacctcttcaagaggccccctggaccttcacgagcaaaaggatataccaggaggggtcctcaagattcgagatggcagcaaggaacccaggtcgagatgggacattgtgcggctcatcccacctcagacgtacctgcaagctgagggtgaagacggccagaacttggagaagagacggaatcttctgaactgcctcatcgtccgaatcctcaaggcccatggagatgaggggctgcacattgaccagcttgtctgtctggtgctggaggcttggcagaagggcccgtgtcctcccaggggtttggtcagcagccttggtaaggggtctgcatgcagcagcactgacgtcctctcctgcatcctacacctcctgggcaagggcacgctgagacgccatgacgaccggccccaggtgctgtcctatgcagtccctgtgactgtcatggagcctcacactgagtccctgaacccaggctcctcaggccccaacccacccctcaccttccataccctacagattcgctcccggggtgtgccctatgcctcctgcactgccacccagagcttctctaccttccggtagccctagacttggggtcaggggaaggtagagctggagcttttacagaaataaaacccaagagtttgatt

SEQ ID NO: 123254 - DNA, 7780 bp, Homo sapiens
  Payload ID: 4202
  Gene Symbol: CUL9
  Gene Name: cullin 9
  Uniprot ID: Q8IWT3
  ENST ID: ENST00000252050
  CDS Start-End: 85-7638
agctctgaggaggcggggccaggacggcgggaccggccgctgggtcccagcgagggctgagccgggcggtgggaggaggtcaggatggtgggggaacggcatgctggggacctcatggtgcccttagggcctcggctgcaggcatatcctgaagaactcattcgacagaggcctgggcatgacgggcatcctgaatacctgatccgatggagtgtcctgaagtgtggggaagtgggcaaagtgggtgtggaagaaggcaaagcagagcacatcctcatgtggctgtcggctcctgaggtctacgccaactgccctgggctgttaggtgagcgggcactatctaagggacttcagcacgaaccagctggggtttcaggaagctttcctcgagatccaggaggcctggatgaagtggcaatgggagagatggaggctgatgttcaggcgctggtacgcagggcggccaggcagctggcagaaagtgggaccccaagcctcacggccgctgtgcttcacaccatccacgtgctcagtgcctacgccagcatcgggcccctcactggtgtcttcagggagacaggagccctggacctgctcatgcacatgttatgcaatcctgagcctcagatccgccggagtgcaggcaaaatgctgcaggctctggcagcccacgatgctgggagtcgggctcacgtccttctatcactgagccagcaagatggcatcgagcagcacatggattttgacagtcgctatacattgctggagctgtttgcagaaaccacatcctctgaagaacactgcatggcctttgagggcattcatctgcctcagatcccaggaaagctgcttttctccttggtgaagcgctacctttgtgtcacgtccctcctggatcagctgaatagcagtccagagctgggagctggagaccaaagctccccatgtgccacaagagagaaaagccggggacagcgggaactggagttcagcatggctgtgggcaacctcatctctgagcttgtgcggagcatgggctgggcccggaacctcagcgaacagggcatgtcacctccccggccaacccggtccatctttcagccctacatttcaggccccagccttttactccccaccattgtcaccacccccagaagacaagggtgggtcttccgccagcgctctgaattctccagccgtagtggctatggagaatatgtgcagcagacactgcagccagggatgcgagtgcggatgctggatgattatgaggagatcagtgctggggacgagggcgagttccggcagagcaacaacggcattccccctgtgcaggttttctggcagtcgacaggccgcacttactgggtgcactggcacatgctggagatcctgggccctgaggaagccactgaggataaggcttcagcagctgtggagaagggggcaggggctactgtgttgggcacagcatttccctcctgggactggaatcctatggatgggctgtaccctttgccgtacctccagcccgaacctcagaagaatgagagagtgggatatctgacccaggctgaatggtgggagctgcttttctttatcaaaaagttggacttgtgtgagcagcagccaattttccagaatctttggaagaacctggatgagaccctgggtgaaaaggccctaggtgagatctctgtgtccgtggaaatggccgagagtctgctgcaggttctcagtagtcgatttgagggcagcactctcaatgacctgctcaactcccagatctacaccaagtatgggctgctgtctaatgaaccaagcagctcgtctacttcacgaaatcactcctgtaccccagatccagaagaggagtccaagtcggaggccagcttctcagaggaagagactgagtccctcaaagcaaaggccgaggcccctaagacagaggccgagcccaccaagacaaggaccgagacccccatggcacagagtgattctcagctgtttaaccagcttctggtgactgaggggatgaccctgcccactgagatgaaggaggcagccagtgaaatggccagagccttgcggggtcccggtcctcgcagctccctggatcagcatgtggcagcggtcgtggccactgtgcagatatccagcttggacacaaacctgcagctttcagggctctctgccctctctcaggctgtggaggaggtcactgagcgggaccaccctctggtccgtcctgacagatcgctgagagagaagctagtgaagatgctggtggagctgctgaccaaccaggtgggagagaagatggtggtcgtgcaggccctgcgcctcctttacctgctcatgaccaagcacgagtggcggccgctctttgccagggagggtggcatctatgctgtgctggtctgcatgcaagaatataagacttctgtcttggtgcagcaggctgggctggcggcactgaagatgctggccgtcgccagctcctcggagatccccacttttgttactggccgagattctatccactctttgtttgatgctcagatgaccagagagatcttcgccagcatcgactcagccacacgcccgggctctgagagcctgctcctcactgtccctgcagccgtgatcctgatgctgaatactgaggggtgctcttctgcagcgagaaatggcttactcctgctcaacctacttttgtgcaaccaccacactctgggagaccagattataacccaagagctgagagacacgttgtttaggcactcagggatagcaccaagaacagaacctatgcctaccacacgcaccatcctcatgatgcttctcaatcgctactcagagccgccgggcagccctgagcgtgcagcactagagacccccatcatccagggtcaggatgggtcccctgagctactgattcgatccctggttgggggcccatctgcagaactactcctggacttggagcgtgtgctgtgccgtgagggcagccccggaggtgccgtgaggcccctcctcaagcgcctccagcaggagacccagcctttcctcctgttgctgcggactctggatgctccggggcccaacaagactctgctgctgtctgtgctgagggtcataacccgactgctggatttccctgaggcaatggtcctcccctggcacgaggtcttggagccctgcctcaactgcctgagtggccctagcagtgactccgagattgttcaggagctgacctgcttcctacatcgcctggcctcgatgcataaggactatgctgtggtgctctgctgcctgggagcaaaagagatcctctccaaagtcctggacaagcactcagctcagctgctgctgggctgtgagcttcgggacctggtgacagagtgtgagaagtacgcacagctctatagcaacctcacctccagcatcctggccggctgcattcagatggtgctgggccagatcgaagaccacagacgaacccaccaacccatcaatatccccttctttgatgtgttcctcaggcatctctgccagggctccagtgtggaagtgaaggaggacaagtgctgggagaaggtggaggtgtcctccaacccgcaccgagccagcaagctgacggaccacaaccccaagacctactgggagtccaacggcagcaccggctcccactacatcaccctgcacatgcaccgtggtgttcttgttaggcagctcactttgctggtggccagtgaggactcaagctacatgccagccagggtggtggtgtttgggggtgacagcaccagctgcatcggcactgagctcaacacggtgaatgtgatgccctctgccagccgggtgatcctcttggagaacctgaaccgcttctggcccatcatccagatccgcataaagcgctgccagcagggcggcattgacacccgggttcggggtgtggaggtcctgggccctaagcccacattctggccactgttccgggagcagctgtgtcgccgaacatgtctcttctacacaattcgggcacaagcctggagccgggacatagcagaggaccaccggcgcctcctccagctctgtcccagactgaacagggttttgcgccacgagcagaattttgctgaccgcttcctccctgatgatgaggccgcccaggcactgggcaagacctgctgggaggccctggtcagccccctggtgcagaacatcacctctcccgatgcggaaggcgtgagtgccctgggatggctgctggatcagtacttagaacagagagagacctctcggaaccccttgagtcgagcagcgtcctttgcttctcgagttcgtcgcctttgccacttgctggtgcatgtggaacctcctcctgggccttctcctgagccatccactcggcccttcagcaagaacagcaagggtcgggaccggagcccggcgccttcgccagtgcttccaagcagcagcctgaggaacataacccagtgctggctgagcgtggtgcaggagcaggtcagcagattcctggctgcagcttggagggccccagactttgtgcctcgttactgtaaactctatgagcacttgcagagagcaggctccgagctgtttgggcctcgggcagccttcatgctggctctgcgcagtggcttctctggcgccttgctgcagcagtccttcctcactgctgctcacatgagtgagcagtttgccaggtacattgaccaacagatccagggtggcctgattggtggagcccctggagtggaaatgctggggcagcttcagcggcacctggaacccattatggtcctttctggtctggaactggccacaacttttgagcacttctatcagcattatatggcggaccgtctcctgagctttggttcgagctggctggagggggctgtgctagagcagattggcctctgttttcccaaccgcctcccacagctgatgctgcagagcctgagcacctctgaggagctgcagcgccagttccacctcttccagctccagcggctcgacaagttgttcttggagcaggaagatgaggaggaaaagagactagaggaagaggaggaggaagaggaggaagaggaagctgagaaagaattatttatcgaagatccaagtccagccatttctatactggtcctgtcaccacgctgctggcccgtctccccactctgctacctgtaccatcccagaaagtgccttcccacagaattctgtgatgcccttgaccgtttctccagtttctacagccagagtcagaaccatccagtcctggacatgggaccacatcggcgactgcagtggacgtggctgggccgggctgagctgcagtttgggaagcagatactgcatgtgtccaccgtgcagatgtggctgctgctgaaattcaatcagacagaggaggtgtcagtagagaccttgctgaaggattctgacctctccccagagctgctgctccaggcactcgtgcccctcacctcagggaatggccctttgaccctgcatgagggccaggactttccacacgggggtgtgctgcggcttcatgagcctgggccccagcgcagtggggaggccctgtggctgatacctccccaggcatacctgaacgtagagaaggatgaaggccgaaccctggaacagaagaggaatctcttgagctgtcttcttgttcgtattctcaaagcccatggggaaaagggcctccacattgatcagctggtttgtctggtgctggaggcctggcagaagggtccaaatcctcctggaaccctgggccacactgttgctgggggtgtggcctgtaccagtacagatgtcctctcttgcatcctgcacctcttaggccagggctacgtgaaacggcgtgatgaccggccccagatcctgatgtatgccgctccagagcccatggggccctgccggggtcaggcagatgtccctttctgtggcagccagagcgaaacctccaagcccagcccagaagctgtggctaccctggcatctctacagctgcctgcaggccgcaccatgagcccccaggaagtagaagggttgatgaagcagacggtgcgtcaggtgcaggagacgctgaacttagagccagatgtcgctcagcaccttttggctcattcccactggggcgctgaacagctgctgcagagctacagtgaggaccctgagccactgctgctggcagctgggctgtgcgtacaccaggctcaggctgtacccgtacggcctgaccactgccccgtctgtgtgagccccctggggtgtgacgacgacctgccctctctctgctgcatgcactattgctgtaagtcttgctggaatgagtacctgacaactcggatcgagcagaaccttgttttgaattgcacctgccccattgccgactgccccgcccagcccaccggagccttcattcgtgccatcgtctcctcgccagaggtcatctccaagtatgagaaggcgctcctgcgtggctatgtggagagctgctccaacctgacctggtgcaccaacccccagggctgcgaccgcatcctgtgccgccagggcctgggctgtgggaccacctgctccaagtgtggctgggcctcttgcttcaactgtagcttccctgaggcacactaccctgctagctgtggccatatgtctcagtgggtcgacgacggtggctactatgacggcatgagcgtggaggcgcagagcaagcacctggccaagctcatctccaagcgctgtcccagctgtcaggctcccatcgagaagaacgaggggtgcctgcacatgacctgtgccaaatgtaaccatggattctgctggcgctgcctcaagtcctggaagccaaatcacaaagactattacaactgctctgccatggtaagcaaggcagctcgccaggagaagcggtttcaggactataatgagaggtgcactttccatcaccaggcgcgggagtttgctgtgaacttgcggaaccgggtgtctgccatccatgaagtgcccccgcccagatccttcaccttcctcaatgatgcctgccagggactggagcaggctcggaaggtgctggcctacgcctgcgtgtacagcttctacagccaggacgcagagtacatggatgtggtggagcagcagacagagaacctggagctgcacaccaatgccctgcagatcctcctggaggaaaccctgctgcggtgcagagacctggcctcctccctgcgcctcctgcgggccgactgcctcagcacgggcatggagctgctccggcggatccaggagaggctgcttgccatcctgcagcattctgcccaggatttccgggttggtcttcagagtccatcagtagaggcctgggaggcaaaaggacccaacatgcctggcagtcagccccaggcctcctcagggccagaggcagaagaggaggaggaagacgatgaggatgatgtgcccgagtggcagcaggatgagtttgatgaggagctggacaatgacagcttctcctacgatgagtctgagaacctggaccaagagactttcttctttggtgatgaggaagaggatgaagatgaggcctatgactgagggggcagatgcaggaaacacctagagcagccccagagtcacggggctgagggggcgggagctgcccctgtcatagggagggggattcccagcgtctgtagtgcttcctgtttgctgaataaaggtctctttctcacacaca

SEQ ID NO: 123255 - DNA, 7684 bp, Homo sapiens
  Payload ID: 4202
  Gene Symbol: CUL9
  Gene Name: cullin 9
  ENST ID: ENST00000372647
  CDS Start-End: 75-7544
aggcggggccaggacggcgggaccggccgctgggtcccagcgagggctgagccgggcggtgggaggaggtcaggatggtgggggaacggcatgctggggacctcatggtgcccttagggcctcggctgcaggcatatcctgaagaactcattcgacagaggcctgggcatgacgggcatcctgaatacctgatccgatggagtgtcctgaagtgtggggaagtgggcaaagtgggtgtggaagaaggcaaagcagagcacatcctcatgtggctgtcggctcctgaggtctacgccaactgccctgggctgttaggtgagcgggcactatctaagggacttcagcacgaaccagctggggtttcaggaagctttcctcgagatccaggaggcctggatgaagtggcaatgggagagatggaggctgatgttcaggcgctggtacgcagggcggccaggcagctggcagaaagtgggaccccaagcctcacggccgctgtgcttcacaccatccacgtgctcagtgcctacgccagcatcgggcccctcactggtgtcttcagggagacaggagccctggacctgctcatgcacatgttatgcaatcctgagcctcagatccgccggagtgcaggcaaaatgctgcaggctctggcagcccacgatgctgggagtcgggctcacgtccttctatcactgagccagcaagatggcatcgagcagcacatggattttgacagtcgctatacattgctggagctgtttgcagaaaccacatcctctgaagaacactgcatggcctttgagggcattcatctgcctcagatcccaggaaagctgcttttctccttggtgaagcgctacctttgtgtcacgtccctcctggatcagctgaatagcagtccagagctgggagctggagaccaaagctccccatgtgccacaagagagaaaagccggggacagcgggaactggagttcagcatggctgtgggcaacctcatctctgagcttgtgcggagcatgggctgggcccggaacctcagcgaacagggcatgtcacctccccggccaacccggtccatctttcagccctacatttcaggccccagccttttactccccaccattgtcaccacccccagaagacaagggtgggtcttccgccagcgctctgaattctccagccgtagtggctatggagaatatgtgcagcagacactgcagccagggatgcgagtgcggatgctggatgattatgaggagatcagtgctggggacgagggcgagttccggcagagcaacaacggcattccccctgtgcaggttttctggcagtcgacaggccgcacttactgggtgcactggcacatgctggagatcctgggccctgaggaagccactgaggataaggcttcagcagctgtggagaagggggcaggggctactgtgttgggcacagcatttccctcctgggactggaatcctatggatgggctgtaccctttgccgtacctccagcccgaacctcagaagaatgagagagtgggatatctgacccaggctgaatggtgggagctgcttttctttatcaaaaagttggacttgtgtgagcagcagccaattttccagaatctttggaagaacctggatgagaccctgggtgaaaaggccctaggtgagatctctgtgtccgtggaaatggccgagagtctgctgcaggttctcagtagtcgatttgagggcagcactctcaatgacctgctcaactcccagatctacaccaagtatgggctgctgtctaatgaaccaagcagctcgtctacttcacgaaatcactcctgtaccccagatccagaagaggagtccaagtcggaggccagcttctcagaggaagagactgagtccctcaaagcaaaggccgaggcccctaagacagaggccgagcccaccaagacaaggaccgagacccccatggcacagagtgattctcagctgtttaaccagcttctggtgactgaggggatgaccctgcccactgagatgaaggaggcagccagtgaaatggccagagccttgcggggtcccggtcctcgcagctccctggatcagcatgtggcagcggtcgtggccactgtgcagatatccagcttggacacaaacctgcagctttcagggctctctgccctctctcaggctgtggaggaggtcactgagcgggaccaccctctggtccgtcctgacagatcgctgagagagaagctagtgaagatgctggtggagctgctgaccaaccaggtgggagagaagatggtggtcgtgcaggccctgcgcctcctttacctgctcatgaccaagcacgagtggcggccgctctttgccagggagggtggcatctatgctgtgctggtctgcatgcaagaatataagacttctgtcttggtgcagcaggctgggctggcggcactgaagatgctggccgtcgccagctcctcggagatccccacttttgttactggccgagattctatccactctttgtttgatgctcagatgaccagagagatcttcgccagcatcgactcagccacacgcccgggctctgagagcctgctcctcactgtccctgcagccgtgatcctgatgctgaatactgaggggtgctcttctgcagcgagaaatggcttactcctgctcaacctacttttgtgcaaccaccacactctgggagaccagattataacccaagagctgagagacacgttgtttaggcactcagggatagcaccaagaacagaacctatgcctaccacacgcaccatcctcatgatgcttctcaatcgctactcagagccgccgggcagccctgagcgtgcagcactagagacccccatcatccagggtcaggatgggtcccctgagctactgattcgatccctggttgggggcccatctgcagaactactcctggacttggagcgtgtgctgtgccgtgagggcagccccggaggtgccgtgaggcccctcctcaagcgcctccagcaggagacccagcctttcctcctgttgctgcggactctggatgctccggggcccaacaagactctgctgctgtctgtgctgagggtcataacccgactgctggatttccctgaggcaatggtcctcccctggcacgaggtcttggagccctgcctcaactgcctgagtggccctagcagtgactccgagattgttcaggagctgacctgcttcctacatcgcctggcctcgatgcataaggactatgctgtggtgctctgctgcctgggagcaaaagagatcctctccaaagtcctggacaagcactcagctcagctgctgctgggctgtgagcttcgggacctggtgacagagtgtgagaagtacgcacagctctatagcaacctcacctccagcatcctggccggctgcattcagatggtgctgggccagatcgaagaccacagacgaacccaccaacccatcaatatccccttctttgatgtgttcctcaggcatctctgccagggctccagtgtggaagtgaaggaggacaagtgctgggagaaggtggaggtgtcctccaacccgcaccgagccagcaagctgacggaccacaaccccaagacctactgggagtccaacggcagcaccggctcccactacatcaccctgcacatgcaccgtggtgttcttgttaggcagctcactttgctggtggccagtgaggactcaagctacatgccagccagggtggtggtgtttgggggtgacagcaccagctgcatcggcactgagctcaacacggtgaatgtgatgccctctgccagccgggtgatcctcttggagaacctgaaccgcttctggcccatcatccagatccgcataaagcgctgccagcagggcggcattgacacccgggttcggggtgtggaggtcctgggccctaagcccacattctggccactgttccgggagcagctgtgtcgccgaacatgtctcttctacacaattcgggcacaagcctggagccgggacatagcagaggaccaccggcgcctcctccagctctgtcccagactgaacagggttttgcgccacgagcagaattttgctgaccgcttcctccctgatgatgaggccgcccaggcactgggcaagacctgctgggaggccctggtcagccccctggtgcagaacatcacctctcccgatgcggaaggcgtgagtgccctgggatggctgctggatcagtacttagaacagagagagacctctcggaaccccttgagtcgagcagcgtcctttgcttctcgagttcgtcgcctttgccacttgctggtgcatgtggaacctcctcctgggccttctcctgagccatccactcggcccttcagcaagaacagcaagggtcgggaccggagcccggcgccttcgccagtgcttccaagcagcagcctgaggaacataacccagtgctggctgagcgtggtgcaggagcaggtcagcagattcctggctgcagcttggagggccccagactttgtgcctcgttactgtaaactctatgagcacttgcagagagcaggctccgagctgtttgggcctcgggcagccttcatgctggctctgcgcagtggcttctctggcgccttgctgcagcagtccttcctcactgctgctcacatgagtgagcagtttgccaggtacattgaccaacagatccagggtggcctgattggtggagcccctggagtggaaatgctggggcagcttcagcggcacctggaacccattatggtcctttctggtctggaactggccacaacttttgagcacttctatcagcattatatggcggaccgtctcctgagctttggttcgagctggctggagggggctgtgctagagcagattggcctctgttttcccaaccgcctcccacagctgatgctgcagagcctgagcacctctgaggagctgcagcgccagttccacctcttccagctccagcggctcgacaagttgttcttggagcaggaagatgaggaggaaaagagactagaggaagaggaggaggaagaggaggaagaggaagctgagaaagaattatttatcgaagatccaagtccagccatttctatactggtcctgtcaccacgctgctggcccgtctccccactctgctacctgtaccatcccagaaagtgccttcccacagaattctgtgatgcccttgaccgtttctccagtttctacagccagagtcagaaccatccagtcctggacatgggaccacatcggcgactgcagtggacgtggctgggccgggctgagctgcagtttgggaagcagatactgcatgtgtccaccgtgcagatgtggctgctgctgaaattcaatcagacagaggaggtgtcagtagagaccttgctgaaggattctgacctctccccagagctgctgctccaggcactcgtgcccctcacctcagggaatggccctttgaccctgcatgagggccaggactttccacacggggagaaggatgaaggccgaaccctggaacagaagaggaatctcttgagctgtcttcttgttcgtattctcaaagcccatggggaaaagggcctccacattgatcagctggtttgtctggtgctggaggcctggcagaagggtccaaatcctcctggaaccctgggccacactgttgctgggggtgtggcctgtaccagtacagatgtcctctcttgcatcctgcacctcttaggccagggctacgtgaaacggcgtgatgaccggccccagatcctgatgtatgccgctccagagcccatggggccctgccggggtcaggcagatgtccctttctgtggcagccagagcgaaacctccaagcccagcccagaagctgtggctaccctggcatctctacagctgcctgcaggccgcaccatgagcccccaggaagtagaagggttgatgaagcagacggtgcgtcaggtgcaggagacgctgaacttagagccagatgtcgctcagcaccttttggctcattcccactggggcgctgaacagctgctgcagagctacagtgaggaccctgagccactgctgctggcagctgggctgtgcgtacaccaggctcaggctgtacccgtacggcctgaccactgccccgtctgtgtgagccccctggggtgtgacgacgacctgccctctctctgctgcatgcactattgctgtaagtcttgctggaatgagtacctgacaactcggatcgagcagaaccttgttttgaattgcacctgccccattgccgactgccccgcccagcccaccggagccttcattcgtgccatcgtctcctcgccagaggtcatctccaagtatgagaaggcgctcctgcgtggctatgtggagagctgctccaacctgacctggtgcaccaacccccagggctgcgaccgcatcctgtgccgccagggcctgggctgtgggaccacctgctccaagtgtggctgggcctcttgcttcaactgtagcttccctgaggcacactaccctgctagctgtggccatatgtctcagtgggtcgacgacggtggctactatgacggcatgagcgtggaggcgcagagcaagcacctggccaagctcatctccaagcgctgtcccagctgtcaggctcccatcgagaagaacgaggggtgcctgcacatgacctgtgccaaatgtaaccatggattctgctggcgctgcctcaagtcctggaagccaaatcacaaagactattacaactgctctgccatggtaagcaaggcagctcgccaggagaagcggtttcaggactataatgagaggtgcactttccatcaccaggcgcgggagtttgctgtgaacttgcggaaccgggtgtctgccatccatgaagtgcccccgcccagatccttcaccttcctcaatgatgcctgccagggactggagcaggctcggaaggtgctggcctacgcctgcgtgtacagcttctacagccaggacgcagagtacatggatgtggtggagcagcagacagagaacctggagctgcacaccaatgccctgcagatcctcctggaggaaaccctgctgcggtgcagagacctggcctcctccctgcgcctcctgcgggccgactgcctcagcacgggcatggagctgctccggcggatccaggagaggctgcttgccatcctgcagcattctgcccaggatttccgggttggtcttcagagtccatcagtagaggcctgggaggcaaaaggacccaacatgcctggcagtcagccccaggcctcctcagggccagaggcagaagaggaggaggaagacgatgaggatgatgtgcccgagtggcagcaggatgagtttgatgaggagctggacaatgacagcttctcctacgatgagtctgagaacctggaccaagagactttcttctttggtgatgaggaagaggatgaagatgaggcctatgactgagggggcagatgcaggaaacacctagagcagccccagagtcacggggctgagggggcgggagctgcccctgtcatagggagggggattcccagcgtctgtagtgcttcctgtttgctgaataaaggtctctttctcacaca

SEQ ID NO: 123256 - DNA, 875 bp, Homo sapiens
  Payload ID: 4202
  Gene Symbol: CUL9
  Gene Name: cullin 9
  ENST ID: ENST00000502719
  CDS Start-End: 1-282
tgttttcccaaccgcctcccacagctgatgctgcagagcctgagcacctctgaggagctgcagcgccagttccacctcttccagctccagcggctcgacaagttgttcttggagcaggaagatgaggaggaaaagagactagaggaagaggaggtcagaaccatccagtcctggacatgggaccacatcggcgactgcagtggacgtggctgggccgggctgagctgcagtttgggaagcagatactgcatgtgtccaccgtgcagatgtggctgctgctgaaattcaatcagacagaggaggtgtcagtagagaccttgctgaaggattctgacctctccccagagctgctgctccaggcactcgtgcccctcacctcagggaatggccctttgaccctgcatgagggccaggactttccacacgggggtgtgctgcggcttcatgagcctgggccccagcgcagtggggaggccctgtggctgatacctccccaggcatacctgaacgtagagaaggatgaaggccgaaccctggaacagaagaggaatctcttgagctgtcttcttgttcgtattctcaaagcccatggggaaaagggcctccacattgatcagctggtttgtctggtgctggaggcctggcagaagggtccaaatcctcctggaaccctgggccacactgttgctgggggtgtggcctgtaccagtacagatgtcctctcttgcatcctgcacctcttaggccagggctacgtgaaacggcgtgatgaccggccccagatcctgatgtatgccgctccagagcccatggggccctgccggggtcaggcagatgtccctttctgtggcagccagagcgaaacctccaagccc

SEQ ID NO: 123257 - DNA, 1978 bp, Homo sapiens
  Payload ID: 4202
  Gene Symbol: CUL9
  Gene Name: cullin 9
  ENST ID: ENST00000506830
  CDS Start-End: 1-588
cagaagaggaatctcttgagctgtcttcttgttcgtattctcaaagcccatggggaaaagggcctccacattgatcagctggtttgtctggtgctggaggcctggcagaagggtccaaatcctcctggaaccctgggccacactgttgctgggggtgtggcctgtaccagtacagatgtcctctcttgcatcctgcacctcttaggccagggctacgtgaaacggcgtgatgaccggccccagatcctgatgtatgccgctccagagcccatggggccctgccggggtcaggcagatgtccctttctgtggcagccagagcgaaacctccaagcccagcccagaagctgtggctaccctggcatctctacagctgcctgcaggccgcaccatgagcccccaggaagtagaagggttgatgaagcagacggtgcgtcaggtgcaggagacgctgaacttagagccagatgtcgctcagcaccttttggctcattcccactggggcgctgaacagctgctgcagagctacagtgaggaccctgagccactgctgctggcagctgggcttcttgctggaatgagtacctgacaactcggatcgagcagaaccttgttttgaattgcacctgccccattgccgactgccccgcccagcccaccggagccttcattcgtgccatcgtctcctcgccagaggtcatctccaagtatgagaaggcgctcctgcgtggctatgtggagagctgctccaacctgacctggtgcaccaacccccagggctgcgaccgcatcctgtgccgccagggcctgggctgtgggaccacctgctccaagtgtggctgggcctcttgcttcaactgtagcttccctgaggcacactaccctgctagctgtggccatatgtctcagtgggtcgacgacggtggctactatgacggcatgagcgtggaggcgcagagcaagcacctggccaagctcatctccaagcgctgtcccagctgtcaggctcccatcgagaagaacgaggggtgcctgcacatgacctgtgccaaatgtaaccatggattctgctggcgctgcctcaagtcctggaagccaaatcacaaagactattacaactgctctgccatggtaagcaaggcagctcgccaggagaagcggtttcaggactataatgagaggtgcactttccatcaccaggcgcgggagtttgctgtgaacttgcggaaccgggtgtctgccatccatgaagtgcccccgcccagatccttcaccttcctcaatgatgcctgccagggactggagcaggctcggaaggtgctggcctacgcctgcgtgtacagcttctacagccaggacgcagagtacatggatgtggtggagcagcagacagagaacctggagctgcacaccaatgccctgcagatcctcctggaggaaaccctgctgcggtgcagagacctggcctcctccctgcgcctcctgcgggccgactgcctcagcacgggcatggagctgctccggcggatccaggagaggctgcttgccatcctgcagcattctgcccaggatttccgggttggtcttcagagtccatcagtagaggcctgggaggcaaaaggacccaacatgcctggcagtcagccccaggcctcctcagggccagaggcagaagaggaggaggaagacgatgaggatgatgtgcccgagtggcagcaggatgagtttgatgaggagctggacaatgacagcttctcctacgatgagtctgagaacctggaccaagagactttcttctttggtgatgaggaagaggatgaagatgaggcctatgactgagggggcagatgcaggaaacacctagagcagccccagagtcacggggctgagggggcgggagctgcccctgtcatagggagggggattcccagcgtctgtagtgcttcctgtttgctgaataaaggtctctttctcacaca

SEQ ID NO: 123258 - DNA, 527 bp, Homo sapiens
  Payload ID: 4203
  Gene Symbol: CAND1
  Gene Name: cullin-associated and neddylation-dissociated 1
  ENST ID: ENST00000540525
  CDS Start-End: 365-527
agtctccagcccaccggtccgctggcctcccgatccctgcggagcccctttcctctcccctcttgcaaccccctccccccattctttctcctaggcagttgcccgccgcggtctctaggccccgtttgcttgtctcagcgcccccacatccttccctgccccaccaggaggcgattcttgcgtctcaggtagcgcgaaggggctaaaccacccaccattgtggagaagggagttgctctaggccgggagaccgggcgccgggcctattcgcttgccatcctgcggcgctaggccgccttgctcgctggggcccaagctgctgcccactcggggacccggcagcctcctctctgcccgcaggtttatggctacaaatgatttgatgacggaactgcagaaagattccatcaagttggatgatgatagtgaaaggaaagtagtgaaaatgattttgaagttattggaagataaaaatggagaggtacagaatttagctgtcaaatgtcttggtcctttagtgagtaaag

SEQ ID NO: 123259 - DNA, 11251 bp, Homo sapiens
  Payload ID: 4203
  Gene Symbol: CAND1
  Gene Name: cullin-associated and neddylation-dissociated 1
  Uniprot ID: Q86VP6
  ENST ID: ENST00000545606
  CDS Start-End: 438-4130
gtgaactctgaccttagctttccgtagcgcccgcgtctgccgcccccgcccccggagcgaaggaggcgggctttggccttttgccctagggagcgagtgcggagcgagtgggagcgagacggccctgagtggaagtgtctggctccccgtagaggcccttctgtacgccccgccgcccatgagctcgttctcacgcgaacagcgccgtcgttaggctggctctgtagcctcggcttaccccgggacaggcccacgcctcgccagggagggggcagcccgtcgaggcgcctccctagtcagcgtcggcgtcgcgctgcgaccctggaagcgggagccgccgcgagcgagaggaggagctccagtggcggcggcggcggcggcagcggcagcgggcagcagctccagcagcgccagcaggcgggatcgaggccgtcaacatggcgagcgcctcgtaccacatttccaatttgctggaaaaaatgacatccagcgacaaggactttaggtttatggctacaaatgatttgatgacggaactgcagaaagattccatcaagttggatgatgatagtgaaaggaaagtagtgaaaatgattttgaagttattggaagataaaaatggagaggtacagaatttagctgtcaaatgtcttggtcctttagtgagtaaagtgaaagaataccaagtagagacaattgtagataccctctgcactaacatgctttctgataaagaacaacttcgagacatttcaagtattggtcttaaaacagtaattggagaacttcctccagcttccagtggctctgcattagctgctaatgtatgtaaaaagattactggacgtcttacaagtgcaatagcaaaacaggaagatgtctctgttcagctagaagccttggatattatggctgatatgttgagcaggcaaggaggacttcttgttaatttccatccttcaattctgacctgtctacttccccagttgaccagccctagacttgcagtgaggaaaagaaccattatcgctcttggccatctggttatgagctgtggaaatatagtttttgtagatcttattgaacatctgttgtcagagttgtccaaaaatgattctatgtcaacaacaagaacctacatacaatgtattgctgctattagtaggcaagctggtcatagaataggtgaataccttgagaagataattcctttggtggtaaaattttgcaatgtagatgatgatgaattaagagagtactgtattcaagcctttgaatcatttgtaagaagatgtcctaaggaagtatatcctcatgtttctaccattataaatatttgtcttaaatatcttacctatgatccaaattataattacgatgatgaagatgaagatgaaaatgcaatggatgctgatggtggtgatgatgatgatcaagggagtgatgatgaatacagtgatgatgatgacatgagttggaaagtgagacgtgcagctgcgaagtgcttggatgctgtagttagcacaaggcatgaaatgcttccagaattctacaagaccgtctctcctgcactaatatccagatttaaagagcgtgaagagaatgtaaaggcagatgtttttcacgcatacctttctcttttgaagcaaactcgtcctgtacaaagttggctatgtgaccctgatgcaatggagcagggagaaacacctttaacaatgcttcagagtcaggttcccaacattgttaaagctcttcacaaacagatgaaagaaaaaagtgtgaagacccgacagtgttgttttaacatgttaactgagctggtaaatgtattacctggggccctaactcaacacattcctgtacttgtaccaggaatcattttctcactgaatgataaatcaagctcatcgaatttgaagatcgatgctttgtcatgtctatacgtaatcctctgtaaccattctcctcaagtcttccatcctcacgttcaggctttggttcctccagtggtggcttgtgttggagacccattttacaaaattacatctgaagcacttcttgttactcaacagcttgtcaaagtaattcgtcctttagatcagccttcctcgtttgatgcaactccttatatcaaagatctatttacctgtaccattaagagattaaaagcagctgacattgatcaggaagtcaaggaaagggctatttcctgtatgggacaaattatttgcaaccttggagacaatttgggttctgacttgcctaatacacttcagattttcttggagagactaaagaatgaaattaccaggttaactacagtaaaggcattgacactgattgctgggtcacctttgaagatagatttgaggcctgttctgggagaaggggttcctatccttgcttcatttcttagaaaaaaccagagagctttgaaactgggtactctttctgcccttgatattctaataaaaaactatagtgacagcttgacagctgccatgattgatgcagttctagatgagctcccacctcttatcagcgaaagtgatatgcatgtttcacaaatggccatcagttttcttaccactttggcaaaagtatatccctcctccctttcaaagataagtggatccattctcaatgaacttattggacttgtgagatcacccttattgcaggggggagctcttagtgccatgctagactttttccaagctctggttgtcactggaacaaataatttaggatacatggatttgttgcgcatgctgactggtccagtttactctcagagcacagctcttactcataagcagtcttattattccattgccaaatgtgtagctgcccttactcgagcatgccctaaagagggaccagctgtagtaggtcagtttattcaagatgtcaagaactcaaggtctacagattccattcgtctcttagctctactttctcttggagaagttgggcatcatattgacttaagtggacagttggaactaaaatctgtaatactagaagctttctcatctcctagtgaagaagtcaaatcagctgcatcctatgcattaggcagcattagtgtgggcaaccttcctgaatatctgccgtttgtcctgcaagaaataactagtcaacccaaaaggcagtatcttttacttcattccttgaaggaaattattagctctgcatcagtggtgggccttaaaccatatgttgaaaacatctgggccttattactaaagcactgtgagtgtgcagaggaaggaaccagaaatgttgttgctgaatgtctaggaaaactcactctaattgatccagaaactctccttccacggcttaaggggtacttgatatcaggctcatcatatgcccgaagctcagtggttacggctgtgaaatttacaatttctgaccatccacaacctattgatccactgttaaagaactgcataggtgatttcctaaaaactttggaagacccagatttgaatgtgagaagagtagccttggtcacatttaattcagcagcacataacaagccatcattaataagggatctattggatactgttcttccacatctttacaatgaaacaaaagttagaaaggagcttataagagaggtagaaatgggtccatttaaacatacggttgatgatggtctggatattagaaaggcagcatttgagtgtatgtacacacttctagacagttgtcttgatagacttgatatctttgaatttctaaatcatgttgaagatggtttgaaggaccattatgatattaagatgctgacatttttaatgttggtgagactgtctaccctttgtccaagtgcagtactgcagaggttggaccgacttgttgagccattacgtgcaacatgtacaactaaggtaaaggcaaactcagtaaagcaggagtttgaaaaacaagatgaattaaagcgatctgccatgagagcagtagcagcactgctaaccattccagaagcagagaagagtccactgatgagtgaattccagtcacagatcagttctaaccctgagctggcggctatctttgaaagtatccagaaagattcatcatctactaacttggaatcaatggacactagttagatgtttgttcaccatggggaccattacatatgaccatacaatgcactgaattgacaggttaatcataagacatggaaagagaagtgtctaaaagcttcaaaatgttccacttttttttccttcatggagactgtttgtttggctttcttccattgttgtttttgtagcatttatttcagaaatgtgtatttccataatccagaggttgtaaaaccactagtgttttagtggttacagcaacatttgaaatggaaactaaaagttaggattttatggagtatggagatagggtccagtatctatttaccctgtaatgtttaggattaaaatgttaaaattttgtgaccatgaatttctttcttttataaattttctcatttaaaaatcaaaaatcttgcaaaacaaaaaccatgtttctttttcttgtataactttttgttttcagcaacataaattgatttttagctggcagacaagaatatccatataagatttgttaaccatttcagagagtttggcaatttttaaaagataataaggtatcatttttaagtatgaaaattaacaatatccctgttgcgcacactaattttgcatgagtaagtttacaaatatgtatcgtctgtaaagcagcatgtgcagattattcataatatagaagttaaaataagtattagtgcaattttcagatatttatttttgcacagaaaacacattatctggagagaaagaaaggagaatttttgagacttgggttttcttaatgccagtgtgaatttgcagatgttttcagaaaatcaagtcacagtaacaatttgccacttttttctattataaatcttcttacttaaattttgaatatttagtttttctcagttacccatttgtgtgtgtgtgattccacttagaaattcttaaaaccagatttttctttcattccgtttggatgtctacattccttatcaaaggatataaatactgtgtatgcttttgaattttatttttaggaaaattctgaagccagctatcacaggtttgttagctaataatagtattttcttttagttgagttaggtttttccccatctcctgtagagcgaatttacatattgtattgggtaagtgttcactacttttcctgattaagggatctgtgctggggaacaaagcttttgcagtaccttatattgtagttaaaattttatttaacatatccttcagtgagctcatttcacactgtagcctcttccttaaaatttgtggtgctcctgtaacagtaagaactaattctgaaataaaagacatctcctaatgctgtgcaaacatagtttacatgtattgaaggaggcagttgttaaattgagtgaccaatttaagcaatcagatatttgaaaactgcaccctttagttttgaaactgtgaattagaaacacttttcctgctgtattactacctgctttaacatccaaatatacagtgattttaaatgataacatactgtggttattagattaacagcttgattttgaatgttcagatgataatgcagaagacatcacttctagtaaggattttgactagtgcattgatgttgaagttggtgccatttcaaaatgtggcaggtgataatcttttaccataatttgcataaaactgtaatagaagtttattttgagatgttagtatattatgtactatgcatttctgtggtatagatgttgtggatatatttaagtatttggttacatggttttacaataaattacaatactgcaggctctaggactgaacaggagactgacatgcatatgttgtgtgaatgtcttagttgggtaaagttaaatccaaatacttcaactggctttttcttcagtttgtttgtttttaactttcaagatgcatgttttgttttgttttgctttgtttttgtctcttaagccaattcatttttctaacagttgaaattcttttagtactaaagaaatagatactgctcttttatggctttagtgtttatatacctgtttatatgcatacattaacaaaattagtaacagcagtgcttagaatttcaatgctgtgtcatactgatgattaactccatactcctagtggtgatgtggtccagatactggaatggaagtggcaggatgtggagtccagacatagtctaccactcatgctacttactagtaatattaaggtgttaaacttaggaatttgtcacatgtaggttcctgaggagatctaaaagttaatacaaaaccaagctgtttactgattttcatgagaacatttaagttagtttaggtctacctgatttattttaaaagaaggcagagggctggacgcagtggcttacgcctgtaatcccagcactttgggaggccgaggcgggcggatcacgaggtcaggagatcgagactatcctggctaacactgtgaaaacccatctctactgaaaatacaaaaaattagctgggcgtggtggcagacgcctgtagtcctagctgctacagctgaggcaggagaatggcgtgaacccaggaggcggagctggcagtgagccgagatcacgccactgcactctggcctgggcaacagagcgagagtctgtctcaaaaaaaaaaaaaaaaaaaaggcaggaaggaaatttggtatggcagggcctaacctaaaaggttatttataaaatcaatagcactgaatgataatttttttaatgacagtcatgtattttattaatgatatctgaaagctgcttaaccattaggaattacaattctttatggttggagtatgatgatttcatcaaatgtttgaatatttacataatttttatgtaaccataattaaaccaaattagtctttttttcttcatacttttcttcggtaaatagtgaagaaataatgggcatatctaattaaccagttctagtgggtgttgtgatatctttatatctagttcagtctcagatgtatgaatatgattatatagtcatgattgaagttcaaaatgaggaagtatacaaaatcctcagccactgaaaaattcagttaacttgtttatactcctgtaagctctagttagtcacaagacaaagtatatagtaacactttgtaatgaagtaacattttctgcccacattaattttactaaagacctaaattgttaaaattaattgccaatctctggatatattatgcttagtaagtgttttgaaattaaagaccttaaacatttcagcaagtaaattttggattctagctctgttttaaattgaatcctaattttcaaaccactgctaccccagattcatacctgtttttgaaatcttgtttatggaatggaaaattgacagtatggtaatagtttattgactgattggacaaaggatattctggttttaactgacttttccatttaaataaaattcatttgataattttggttgcaaaagtggaacacagtggaagtatttggctacaggctacccaaatctcatcagataaggctgttttcttaaaggaaatgcaaaatgaaatcatatgttttccttttccaatacagtaaattgcttgttttcctatgaatatcagaaaagattttgtaaacacctttgctgtagtttcaggcaagatctttcagcaacatgtttttgctctttgtaacttagaaagttagctctgaatccaaaaactactgaagtgagtaatgcatataattttacttttttggaccctataatgccagtgtgtcaggtttcagaatgatatttagtagacagaaatacctaattttgttttggaatcttaataccctgtcctcttcataactttctagtggtgattttagcaagtttaattattttgctgaggtcttagaagacagaaagcttatgctatgtaaagtgacattgtttccagattaggaagtattggaattaatttgctattgccagtaagtaatggttgatggatattaagtgattttagtctagaatgctctcaaaaaaatagtaaagaattgtacttcagggccagatggcagctcacgcctgtaatctcagcactttgggaggccaaggtgggggatcacttgaagacaggagttggagaccagctctaggcaacatagtgagaccctgtctctaccaaaaagaagaaaaaagaaatcaacaacatgcaaccataagaatggatgagatggccctaaaagaataaggattacatataatgagaagacgtgtgggctgaaatacctagtgaacaatatttaagggaaactgaagtgcaaatggcctcacaggtttgtttttgtgtttaagacaaggtctcactctgttgcctggactggagtacatagcacgaacatggtttactgcacctcagcttcctgggcacaagtgattctcccacctcagcctcccgagtagctgggagtataggtgtgtgccaccacgtccagctaatttttttatttccttgtggagatggggtctcatgaccttgtccaggatgatctcaaactcctgggctcaagcaatcctgtgttggcctcctaaactgctgagattattgcaagtgcctccttgcccagccacatgttgttgatttcttttttctttttttttctttcttaatttttttttttttttttttttttgagattgatggagtcttgctttgtctcccaggctggagtgcagtggcgcaatatcggctcactgcaacctctgcctcccgggttctagctattctcctgcctcagcctcccaagtagctgtgattacaggcgtgtgccaccatgcccagctaatttttgtatttttagtagagatggagttttgccatgttggccaggctggtttcaaactcctgatcttaggtgatacacccgcctcggcctcccaaagtgctgggattacaggcgtgagccacgtcccccagccagtttcttaatctatacatctagcccagtccatgcccctgtttcagactattatatccaaccacctgctatacatctcataaaggtatctcaaacacagcatatctaaagctgaagtcatcatcttgccctggtttttcctgtctctttgctgatggcatcccatttacccagtcattcaaactggaaatctaaaagcctcacttagcaagagtttggaggcagaatatgataaagaacaaggactctgggaggccaaggcaggtggattgcttgaggtcaagagttcgagaccagtctggccaacatggcgaaaccccgtctttgctaaaaaaacacaaagaaattagctagacgtggtggcacatgcctgtagtcccagctgtgtgggaggctgaggcaggggaattgcttgaacctgggaggtggaggttgcagtgacccaagattgcatgcaccactgcactccagcctgggtgacaaagcgagaccctgtctcaaaaaaaacaaggactctacagatagatagacatcatatatcatattagtttgaatcctggctgttagctgttagacttgggcaaataatttaacctcaactttccctatctataaaatgggaattaaaatatttgcaccttatagggttattgtgaggattaaataggaacattgtataaagcacttaaaacagtacctgggacatactaagtaatataattgttaactcttactagcattctgtcccttttatttcctaaatatctctcatgcccatctcctaaatatctctttcctaaatatctctcatgcttttggcttaagacctcttttcctccttatctattgactggactgcggcaaatgcctgctaatcgttatttttgtgttcattcatttagcaagccaatttattacgcgcttagggtgctgccagggctacaaaagctgttgagactgtacttgatatgaagaagcttgctgattatcatgggaagactgacataaggaagcaccataaaattctgctgtatgagaggtatacacgggatactgggggttaataattgagggtatggtccattcaacatgagtgagacagaaacaattcataaaggagatgaaatgtcttgaggaatgagctcttagaagaatagttttcaaatgagtgtgcatcacagtcacctgtaagacttattaaaacagatcgctgggccctacacccagaggctgtggttcagtaggctgtagtaaaccagtaatttgtatttctatgacgttcccaggttctaatgctgttccccaaggccacaccttggaaaccaccacattaaaatacccagaaggcattaattcccagtccttcctctacacagctgcaaaacaatggtcctgaccatttcatctttgcactacatccttcactgtctctcttttgcccataggataagtacaaactagatctggttactgcctgccccaccagcctcagcatctctcacaactaggactaactttttcttctgacaactataaaatatttcccttgccttctcaagtttgctcaaggtcaagttatgccttttgcctggaatgacttgacttctcttttgttttacttagctggctgcttttcatcttgtaggttaggtcaaggactccaggaagtcttccctggacaagtaatgaagagggcataatccaagggccaactcccatgtttggaacctgactccattttcaggcacgtaatattgtcaaattccttttaaaagcacctgtctgtctgttaacgttggtgcagatactgctattcccctcctccataccattgctgatggttactgagggtatgggaagggccgactagtccagctgttcacaaacagcccttaatgtcaaactgaatactgccaacgtagttccagtttctgtatctaaagactcagcttggagtcacttgtctggactaaaagtaacccctccttgtctggtttgtgactttctgtactctgatgcccccagctttctgccttctagaaatttgtcagaatttccaaaattcttgggccttccttcttgctctatatatggttttggattcattccttttaaaaaatatttactgtcatttcagtagaattttgacacaataaatataagcacatca

SEQ ID NO: 123260 - DNA, 4091 bp, Homo sapiens
  Payload ID: 4203
  Gene Symbol: CAND1
  Gene Name: cullin-associated and neddylation-dissociated 1
  ENST ID: ENST00000544619
  CDS Start-End: 1-2313
catgtttctaccattataaatatttgtcttaaatatcttacctatgatccaaattataattacgatgatgaagatgaagatgaaaatgcaatggatgctgatggtggtgatgatgatgatcaagggagtgatgatgaatacagtgatgatgatgacatgagttggaaagtgagacgtgcagctgcgaagtgcttggatgctgtagttagcacaaggcatgaaatgcttccagaattctacaagaccgtctctcctgcactaatatccagatttaaagagcgtgaagagaatgtaaaggcagatgtttttcacgcatacctttctcttttgaagcaaactcgtcctgtacaaagttggctatgtgaccctgatgcaatggagcagggagaaacacctttaacaatgcttcagagtcaggttcccaacattgttaaagctcttcacaaacagatgaaagaaaaaagtgtgaagacccgacagtgttgttttaacatgttaactacagtaaaggcattgacactgattgctgggtcacctttgaagatagatttgaggcctgttctgggagaaggggttcctatccttgcttcatttcttagaaaaaaccagagagctttgaaactgggtactctttctgcccttgatattctaataaaaaactatagtgacagcttgacagctgccatgattgatgcagttctagatgagctcccacctcttatcagcgaaagtgatatgcatgtttcacaaatggccatcagttttcttaccactttggcaaaagtatatccctcctccctttcaaagataagtggatccattctcaatgaacttattggacttgtgagatcacccttattgcaggggggagctcttagtgccatgctagactttttccaagctctggttgtcactggaacaaataatttaggatacatggatttgttgcgcatgctgactggtccagtttactctcagagcacagctcttactcataagcagtcttattattccattgccaaatgtgtagctgcccttactcgagcatgccctaaagagggaccagctgtagtaggtcagtttattcaagatgtcaagaactcaaggtctacagattccattcgtctcttagctctactttctcttggagaagttgggcatcatattgacttaagtggacagttggaactaaaatctgtaatactagaagctttctcatctcctagtgaagaagtcaaatcagctgcatcctatgcattaggcagcattagtgtgggcaaccttcctgaatatctgccgtttgtcctgcaagaaataactagtcaacccaaaaggcagtatcttttacttcattccttgaaggaaattattagctctgcatcagtggtgggccttaaaccatatgttgaaaacatctgggccttattactaaagcactgtgagtgtgcagaggaaggaaccagaaatgttgttgctgaatgtctaggaaaactcactctaattgatccagaaactctccttccacggcttaaggggtacttgatatcaggctcatcatatgcccgaagctcagtggttacggctgtgaaatttacaatttctgaccatccacaacctattgatccactgttaaagaactgcataggtgatttcctaaaaactttggaagacccagatttgaatgtgagaagagtagccttggtcacatttaattcagcagcacataacaagccatcattaataagggatctattggatactgttcttccacatctttacaatgaaacaaaagttagaaaggagcttataagagaggtagaaatgggtccatttaaacatacggttgatgatggtctggatattagaaaggcagcatttgagtgtatgtacacacttctagacagttgtcttgatagacttgatatctttgaatttctaaatcatgttgaagatggtttgaaggaccattatgatattaagatgctgacatttttaatgttggtgagactgtctaccctttgtccaagtgcagtactgcagaggttggaccgacttgttgagccattacgtgcaacatgtacaactaaggtaaaggcaaactcagtaaagcaggagtttgaaaaacaagatgaattaaagcgatctgccatgagagcagtagcagcactgctaaccattccagaagcagagaagagtccactgatgagtgaattccagtcacagatcagttctaaccctgagctggcggctatctttgaaagtatccagaaagattcatcatctactaacttggaatcaatggacactagttagatgtttgttcaccatggggaccattacatatgaccatacaatgcactgaattgacaggttaatcataagacatggaaagagaagtgtctaaaagcttcaaaatgttccacttttttttccttcatggagactgtttgtttggctttcttccattgttgtttttgtagcatttatttcagaaatgtgtatttccataatccagaggttgtaaaaccactagtgttttagtggttacagcaacatttgaaatggaaactaaaagttaggattttatggagtatggagatagggtccagtatctatttaccctgtaatgtttaggattaaaatgttaaaattttgtgaccatgaatttctttcttttataaattttctcatttaaaaatcaaaaatcttgcaaaacaaaaaccatgtttctttttcttgtataactttttgttttcagcaacataaattgatttttagctggcagacaagaatatccatataagatttgttaaccatttcagagagtttggcaatttttaaaagataataaggtatcatttttaagtatgaaaattaacaatatccctgttgcgcacactaattttgcatgagtaagtttacaaatatgtatcgtctgtaaagcagcatgtgcagattattcataatatagaagttaaaataagtattagtgcaattttcagatatttatttttgcacagaaaacacattatctggagagaaagaaaggagaatttttgagacttgggttttcttaatgccagtgtgaatttgcagatgttttcagaaaatcaagtcacagtaacaatttgccacttttttctattataaatcttcttacttaaattttgaatatttagtttttctcagttacccatttgtgtgtgtgtgattccacttagaaattcttaaaaccagatttttctttcattccgtttggatgtctacattccttatcaaaggatataaatactgtgtatgcttttgaattttatttttaggaaaattctgaagccagctatcacaggtttgttagctaataatagtattttcttttagttgagttaggtttttccccatctcctgtagagcgaatttacatattgtattgggtaagtgttcactacttttcctgattaagggatctgtgctggggaacaaagcttttgcagtaccttatattgtagttaaaattttatttaacatatccttcagtgagctcatttcacactgtagcctcttccttaaaatttgtggtgctcctgtaacagtaagaactaattctgaaataaaagacatctcctaatgctgtgcaaacatagtttacatgtattgaaggaggcagttgttaaattgagtgaccaatttaagcaatcagatatttgaaaactgcaccctttagttttgaaactgtgaattagaaacacttttcctgctgtattactacctgctttaacatccaaatatacagtgattttaaatgataacatactgtggttattagattaacagcttgattttgaatgttcagatgataatgcagaagacatcacttctagtaaggattttgactagtgcattgatgttgaagttggtgccatttcaaaatgtggcaggtgataatcttttaccataatttgcataaaactgtaatagaagtttattttgagatgttagtatattatgtactatgcatttctgtggtatagatgttgtggatatatttaagtatttggttacatggttttacaataaattacaatactgcaggc

SEQ ID NO: 123261 - DNA, 2786 bp, Homo sapiens
  Payload ID: 4203
  Gene Symbol: CAND1
  Gene Name: cullin-associated and neddylation-dissociated 1
  ENST ID: ENST00000540319
  CDS Start-End: 1-1329
cttattcatgcaggctctgcattagctgctaatgtatgtaaaaagattactggacgtcttacaagtgcaatagcaaaacaggaagatgtctctgttcagctagaagccttggatattatggctgatatgttgagcaggcaaggaggacttcttgttaatttccatccttcaattctgacctgtctacttccccagttgaccagccctagacttgcagtgaggaaaagaaccattatcgctcttggccatctggttatgagctgtggaaatatagtttttgtagatcttattgaacatctgttgtcagagttgtccaaaaatgattctatgtcaacaacaagaacctacatacaatgtattgctgctattagtaggcaagctggtcatagaataggtgaataccttgagaagataattcctttggtggtaaaattttgcaatgtagatgatgatgaattaagagagtactgtattcaagcctttgaatcatttgtaagaagatgtcctaaggaagtatatcctcatgtttctaccattataaatatttgtcttaaatatcttacctatgatccaaattataattacgatgatgaagatgaagatgaaaatgcaatggatgctgatggtggtgatgatgatgatcaagggagtgatgatgaatacagtgatgatgatgacatgagttggaaagtgagacgtgcagctgcgaagtgcttggatgctgtagttagcacaaggcatgaaatgcttccagaattctacaagaccgtctctcctgcactaatatccagatttaaagagcgtgaagagaatgtaaaggcagatgtttttcacgcatacctttctcttttgaagcaaactcgtcctgtacaaagttggctatgtgaccctgatgcaatggagcagggagaaacacctttaacaatgcttcagagtcaggttcccaacattgttaaagctcttcacaaacagatgaaagaaaaaagtgtgaagacccgacagtgttgttttaacatgttaactgagctggtaaatgtattacctggggccctaactcaacacattcctgtacttgtaccaggaatcattttctcactgaatgataaatcaagctcatcgaatttgaagatcgatgctttgtcatgtctatacgtaatcctctgtaaccattctcctcaagtcttccatcctcacgttcaggctttggttcctccagtggtggcttgtgttggagacccattttacaaaattacatctgaagcacttcttgttactcaacagcttgtcaaagctcatcatatgcccgaagctcagtggttacggctgtgaaatttacaatttctgaccatccacaacctattgatccactgttaaagaactgcataggtgatttcctaaaaactttggaagacccagatttgaatgtgagaagagtagccttggtcacatttaattcagcagcacataacaagccatcattaataagggatctattggatactgttcttccacatctttacaatgaaacaaaagttagaaaggagcttataagagaggtagaaatgggtccatttaaacatacggttgatgatggtctggatattagaaaggcagcatttgagtgtatgtacacacttctagacagttgtcttgatagacttgatatctttgaatttctaaatcatgttgaagatggtttgaaggaccattatgatattaaggtaagatgtttgtgcctatttatacaatgttttagaagaagactttgctagagcaactttcacccttgtaatttactcatgtgtctgagaaaaatcaggttgtctgtgaagattttgataagcatattgtaaactataaagtgcaaaagtaataggcagtgtaacaccagttgacgtgtaagaaagatccagagccctttttattggaggaggaagtggcagtggatgcaaaatgctgtgtgcccacttgcttagtgaatagtccctagatcctttccctcaaaaaagtcccgacagattttgctgtttaaagtataaatctgtaactttttggcctgtcttaacattggaccatagttgctacccatggagggttttcttagcattgtcttgattaagtctcctgagctacctttggggctagtctgaattgtaactgtatcatttacctgaatgaggaatttttgtttttcaatataatatactgtgtttaatatcaagaattttgttataggacatggaacttttcagatatacaaaacaatctgtagaagctacttgagagaaatcatactgcgtcttatgtttggataatgaattttgcatataagtgttctttgttttcctgtgtgttcgtctccatttaaaatgtgaacagtaaaagggtgatttgaaaaatgaaaaatatatgcattgtgtctttttcatctactcttccatttagggcttttggccaagcaggacaaaagtggtaactcagcagtaattgagccatactacccgaactcctactcttaggtttccatgtgtggtagtgacctgagcctctcaaagttcaatgaagagggcctccccaccaagaagtaaaaggatgtgcttgtttaattctatgagtttatagtccaagagaaaaaggtttatgggttatcaggttttacatggattaatctgaataactggtcaactctgttatgatagtggaaacttattatgaaattgtgttccagttcagtaattttctagttctatgattctcaattctggtgcacatgagctttaaaaaat

SEQ ID NO: 123262 - DNA, 4429 bp, Homo sapiens
  Payload ID: 4204
  Gene Symbol: CAND2
  Gene Name: cullin-associated and neddylation-dissociated 2 (putative)
  Uniprot ID: O75155
  ENST ID: ENST00000295989
  CDS Start-End: 250-3609
gtctctgggggtgtgtgcaatccggcgctgcgctgtcagcagggcaagggctggggccggggccaagaccaccaagccaggcccaggcccgcccgcctcccgcggccgccacggccaaggcgtgagcacggggcggggcgggagctgctatttctgtctggtgagcgcagcccgcgcagctggcgagggagggggcgcccgcgccgccatattccctcccgccggccggctccgcggcgcgcagccaccatgagcaccgccgccttccacatctccagcctcctggagaagatgacgtccagcgacaaggacttcaggttcatggccaccagcgacctgatgtcggagttgcagaaggactccatccagctggacgaggacagcgagcgcaaggtggtgaagatgctgctccggctcctggaggacaagaacggtgaggtgcagaacctggctgtcaagtggctgggtgtcccgctgggcgccttccacgccagcctcctgcactgtctgctgccacagctgagcagcccgcgcctggcggtgcgcaagcgggcggtcggagcgcttggccacctggcggccgcctgcagcaccgacctcttcgtcgagctcgctgaccacctactggaccggctgcccggcccgcgggtgcccaccagcccgactgccatccgcaccctgatccaatgtttgggcagcgtcggccgccaggccggccaccgcctcggggctcacctggaccgcctggtgcccctggtggaggatttctgcaacctggatgatgatgagctccgggagtcctgcctccaggcttttgaggccttcttgaggaagtgccccaaggaaatgggtcctcacgtgcccaacgtgaccagcctctgcctccaatacataaaacacgaccccaactacaactacgacagtgatgaggatgaggagcagatggagacagaggatagtgaattcagtgagcaagagagtgaagacgagtacagcgatgacgatgacatgagctggaaggtgcgccgggcagctgccaagtgcatcgcagccttgatcagctcgcggcctgacctgctgcccgatttccactgcaccctggcacctgtgctcatccgccgcttcaaagaacgcgaggagaacgtcaaggctgacgtcttcactgcttacatcgtgctgctgcggcaaacacagcccccgaagggatggctggaggccatggaggaacccacccagaccggcagcaacctccatatgctacgtggacaggtgccccttgtggtcaaggccctgcagcggcagcttaaagatcggagcgtcagagcccgccagggatgcttcagcctcctcaccgagctggcgggtgtcctcccaggcagcctggccgagcatatgcctgtgctggtatcaggcatcatcttctcgctggccgaccgctccagctcctccaccatccggatggatgccctggccttcttgcaggggctgctgggcaccgaaccagctgaggccttccacccacacttgcctatcctcctgccacctgtgatggcctgtgtggctgactctttctacaagattgcagccgaggccctggtggtgctgcaggagctggtgcgggccctgtggccgctgcacaggcctcggatgctggatcctgagccatatgttggagagatgtctgctgtcaccctggcgcgacttcgtgccactgacctggaccaggaggtgaaggagcgggccatttcctgcatgggccaccttgtaggccacctgggtgaccggcttggggatgacctggagcccacgttactgctcctcctggaccgcctgcggaatgagatcacccggctgcccgccatcaaggcgcttacgctggtggccgtatccccactacagcttgacctacagcccatcctggccgaggcactgcacattctggcctcattcctgcggaagaaccagcgggctttgcgactggccacactggcagccctggacgccctggcccagagccagggcctcagcctcccaccgtctgccgtgcaggccgtgctggctgagctgcctgccctggtcaacgagagcgacatgcatgtggcccagctggctgtggacttccttgccacagtgacccaggcccagccagcctctttggtggaggtcagtggccctgtgctctcagagctgctgcggctgctgcgttcgcccctgttgccagccggggttctggcagctgctgaaggcttcctgcaggccctggtagggacccgtcccccgtgtgtggactatgccaaactcatcagcctgctcactgcgcctgtttatgagcaggctgtggatggtgggcctggcctgcacaagcaggtgttccactcattggcccggtgtgtggcagccctctcagctgcctgtccccaagaggcggcaagcacagccagtcgcctggtctgcgatgccaggtcgccccactccagcacgggggtcaaggtcctggcattcttgtcgctggctgaggtgggtcaggtggctgggccaggccaccagcgggagctgaaggcggtgctcctggaagctttggggtcacccagtgaggatgtgagggctgcagcctcgtatgcactgggccgtgtgggtgctggcagcctgcccgacttcctgcccttcctgctggagcagatcgaggctgagccccgacgacagtacctgctgctgcactcactcagggaggccctgggggccgcccagcctgacagcctgaagccctacgccgaggacatctgggccttgctgttccagcgctgcgagggtgctgaggagggcacccggggggtggtggccgagtgcattgggaagctggtccttgtgaacccttcgttccttctgccccgcttgcggaagcagcttgctgcaggtcggccacacacccggagcaccgtcatcacagcggtcaagttccttatctcggaccagccccatcccattgaccccctcctgaagagcttcatcgctgtgcacaacaagccctcgctagtccgggacctgctggatgacatcctgcccctcctctaccaggagacaaagatccggcgggacctcatccgagaggtggagatggggccctttaaacatacagtggacgatgggctggacgtgcggaaggcggcctttgaatgcatgtattcactgcttgagagctgcctgggccagctggatatctgtgagttcctgaaccatgtggaggacgggctgaaggaccactacgacatccggatgctgaccttcatcatggttgcccggctggccaccctgtgtcctgcacctgtcctgcagagggtggaccgactcattgagccactaagggccacctgcactgccaaggtcaaagctggttctgtgaagcaggagtttgaaaagcaagatgaactgaagcgctctgcaatgagggcagtggctgccctgctgaccatccccgaggtggggaaaagccccatcatggccgacttctcttcccaaatcagatccaaccctgaacttgctgccctctttgaaagcatccagaaggattccgcttcagcccccagcacagactcaatggagctcagctagtcccctcagcaccaaggtgggccctcgcttaagagaaaggagcccacccaagtccgaggcctccccatcccaccatcgcaggtctctacttttgcccttccaccatctcactgggggccctgtcgctcctggtcagggcttacagtgccttctccagggacccaactcaaaggcccccagcccaagctgtgaggctgccaacagttgggccccttccttaactcaggacagtcatccaaagaaatagggtgaggaagttttccagtgacttcacactgtacccctccatagtctgtctggttccttcagagggtgtctctgcctcacaaactagtagtatttagaaataggctgtgctgtcagctgtaaaagatcaggaggcagcagacaccactctggtttcttcactgcattcagcaatgcctgaagttagtgctcaggccgggcatctcaaaagaaaagatacttgagttattcacattttaaaattcaaaacggttcatttttaagtggcagtgatgaatcagaaatttggaagatgatacgggtttcttttttccagggaggaggaatgggttgggtagggaactggacaggcttggacctcatgtttcatttctaatttcaaaatacttattagcaaattgggcaacaatgggcatcttccatgccaccacccaggcataaccagttggtttgtttccttctgaggaaggtttcaaatgtgtctagtgttcagtattgaggacaaagaaatacaagtggcaggcccaagtattttctgtgatatcccaggttaataaagattagattctaagtt

SEQ ID NO: 123263 - DNA, 4573 bp, Homo sapiens
  Payload ID: 4204
  Gene Symbol: CAND2
  Gene Name: cullin-associated and neddylation-dissociated 2 (putative)
  Uniprot ID: O75155
  ENST ID: ENST00000456430
  CDS Start-End: 42-3752
atattccctcccgccggccggctccgcggcgcgcagccaccatgagcaccgccgccttccacatctccagcctcctggagaagatgacgtccagcgacaaggacttcaggttcatggccaccagcgacctgatgtcggagttgcagaaggactccatccagctggacgaggacagcgagcgcaaggtggtgaagatgctgctccggctcctggaggacaagaacggtgaggtgcagaacctggctgtcaagtgcctgggtcctctggtggtcaaagtgaaggagtaccaggtggagaccattgtggacaccctgtgcaccaacatgcggtcagacaaggagcagctgcgagacattgccggcattggcctcaagaccgtcctctcggagctccctcctgcagccacaggctccgggctggccaccaacgtgtgccggaagatcacaggccagctcaccagtgccattgcccagcaggaggatgtggctgtgcagctggaagccctggacatcctctctgacatgctgagcaggctgggtgtcccgctgggcgccttccacgccagcctcctgcactgtctgctgccacagctgagcagcccgcgcctggcggtgcgcaagcgggcggtcggagcgcttggccacctggcggccgcctgcagcaccgacctcttcgtcgagctcgctgaccacctactggaccggctgcccggcccgcgggtgcccaccagcccgactgccatccgcaccctgatccaatgtttgggcagcgtcggccgccaggccggccaccgcctcggggctcacctggaccgcctggtgcccctggtggaggatttctgcaacctggatgatgatgagctccgggagtcctgcctccaggcttttgaggccttcttgaggaagtgccccaaggaaatgggtcctcacgtgcccaacgtgaccagcctctgcctccaatacataaaacacgaccccaactacaactacgacagtgatgaggatgaggagcagatggagacagaggatagtgaattcagtgagcaagagagtgaagacgagtacagcgatgacgatgacatgagctggaaggtgcgccgggcagctgccaagtgcatcgcagccttgatcagctcgcggcctgacctgctgcccgatttccactgcaccctggcacctgtgctcatccgccgcttcaaagaacgcgaggagaacgtcaaggctgacgtcttcactgcttacatcgtgctgctgcggcaaacacagcccccgaagggatggctggaggccatggaggaacccacccagaccggcagcaacctccatatgctacgtggacaggtgccccttgtggtcaaggccctgcagcggcagcttaaagatcggagcgtcagagcccgccagggatgcttcagcctcctcaccgagctggcgggtgtcctcccaggcagcctggccgagcatatgcctgtgctggtatcaggcatcatcttctcgctggccgaccgctccagctcctccaccatccggatggatgccctggccttcttgcaggggctgctgggcaccgaaccagctgaggccttccacccacacttgcctatcctcctgccacctgtgatggcctgtgtggctgactctttctacaagattgcagccgaggccctggtggtgctgcaggagctggtgcgggccctgtggccgctgcacaggcctcggatgctggatcctgagccatatgttggagagatgtctgctgtcaccctggcgcgacttcgtgccactgacctggaccaggaggtgaaggagcgggccatttcctgcatgggccaccttgtaggccacctgggtgaccggcttggggatgacctggagcccacgttactgctcctcctggaccgcctgcggaatgagatcacccggctgcccgccatcaaggcgcttacgctggtggccgtatccccactacagcttgacctacagcccatcctggccgaggcactgcacattctggcctcattcctgcggaagaaccagcgggctttgcgactggccacactggcagccctggacgccctggcccagagccagggcctcagcctcccaccgtctgccgtgcaggccgtgctggctgagctgcctgccctggtcaacgagagcgacatgcatgtggcccagctggctgtggacttccttgccacagtgacccaggcccagccagcctctttggtggaggtcagtggccctgtgctctcagagctgctgcggctgctgcgttcgcccctgttgccagccggggttctggcagctgctgaaggcttcctgcaggccctggtagggacccgtcccccgtgtgtggactatgccaaactcatcagcctgctcactgcgcctgtttatgagcaggctgtggatggtgggcctggcctgcacaagcaggtgttccactcattggcccggtgtgtggcagccctctcagctgcctgtccccaagaggcggcaagcacagccagtcgcctggtctgcgatgccaggtcgccccactccagcacgggggtcaaggtcctggcattcttgtcgctggctgaggtgggtcaggtggctgggccaggccaccagcgggagctgaaggcggtgctcctggaagctttggggtcacccagtgaggatgtgagggctgcagcctcgtatgcactgggccgtgtgggtgctggcagcctgcccgacttcctgcccttcctgctggagcagatcgaggctgagccccgacgacagtacctgctgctgcactcactcagggaggccctgggggccgcccagcctgacagcctgaagccctacgccgaggacatctgggccttgctgttccagcgctgcgagggtgctgaggagggcacccggggggtggtggccgagtgcattgggaagctggtccttgtgaacccttcgttccttctgccccgcttgcggaagcagcttgctgcaggtcggccacacacccggagcaccgtcatcacagcggtcaagttccttatctcggaccagccccatcccattgaccccctcctgaagagcttcatcggagagttcatggagagcctgcaggacccagacctgaacgtgcgccgtgcgactctggctttcttcaactcagctgtgcacaacaagccctcgctagtccgggacctgctggatgacatcctgcccctcctctaccaggagacaaagatccggcgggacctcatccgagaggtggagatggggccctttaaacatacagtggacgatgggctggacgtgcggaaggcggcctttgaatgcatgtattcactgcttgagagctgcctgggccagctggatatctgtgagttcctgaaccatgtggaggacgggctgaaggaccactacgacatccggatgctgaccttcatcatggttgcccggctggccaccctgtgtcctgcacctgtcctgcagagggtggaccgactcattgagccactaagggccacctgcactgccaaggtcaaagctggttctgtgaagcaggagtttgaaaagcaagatgaactgaagcgctctgcaatgagggcagtggctgccctgctgaccatccccgaggtggggaaaagccccatcatggccgacttctcttcccaaatcagatccaaccctgaacttgctgccctctttgaaagcatccagaaggattccgcttcagcccccagcacagactcaatggagctcagctagtcccctcagcaccaaggtgggccctcgcttaagagaaaggagcccacccaagtccgaggcctccccatcccaccatcgcaggtctctacttttgcccttccaccatctcactgggggccctgtcgctcctggtcagggcttacagtgccttctccagggacccaactcaaaggcccccagcccaagctgtgaggctgccaacagttgggccccttccttaactcaggacagtcatccaaagaaatagggtgaggaagttttccagtgacttcacactgtacccctccatagtctgtctggttccttcagagggtgtctctgcctcacaaactagtagtatttagaaataggctgtgctgtcagctgtaaaagatcaggaggcagcagacaccactctggtttcttcactgcattcagcaatgcctgaagttagtgctcaggccgggcatctcaaaagaaaagatacttgagttattcacattttaaaattcaaaacggttcatttttaagtggcagtgatgaatcagaaatttggaagatgatacgggtttcttttttccagggaggaggaatgggttgggtagggaactggacaggcttggacctcatgtttcatttctaatttcaaaatacttattagcaaattgggcaacaatgggcatcttccatgccaccacccaggcataaccagttggtttgtttccttctgaggaaggtttcaaatgtgtctagtgttcagtattgaggacaaagaaatacaagtggcaggcccaagtattttctgtgatatcccaggttaataaagattagattctaagtta

SEQ ID NO: 123264 - DNA, 771 bp, Homo sapiens
  Payload ID: 4204
  Gene Symbol: CAND2
  Gene Name: cullin-associated and neddylation-dissociated 2 (putative)
  ENST ID: ENST00000446928
  CDS Start-End: 50-382
gcgccgccatattccctcccgccggccggctccgcggcgcgcagccaccatgagcaccgccgccttccacatctccagcctcctggagaagatgacgtccagcgacaaggacttcaggttcatggccaccagcgacctgatgtcggagttgcagaaggactccatccagctggacgaggacagcgagcgcaaggtggtgaagatgctgctccggctcctggaggacaagaacggtgaggtgcagaacctggctgtcaagtgttgcagggcacctcttttgcaagggccattgagttgccataatcctgggaaggaggccgggagagaatggggagaggggcggagcctggcccaggttgcccgcggagtgcgatcggcctgatgccccctcgtgctccccaggctgggtgtcccgctgggcgccttccacgccagcctcctgcactgtctgctgccacagctgagcagcccgcgcctggcggtgcgcaagcgggcggtcggagcgcttggccacctggcggccgcctgcagcaccgacctcttcgtcgagctcgctgaccacctactggaccggctgcccggcccgcgggtgcccaccagcccgactgccatccgcaccctgatccaatgtttgggcagcgtcggccgccaggccggccaccgcctcggggctcacctggaccgcctggtgcccctggtggaggatttctgcaacctggatgatgatgagctccgggagtcctgcctccaggcttttgaggccttcttgag

SEQ ID NO: 123265 - DNA, 650 bp, Homo sapiens
  Payload ID: 4204
  Gene Symbol: CAND2
  Gene Name: cullin-associated and neddylation-dissociated 2 (putative)
  ENST ID: ENST00000454887
  CDS Start-End: 1-492
atggggccctttaaacatacagtggacgatgggctggacgtgcggaaggcggcctttgaatgcatgtattcactgcttgagagctgcctgggccagctggatatctgtgagttcctgaaccatgtggaggacgggctgaaggaccactacgacatccggatgctgaccttcatcatggttgcccggctggccaccctgtgtcctgcacctgtcctgcagagggtggaccgactcattgagccactaagggccacctgcactgccaaggaaccaaacgccaacagtgtggcctggaacacccagtgtgaggacatgcatgctctgcttctcgggaggaggctacctcaacatcaaagccagcaccttccctatgcaccggcagaagctgcagggctttgtggtcggctacaatggctccaagatcttctgcctccatgtcttctccatttctgccgtggaggtgccgcagattggagaggacgaaggccctgaggtccaagaacattgaaacctgacagtggatgccaacagctgtggggaggagcctggtgagacgcccatgctgccacgtgcccagcaacgttggagcctgcagcgcttttcccctgccctgctctattttatcttttttaataaagatggctcctgat

SEQ ID NO: 123266 - DNA, 333 bp, Homo sapiens
  Payload ID: 4204
  Gene Symbol: CAND2
  Gene Name: cullin-associated and neddylation-dissociated 2 (putative)
  ENST ID: ENST00000626378
  CDS Start-End: 1-333
atgagcaccgccgccttccacatctccagcctcctggagaagatgacgtccagcgacaaggacttcaggttcatggccaccagcgacctgatgtcggagttgcagaaggactccatccagctggacgaggacagcgagcgcaaggtggtgaagatgctgctccggctcctggaggacaagaacggtgaggtgcagaacctggctgtcaagtgttgcagggcacctcttttgcaagggccattgagttgccataatcctgggaaggaggccgggagagaatggggagaggggcggagcctggcccaggttgcccgcggagtgcgatcggcctga

SEQ ID NO: 123267 - DNA, 658 bp, Homo sapiens
  Payload ID: 4205
  Gene Symbol: CUTA
  Gene Name: cutA divalent cation tolerance homolog (E. coli)
  ENST ID: ENST00000374484
  CDS Start-End: 1-335
cttcttctactgtcacatggtgcgcgctgttttctaatcacgtggctgccacccaggcctctctgctcctgtcttttgtttggatgccggcgctgctgcctgtggcctcccgccttttgttgctaccccgagtcttgctgaccatggcctctggaagccctccgacccagccctcgccggcctcggattccggctctggctacgttccgggctcggtctctgcagcctttgttacttgccccaacgagaaggtcgccaaggagatcgccagggccgtggtggagaagcgcctagcagcctgcgtcaacctcatccctcagattacatccatgtgactatgagtggaaagggaagatcgaggaagacagtgaggtgctgatgatgattaaaacccaaagttccttggtcccagctttgacagattttgttcgttctgtgcacccttacgaagtggccgaggtaattgcattgcctgtggaacaggggaactttccgtacctgcagtgggtgcgccaggtcacagagtcagtttctgactctatcacagtcctgccatgatgagccctgttcctgctcatcatgaagatccccgcgatacttcaacgccttctgacttccaggtgatgactgggcccccaataaatcccgtctttgggtc

SEQ ID NO: 123268 - DNA, 762 bp, Homo sapiens
  Payload ID: 4205
  Gene Symbol: CUTA
  Gene Name: cutA divalent cation tolerance homolog (E. coli)
  Uniprot ID: O60888
  ENST ID: ENST00000374496
  CDS Start-End: 261-731
cttcctggggttgtttctccgtgtgacgtgtggcctttgagatcaactctcctgtaccagcgtaggccgcatgagtggggggcgggctcccgcggtcctgctcggcggagtggggcattcttcgggggtgcatcagagggagggcagagcctgaggatctaagcgaaggcttccccgggtgtaatttcctgggctgtttgtgaggagagatcgaattcgcctcctgctctcaggcctctctgctcctgtcttttgtttggatgccggcgctgctgcctgtggcctcccgccttttgttgctaccccgagtcttgctgaccatggcctctggaagccctccgacccagccctcgccggcctcggattccggctctggctacgttccgggctcggtctctgcagcctttgttacttgccccaacgagaaggtcgccaaggagatcgccagggccgtggtggagaagcgcctagcagcctgcgtcaacctcatccctcagattacatccatctatgagtggaaagggaagatcgaggaagacagtgaggtgctgatgatgattaaaacccaaagttccttggtcccagctttgacagattttgttcgttctgtgcacccttacgaagtggccgaggtaattgcattgcctgtggaacaggggaactttccgtacctgcagtgggtgcgccaggtcacagagtcagtttctgactctatcacagtcctgccatgatgagccctgttcctgctcatcatgaagatcc

SEQ ID NO: 123269 - DNA, 937 bp, Homo sapiens
  Payload ID: 4205
  Gene Symbol: CUTA
  Gene Name: cutA divalent cation tolerance homolog (E. coli)
  Uniprot ID: O60888
  ENST ID: ENST00000374500
  CDS Start-End: 133-729
cagccagcaagtggcagtttcgggttcacacggaaacgggcgtgccatttccgcgcacgtctgcagatgcggtagtcgattggtcaagtctcccatggctcctccttcatcaggaggtgggcaaaccgcgccatgatagggtcgggattggctggctctggaggcgcaggtggtccttcttctactgtcacatggtgcgcgctgttttctaatcacgtggctgccacccaggcctctctgctcctgtcttttgtttggatgccggcgctgctgcctgtggcctcccgccttttgttgctaccccgagtcttgctgaccatggcctctggaagccctccgacccagccctcgccggcctcggattccggctctggctacgttccgggctcggtctctgcagcctttgttacttgccccaacgagaaggtcgccaaggagatcgccagggccgtggtggagaagcgcctagcagcctgcgtcaacctcatccctcagattacatccatctatgagtggaaagggaagatcgaggaagacagtgaggtgctgatgatgattaaaacccaaagttccttggtcccagctttgacagattttgttcgttctgtgcacccttacgaagtggccgaggtaattgcattgcctgtggaacaggggaactttccgtacctgcagtgggtgcgccaggtcacagagtcagtttctgactctatcacagtcctgccatgatgagccctgttcctgctcatcatgaagatccccgcgatacttcaacgccttctgacttccaggtgatgactgggcccccaataaatcccgtctttgggtctctctgccttttgcctgttttttgtcatgtatgcaaatttgttgggagaatataagtgcttctagtccctgtattctctacatctttcagaatgactcagagctgcta

SEQ ID NO: 123270 - DNA, 937 bp, Homo sapiens; identical to SEQ ID NO: 123269
  Payload ID: 4205
  Gene Symbol: CUTA
  Gene Name: cutA divalent cation tolerance homolog (E. coli)
  Uniprot ID: O60888
  ENST ID: ENST00000435267
  CDS Start-End: 133-729

SEQ ID NO: 123271 - DNA, 870 bp, Homo sapiens
  Payload ID: 4205
  Gene Symbol: CUTA
  Gene Name: cutA divalent cation tolerance homolog (E. coli)
  Uniprot ID: O60888
  ENST ID: ENST00000440930
  CDS Start-End: 123-662
tgcgcgctgttttctaatcacgtggctgccacccaggtaagaagaggccgctcttcctggggttgtttctccgtgtgacgtgtggcctttgagatcaactctcctgtaccagcgtaggccgcatgagtggggggcgggctcccgcggtcctgctcggcggagtggcctctctgctcctgtcttttgtttggatgccggcgctgctgcctgtggcctcccgccttttgttgctaccccgagtcttgctgaccatggcctctggaagccctccgacccagccctcgccggcctcggattccggctctggctacgttccgggctcggtctctgcagcctttgttacttgccccaacgagaaggtcgccaaggagatcgccagggccgtggtggagaagcgcctagcagcctgcgtcaacctcatccctcagattacatccatctatgagtggaaagggaagatcgaggaagacagtgaggtgctgatgatgattaaaacccaaagttccttggtcccagctttgacagattttgttcgttctgtgcacccttacgaagtggccgaggtaattgcattgcctgtggaacaggggaactttccgtacctgcagtgggtgcgccaggtcacagagtcagtttctgactctatcacagtcctgccatgatgagccctgttcctgctcatcatgaagatccccgcgatacttcaacgccttctgacttccaggtgatgactgggcccccaataaatcccgtctttgggtctctctgccttttgcctgttttttgtcatgtatgcaaatttgttgggagaatataagtgcttctagtccctgtattctctacatctttcagaatgactcagagctgcta

SEQ ID NO: 123272 - DNA, 822 bp, Homo sapiens
  Payload ID: 4205
  Gene Symbol: CUTA
  Gene Name: cutA divalent cation tolerance homolog (E. coli)
  Uniprot ID: O60888
  ENST ID: ENST00000440279
  CDS Start-End: 254-724
gaagcctcgaccgctacccgcaccctaaatcccagaggttggccccctgaggtgtgagtgaaatgagcttttgctttattttccaagtttctctctcaccttcaggggcattcttcgggggtgcatcagagggagggcagagcctgaggatctaagcgaaggcttccccgggtgtaatttcctgggctgtttgtgaggagagatcgaattcgcctcctgctctcaggcctctctgctcctgtcttttgtttggatgccggcgctgctgcctgtggcctcccgccttttgttgctaccccgagtcttgctgaccatggcctctggaagccctccgacccagccctcgccggcctcggattccggctctggctacgttccgggctcggtctctgcagcctttgttacttgccccaacgagaaggtcgccaaggagatcgccagggccgtggtggagaagcgcctagcagcctgcgtcaacctcatccctcagattacatccatctatgagtggaaagggaagatcgaggaagacagtgaggtgctgatgatgattaaaacccaaagttccttggtcccagctttgacagattttgttcgttctgtgcacccttacgaagtggccgaggtaattgcattgcctgtggaacaggggaactttccgtacctgcagtgggtgcgccaggtcacagagtcagtttctgactctatcacagtcctgccatgatgagccctgttcctgctcatcatgaagatccccgcgatacttcaacgccttctgacttccaggtgatgactgggcccccaataaatcccgtctttggg

SEQ ID NO: 123273 - DNA, 769 bp, Homo sapiens
  Payload ID: 4205
  Gene Symbol: CUTA
  Gene Name: cutA divalent cation tolerance homolog (E. coli)
  Uniprot ID: O60888
  ENST ID: ENST00000488034
  CDS Start-End: 123-662
tgcgcgctgttttctaatcacgtggctgccacccaggtaagaagaggccgctcttcctggggttgtttctccgtgtgacgtgtggcctttgagatcaactctcctgtaccagcgtaggccgcatgagtggggggcgggctcccgcggtcctgctcggcggagtggcctctctgctcctgtcttttgtttggatgccggcgctgctgcctgtggcctcccgccttttgttgctaccccgagtcttgctgaccatggcctctggaagccctccgacccagccctcgccggcctcggattccggctctggctacgttccgggctcggtctctgcagcctttgttacttgccccaacgagaaggtcgccaaggagatcgccagggccgtggtggagaagcgcctagcagcctgcgtcaacctcatccctcagattacatccatctatgagtggaaagggaagatcgaggaagacagtgaggtgctgatgatgattaaaacccaaagttccttggtcccagctttgacagattttgttcgttctgtgcacccttacgaagtggccgaggtaattgcattgcctgtggaacaggggaactttccgtacctgcagtgggtgcgccaggtcacagagtcagtttctgactctatcacagtcctgccatgatgagccctgttcctgctcatcatgaagatccccgcgatacttcaacgccttctgacttccaggtgatgactgggcccccaataaatcccgtctttgggtctctctgc

SEQ ID NO: 123274 - DNA, 837 bp, Homo sapiens
  Payload ID: 4205
  Gene Symbol: CUTA
  Gene Name: cutA divalent cation tolerance homolog (E. coli)
  ENST ID: ENST00000482684
  CDS Start-End: 108-236
aatcacgtggctgccacccaggtaagaagaggccgctcttcctggggttgtttctccgtgtgacgtgtggcctttgagatcaactctcctgtaccagcgtaggccgcatgagtggggggcgggctcccgcggtcctgctcggcggagtggtgagtgaccggccccgccccgccccttccggtcctcgaagcctcgaccgctacccgcaccctaaatcccagaggttggccccctgaggtgcctctctgctcctgtcttttgtttggatgccggcgctgctgcctgtggcctcccgccttttgttgctaccccgagtcttgctgaccatggcctctggaagccctccgacccagccctcgccggcctcggattccggctctggctacgttccgggctcggtctctgcagcctttgttacttgccccaacgagaaggtcgccaaggagatcgccagggccgtggtggagaagcgcctagcagcctgcgtcaacctcatccctcagattacatccatctatgagtggaaagggaagatcgaggaagacagtgaggtgctgatgatgattaaaacccaaagttccttggtcccagctttgacagattttgttcgttctgtgcacccttacgaagtggccgaggtaattgcattgcctgtggaacaggggaactttccgtacctgcagtgggtgcgccaggtcacagagtcagtttctgactctatcacagtcctgccatgatgagccctgttcctgctcatcatgaagatccccgcgatacttcaacgccttctgacttccaggtgatgactgggcccccaataaatcccgtctttgggtc

SEQ ID NO: 123275 - DNA, 676 bp, Homo sapiens
  Payload ID: 4205
  Gene Symbol: CUTA
  Gene Name: cutA divalent cation tolerance homolog (E. coli)
  ENST ID: ENST00000488478
  CDS Start-End: 87-554
gtaagaagaggccgctcttcctggggttgtttctccgtgtgacgtgtggcctttgagatcaactctcctgtaccagcgtaggccgcatgagtggggggcgggctcccgcggtcctgctcggcggagtggcctctctgctcctgtcttttgtttggatgccggcgctgctgcctgtggcctcccgccttttgttgctaccccgagtcttgctgaccatggcctctggaagccctccgacccagccctcgccggcctcggattccggctctggctacgttccgggctcggtctctgcagcctttgttacttgccccaacgagaaggtcgccaaggagatcgccagggccgtggtggagaagcgcctagcagcctgcgtcaacctcatccctcagattacatccatctatgagtggaaagggaagatcgaggaagacagtgaggtgctgatgttctgtgcacccttacgaagtggccgaggtaattgcattgcctgtggaacaggggaactttccgtacctgcagtgggtgcgccaggtcacagagtcagtttctgactctatcacagtcctgccatgatgagccctgttcctgctcatcatgaagatccccgcgatacttcaacgccttctgacttccaggtgatgactgggcccccaataaatcccgtctttgggtc

SEQ ID NO: 123276 - DNA, 731 bp, Homo sapiens
  Payload ID: 4205
  Gene Symbol: CUTA
  Gene Name: cutA divalent cation tolerance homolog (E. coli)
  ENST ID: ENST00000494751
  CDS Start-End: 249-656
gtttctccgtgtgacgtgtggcctttgagatcaactctcctgtaccagcgtaggccgcatgagtggggggcgggctcccgcggtcctgctcggcggagtggggcattcttcgggggtgcatcagagggagggcagagcctgaggatctaagcgaaggcttccccgggtgtaatttcctgggctgtttgtgaggagagatcgaattcgcctcctgctctcaggcctctctgctcctgtcttttgtttggatgccggcgctgctgcctgtggcctcccgccttttgttgctaccccgagtcttgctgaccatggcctctggaagccctccgacccagccctcgccggcctcggattccggctctggctacgttccgggctcggtctctgcagcctttgttacttgccccaacgagaaggtcgccaaggagatcgccagggccgtggtggagaagcgcctagcagcctgcgtcaacctcatccctcagattacatccatctatgagtggaaagggaagatcgaggaagacagtgaggtgctgatgatgattaaaacccaaagttccttggtcccagctttgacagattttgttcgttctgtgcacccttacgaagtggccgagtcctgccatgatgagccctgttcctgctcatcatgaagatccccgcgatacttcaacgccttctgacttccaggtgatgactgggcccccaataaatcccgtctttgggtc

SEQ ID NO: 123277 - DNA, 1054 bp, Homo sapiens
  Payload ID: 4205
  Gene Symbol: CUTA
  Gene Name: cutA divalent cation tolerance homolog (E. coli)
  Uniprot ID: O60888
  ENST ID: ENST00000487148
  CDS Start-End: 376-846
gtgtggcctttgagatcaactctcctgtaccagcgtaggccgcatgagtggggggcgggctcccgcggtcctgctcggcggagtggtgagtgaccggccccgccccgccccttccggtcctcgaagcctcgaccgctacccgcaccctaaatcccagaggttggccccctgaggtgtgagtgaaatgagcttttgctttattttccaagtttctctctcaccttcaggggcattcttcgggggtgcatcagagggagggcagagcctgaggatctaagcgaaggcttccccgggtgtaatttcctgggctgtttgtgaggagagatcgaattcgcctcctgctctcaggcctctctgctcctgtcttttgtttggatgccggcgctgctgcctgtggcctcccgccttttgttgctaccccgagtcttgctgaccatggcctctggaagccctccgacccagccctcgccggcctcggattccggctctggctacgttccgggctcggtctctgcagcctttgttacttgccccaacgagaaggtcgccaaggagatcgccagggccgtggtggagaagcgcctagcagcctgcgtcaacctcatccctcagattacatccatctatgagtggaaagggaagatcgaggaagacagtgaggtgctgatgatgattaaaacccaaagttccttggtcccagctttgacagattttgttcgttctgtgcacccttacgaagtggccgaggtaattgcattgcctgtggaacaggggaactttccgtacctgcagtgggtgcgccaggtcacagagtcagtttctgactctatcacagtcctgccatgatgagccctgttcctgctcatcatgaagatccccgcgatacttcaacgccttctgacttccaggtgatgactgggcccccaataaatcccgtctttgggtctctctgccttttgcctgttttttgtcatgtatgcaaatttgttgggagaatataagtgcttctagtccctgtattctctacatctttcagaatgactcagagctgcta

SEQ ID NO: 123278 - DNA, 931 bp, Homo sapiens
  Payload ID: 4205
  Gene Symbol: CUTA
  Gene Name: cutA divalent cation tolerance homolog (E. coli)
  ENST ID: ENST00000461913
  CDS Start-End: 94-222
cacccaggtaagaagaggccgctcttcctggggttgtttctccgtgtgacgtgtggcctttgagatcaactctcctgtaccagcgtaggccgcatgagtggggggcgggctcccgcggtcctgctcggcggagtggtgagtgaccggccccgccccgccccttccggtcctcgaagcctcgaccgctacccgcaccctaaatcccagaggttggccccctgaggtgcctctctgctcctgtcttttgtttggatgccggcgctgctgcctgtggcctcccgccttttgttgctaccccgagtcttgctgaccatggcctctggaagccctccgacccagccctcgccggcctcggattccggctctggctacgttccgggctcggtctctgcagcctttgttacttgccccaacgagaaggtcgccaaggagatcgccagggccgtggtggagaagcgcctagcagcctgcgtcaacctcatccctcagattacatccatctatgagtggaaagggaagatcgaggaagacagtgaggtgctgatgatgattaaaacccaaagttccttggtcccagctttgacagattttgttcgttctgtgcacccttacgaagtggccgaggtaattgcattgcctgtggaacaggggaactttccgtacctgcagtgggtgcgccaggtcacagagtcagtttctgactctatcacagtcctgccatgatgagccctgttcctgctcatcatgaagatccccgcgatacttcaacgccttctgacttccaggtgatgactgggcccccaataaatcccgtctttgggtctctctgccttttgcctgttttttgtcatgtatgcaaatttgttgggagaatataagtgcttctagtccctgtattctctacatctttcagaatgactcagagctgcta

SEQ ID NO: 123279 - DNA, 658 bp, Homo sapiens; identical to SEQ ID NO: 123267
  Payload ID: 4205
  Gene Symbol: CUTA
  Gene Name: cutA divalent cation tolerance homolog (E. coli)
  ENST ID: ENST00000464657
  CDS Start-End: 1-335

SEQ ID NO: 123280 - DNA, 661 bp, Homo sapiens
  Payload ID: 4205
  Gene Symbol: CUTA
  Gene Name: cutA divalent cation tolerance homolog (E. coli)
  Uniprot ID: O60888
  ENST ID: ENST00000607266
  CDS Start-End: 91-561
tccggtcctcgaagcctcgaccgctacccgcaccctaaatcccagaggttggccccctgaggtgcctctctgctcctgtcttttgtttggatgccggcgctgctgcctgtggcctcccgccttttgttgctaccccgagtcttgctgaccatggcctctggaagccctccgacccagccctcgccggcctcggattccggctctggctacgttccgggctcggtctctgcagcctttgttacttgccccaacgagaaggtcgccaaggagatcgccagggccgtggtggagaagcgcctagcagcctgcgtcaacctcatccctcagattacatccatctatgagtggaaagggaagatcgaggaagacagtgaggtgctgatgatgattaaaacccaaagttccttggtcccagctttgacagattttgttcgttctgtgcacccttacgaagtggccgaggtaattgcattgcctgtggaacaggggaactttccgtacctgcagtgggtgcgccaggtcacagagtcagtttctgactctatcacagtcctgccatgatgagccctgttcctgctcatcatgaagatccccgcgatacttcaacgccttctgacttccaggtgatgactgggcccccaataaatcccgtctttgggtc

SEQ ID NO: 123281 - DNA, 1199 bp, Homo sapiens
  Payload ID: 4205
  Gene Symbol: CUTA
  Gene Name: cutA divalent cation tolerance homolog (E. coli)
  Uniprot ID: O60888
  ENST ID: ENST00000611509
  CDS Start-End: 621-1091
acggaaacgggcgtgccatttccgcgcacgtctgcagatgcggtagtcgattggtcaagtctcccatggctcctccttcatcaggaggtgggcaaaccgcgccatgatagggtcgggattggctggctctggaggcgcaggtggtccttcttctactgtcacatggtgcgcgctgttttctaatcacgtggctgccacccaggtaagaagaggccgctcttcctggggttgtttctccgtgtgacgtgtggcctttgagatcaactctcctgtaccagcgtaggccgcatgagtggggggcgggctcccgcggtcctgctcggcggagtggtgagtgaccggccccgccccgccccttccggtcctcgaagcctcgaccgctacccgcaccctaaatcccagaggttggccccctgaggtgtgagtgaaatgagcttttgctttattttccaagtttctctctcaccttcaggggcattcttcgggggtgcatcagagggagggcagagcctgaggatctaagcgaaggcttccccgggtgtaatttcctgggctgtttgtgaggagagatcgaattcgcctcctgctctcaggcctctctgctcctgtcttttgtttggatgccggcgctgctgcctgtggcctcccgccttttgttgctaccccgagtcttgctgaccatggcctctggaagccctccgacccagccctcgccggcctcggattccggctctggctacgttccgggctcggtctctgcagcctttgttacttgccccaacgagaaggtcgccaaggagatcgccagggccgtggtggagaagcgcctagcagcctgcgtcaacctcatccctcagattacatccatctatgagtggaaagggaagatcgaggaagacagtgaggtgctgatgatgattaaaacccaaagttccttggtcccagctttgacagattttgttcgttctgtgcacccttacgaagtggccgaggtaattgcattgcctgtggaacaggggaactttccgtacctgcagtgggtgcgccaggtcacagagtcagtttctgactctatcacagtcctgccatgatgagccctgttcctgctcatcatgaagatccccgcgatacttcaacgccttctgacttccaggtgatgactgggcccccaataaatcccgtctttgggtctctctgcc

SEQ ID NO: 123282 - DNA, 4313 bp, Homo sapiens
  Payload ID: 4206
  Gene Symbol: CTAGE1
  Gene Name: cutaneous T-cell lymphoma-associated antigen 1
  Uniprot ID: Q96RT6
  ENST ID: ENST00000391403
  CDS Start-End: 105-2342
agagcagccttggcgctacggaggagcctagggctaaccctcagccatacctggggctggtcctggagttgctacgcagggttgtggcagcactgactgaaggtatgagacccgattctcatccttatggttttccatgggaattggtgatacgtgcagctgttgctggattttttgctgttctcttcttgtggagaagttttagatcagttacgagtcggctttatgtgagaagagagaaaaagtttgctgtggcactttctggactaattgaagaaaaatgtaaactacttgaaaaatttagccttgttcaaaaagagtatgaaggctatgaagtagagtcatctttaaagaatgccagctttgagaaggaggcaacagaagcacaaagtttggaggcaacctgcgaaaagctgaacaggttcaattctgaacttgtgcatgaaatactctgtctagaaaaagagttaaaagaagagaaatctaaacattctgaacaaaatgaattgatggcggatatttccaaaaggatacagtcgctagaagatgagtcaaaatccctcaaatcacaagtagctgaagccaaaatgaccttcaagagatttcaagcgaatgaagaacggttggagatagaaatacaagatgcttggaaagaaaattctgaacttcaggaaagccagaaacagcttttgcaagaagctgaagtatggaaagaacaagtgagtgaacttattaaacagaaaagaacatttgaagactccaaagtacatgcagaacaagttctaaatgataaagaaaatcacatcaagactctgactgaacgcttgctaaagatgaaagatggggttgctatgcttgaagaagatgtaacggatgatgataacttggaattagaaatgaacagtgaatcggaagatggtgcttacttagataatcctccaaaaggagctttgaagaaactgattcatgctgctaagttaaatgcttccttaaaaaccttagaaggagaaagaaaccaaatttatattcaattatctgaagttgataaaacaaaggaagagcttacagagcatattaaaaatcttcagactgaacaagcatctttgcagtcagaaaacacacattttgaaagtgagaatcagaagcttcagcagaaacttaaagtaatgactgaattatatcaagaaaatgaaatgaaactctacaggaaattaatagtagaggaaaaatgccggttagagaaagaagagaaactttctaaagtagacgaaatgatcagccatgccactgaagagctggagacctaccgaaagcgagccaaagatcttaaagaatttgagaaaactattcatttttatcaaaagaagattattctccatgagaaaaaagcacatgataattggtcggcagcttggactgctgaaagaaacctcaatgatttaaggaaagaaaatgctcacaacagacaaaaattaactgaaatagagtttaaaataaaacttttagaaaaagatccttatggacttgatgttccaaatacagcatttggcagacagcattccccatatggtccctcaccattgggttggccttcatctgaaacgagagcttctctctatcctccaactttgttggaaggtcctctcagactctcacctttgcttccacggggaggaggaagaggctccagaggcccagggaatcctccggaccatcagattaccaaagaaagaggagaatcaagctgtgataggttaactgatcctcacagggctccttctgacgctgggcccctggcacctccgtgggaacaggactataggatgatgtttcctccaccaggacaatcatatcctgattcagctctccctccacaaaggcaagacagattttattctaattgtgctagactctctggaccagcagaactcagaagttttaatatgccttctttggataaaatggatgggtcaatgccttcagaaatggaatccagtagaaatgataccaaagataatcttggtaatttaaaggtgcctgattcatctctccccgctgaaaatgaagcaactggccctggctttgttcctccacctcttgctccaatcagaggtttattgtttccagtagatacaaggggcccgttcataagaagaggacctcctttccccccacctcctccaggaaccgtgtttggagcttctccagattatttttctccaagggatgtcccaggtccaccacgtgctccatttgcaatgagaaatgtctatttaccgagaggttttcttccttaccgtcccccaagacctgcatttttccccccagcccccacattctgaaggtagaatgagtttccatcagggttgagtccgacttcaaatgagcctgctgctgaacatccagaacgacagcaagaaacctaacaacatgtttgccctcttcaaaagtaattttgactgatctcattttcagtttaagtaactgctgttacttaagtgattacacttttgttcagattgaaacttaatggaactataattcccaggatagtattttgtaaatgaggatgatttaaatatgaatcttatgagtaaattatttcattttattttattctagatagtataacttttaatttgattaatccactattatataaagaatggtgggagctttatatatgtaatcttgcaggtggggaggctttaaattgtctttatgtcaagaactgtatttactgtggttgtagacaaatgtgaaagtaactttatgcttaaataagttttagttgattaaaaaaatttaaaaaatttaaaaaaagaaatatataaatatgcacaggtgggaaggtagaatactatgtaactgttagaatatttcactttaaaccaagatgatcttggatctcctgtcttatagattttatatcctctttcagtactttgagagtgtaaaacatttatagcagaaagtattcgtgtttcctctgttttcctcaagaatggtttcttcgccctccctttccttcccttcgtcttccctaagctaatttcttcctatgtttgtcatcatatcattacataattgtgttgttatttcttttgttttatttttatttggtgggaacaactttatccagaacttttacttgccccagaattatatagatcagtttctcctgacttctttcccaacctttacctctgttggtgttctaatagttttagttttatgttctgcttttctcttgctgtggcaaggggaaggagtaaatctaagatagtgcttaattgcagttggtgaatttgatctctgattgagctctcttctctggaattctgttaaaagatgaaatgtatcgtgttccctgagagacgccctcaaattttggattagtccttcatgcaagctgggccaccaagccattgcttcttttggggacaacctgccctcacttttaaaaagcatcctagctcacatgcctcccctagcagttaatgccactccagtctctgcttgaatgtaataaaataaaagaaaagtaactatttgagacatgaggtgcccttattgtacactggggcttcctatacattttccgtcttcccttgaaccaccactatcctcagctactttatgcttctgttctgttaaagccctatttgctagtggaaaaatttaactcctggtgatttttttaatactaggcctcttgccttccttccagtgagagaaaaatagaatggtaagcctagtggtttcttccttcactgttgaatactatttatccaaggtatcaaggaagaacttctaatcagaaaagacatgtattattttcacaactgggtagcatatctcactcccagaatggaagttaggtgggaattgcaagattaaggagatttttctggatttctgtctatgtatcatatccacagaactctttctagaggaattttatattgagccaggcatccatttccacagtcttgcatttctagatacttccaaagttatagcactgttcctaaatcatttttggctttatttattaatttattgttcacttcatttcattaggttcagtatgaaacaggtattgtcatctctttgtgtctactttgccacctttccccagaataggcctgaatgagattgaaaacgttacttcagttccttgtgtctgacattgcttgtttgtaactaagaaaaataatatttgcttttgttgaatgactactaatttttttccatgaacctaataaactaaaaagaaagttgaaataataaagagtgaataagtataaaaa

SEQ ID NO: 123283 - DNA, 1267 bp, Homo sapiens
  Payload ID: 4206
  Gene Symbol: CTAGE1
  Gene Name: cutaneous T-cell lymphoma-associated antigen 1
  Uniprot ID: Q9HC47
  ENST ID: ENST00000525417
  CDS Start-End: 14-238
ctaatttcttcctatgtttgtcatcatatcattacataattgtgttgttatttcttttgttttatttttatttggtgggaacaactttatccagaacttttacttgccccagaattatatagatcagtttctcctgacttctttcccaacctttacctctgttggtgttctaatagttttagttttatgttctgcttttctcttgctgtggcaaggggaaggagtaaatctaagatagtgcttaattgcagttggtgaatttgatctctgattgagctctcttctctggaattctgttaaaagatgaaatgtatcgtgttccctgagagacgccctcaaattttggattagtccttcatgcaagctgggccaccaagccattgcttcttttggggacaacctgccctcacttttaaaaagcatcctagctcacatgcctcccctagcagttaatgccactccagtctctgcttgaatgtaataaaataaaagaaaagtaactatttgagacatgaggtgcccttattgtacactggggcttcctatacattttccgtcttcccttgaaccaccactatcctcagctactttatgcttctgttctgttaaagccctatttgctagtggaaaaatttaactcctggtgatttttttaatactaggcctcttgccttccttccagtgagagaaaaatagaatggtaagcctagtggtttcttccttcactgttgaatactatttatccaaggtatcaaggaagaacttctaatcagaaaagacatgtattattttcacaactgggtagcatatctcactcccagaatggaagttaggtgggaattgcaagattaaggagatttttctggatttctgtctatgtatcatatccacagaactctttctagaggaattttatattgagccaggcatccatttccacagtcttgcatttctagatacttccaaagttatagcactgttcctaaatcatttttggctttatttattaatttattgttcacttcatttcattaggttcagtatgaaacaggtattgtcatctctttgtgtctactttgccacctttccccagaataggcctgaatgagattgaaaacgttacttcagttccttgtgtctgacattgcttgtttgtaactaagaaaaataatatttgcttttgttgaatgactactaatttttttccatgaacctaataaactaaaaagaaagttgaaataataaagagtgaataagtataaaaatc

SEQ ID NO: 123284 - DNA, 4313 bp, Homo sapiens; identical to SEQ ID NO: 123282
  Payload ID: 4206
  Gene Symbol: CTAGE1
  Gene Name: cutaneous T-cell lymphoma-associated antigen 1
  ENST ID: ENST00000634260
  CDS Start-End: 105-2342

SEQ ID NO: 123285 - DNA, 1267 bp, Homo sapiens; identical to SEQ ID NO: 123283
  Payload ID: 4206
  Gene Symbol: CTAGE1
  Gene Name: cutaneous T-cell lymphoma-associated antigen 1
  ENST ID: ENST00000634570
  CDS Start-End: 14-238

SEQ ID NO: 123286 - DNA, 727 bp, Homo sapiens
  Payload ID: 4207
  Gene Symbol: CUTC
  Gene Name: cutC copper transporter
  ENST ID: ENST00000370472
  CDS Start-End: 294-727
gtccgggaaggccggtgcggaaggtggcgggggaggggacggtcggccgaaggctccccggggcgggccggcgggagtcgtagtcagtggtgatttcttctggagtcgtttcctcagctccttccagccccttgggcggcaccttctatctttgaggcgttaaaggagcagcaaatggatttctcatggaagtttgtgttgattcagtggaatcagctgtgaatgcagaaagaggaggtgctgatcggattgaattatgttctggtttatcagaggggggaactacacccagcatgggtgtccttcaagtagtgaagcagagtgttcagatcccagtttttgtgatgattcggccacggggaggtgattttttgtattcagatcgtgaaattgaggtgatgaaggctgacattcgtcttgccaagctttatggtgctgatggtttggtttttggggcattgactgaagatggacacattgacaaagagctgtgtatgtcccttatggctatttgccgccctctgccagtcactttccaccgagcctttgacatggttcatgatccaatggcagctctggagaccctcttaaccttgggatttgaacgcgtgttgaccagtggatgtgacagttcagcattagaagggctacccctaataaagcgactcattgagcaggcaaaaggcaggattgtggtaatgccaggaggtggtataacagacagaaa

SEQ ID NO: 123287 - DNA, 1346 bp, Homo sapiens
  Payload ID: 4207
  Gene Symbol: CUTC
  Gene Name: cutC copper transporter
  Uniprot ID: Q9NTM9
  ENST ID: ENST00000370476
  CDS Start-End: 130-951
gctggggcgtaggtgtcggggacgcgcgcacgggcgcgcgcagctgttgacgcgcttcttagctggtgcgcgccggagcccaaattccaagtggaaactgcaggcgcacgagggaggaacgcgtggagcatgaaaaggcagggggcctcctctgagcgaaaacgagcgcggataccgtccgggaaggccggagcagcaaatggatttctcatggaagtttgtgttgattcagtggaatcagctgtgaatgcagaaagaggaggtgctgatcggattgaattatgttctggtttatcagaggggggaactacacccagcatgggtgtccttcaagtagtgaagcagagtgttcagatcccagtttttgtgatgattcggccacggggaggtgattttttgtattcagatcgtgaaattgaggtgatgaaggctgacattcgtcttgccaagctttatggtgctgatggtttggtttttggggcattgactgaagatggacacattgacaaagagctgtgtatgtcccttatggctatttgccgccctctgccagtcactttccaccgagcctttgacatggttcatgatccaatggcagctctggagaccctcttaaccttgggatttgaacgcgtgttgaccagtggatgtgacagttcagcattagaagggctacccctaataaagcgactcattgagcaggcaaaaggcaggattgtggtaatgccaggaggtggtataacagacagaaatctacaaaggatccttgagggttcaggtgctacagaattccactgttctgctcggtctactagagactcgggaatgaagtttcgaaattcatctgttgccatgggagcctcactttcttgctcagaatattccctaaaggtaacagatgtgaccaaagtaaggactttgaatgctatcgcaaagaacatcctggtgtagccagacctctctgagagacatggatatcacaggatgaaggtagaactataatctgcaattctctatgacacagctttaaccttcttctctggccaggacagtcgcaatctttgttttaagtttcacatggccatggagaatgtgcccaagaagaaaaagaatttgaaacagagatacagtcacttcctttgcttagtcttaccagtgattgtcatcatggttaaagctggtctgtgcttcttccatagacagaagcttagtctgttttcagtggaattaattgatgaactgggaaaattttaactgcatggtatgaattcagagtgtgacttaagggtcaattcaaagcagtattttgacttttcatttgtaaaataaaaatttccactattaca

SEQ ID NO: 123288 - DNA, 831 bp, Homo sapiens
  Payload ID: 4207
  Gene Symbol: CUTC
  Gene Name: cutC copper transporter
  ENST ID: ENST00000471520
  CDS Start-End: 69-653
gctggtgcgcgccggagcccaaattccaagtggaaactgcaggcgcacgagggaggaacgcgtggagcatgaaaaggcagggggcctcctctgagcgaaaacgagcgcggataccgtccgggaaggccggagcagcaaatggatttctcatggaagtttgtgttgattcagtggaatcagctgtgaatgcagaaagaggaggtgctgatcggattgaattatgttctggtttatcagaggggggaactacacccagcatgggtgtccttcaagtagtgaagcagagtgttcagatcccagtttttgtgatgattcggccacggggaggtgattttttgtattcagatcgtgaaattgaggtgatgaaggctgacattcgtcttgccaagctttatggtgctgatggtttggtttttggggcattgactgaagatggacacattgacaaagagctgtgtatgtcccttatggctatttgccgccctctgccagtcactttccaccgagcctttgacatggttcatgatccaatggcagctctggagaccctcttaaccttgggatttgaacgcgtgttgaccagtggatgtgacagttcagcattagaagggctacccctaataaagcgactcattgagcaggaggtggtataacagacagaaatctacaaaggatccttgagggttcaggtgctacagaattccactgttctgctcggtctactagagactcgggaatgaagtttcgaaattcatctgttgccatgggagcctcactttcttgctcagaatattccctaaaggtaacagatgtgaccaaagtaaggacttt

SEQ ID NO: 123289 - DNA, 13747 bp, Homo sapiens
  Payload ID: 4208
  Gene Symbol: CUX1
  Gene Name: cut-like homeobox 1
  Uniprot ID: P39880
  ENST ID: ENST00000292535
  CDS Start-End: 39-4556
ccgcggcgccgggacagccccgggactctgccaggtggatgttgtgcgtagccggagccaggttgaagagagaactcgatgccaccgcaacggtattggcgaaccggcaggatgaaagtgagcagtccagaaagcggcttatcgaacagagccgggagttcaagaagaacactccagaggatttgcgcaagcaggtagcgccgctgctgaagagtttccaaggagagattgatgcactgagtaaaagaagcaaggaagctgaagcagctttcttgaatgtctacaaaagattgattgacgtcccagatcccgtaccagctttggatctcggacagcaactccagctcaaagtgcagcgcctgcacgatattgaaacagagaaccagaaacttagggaaactctggaagaatacaacaaggaatttgctgaagtgaaaaatcaagaggttacgataaaagcacttaaagagaaaatccgagaatatgaacagacactgaagaaccaagccgaaaccatagctcttgagaaggaacagaagttacagaatgactttgcagaaaaggagagaaagctgcaggagacacagatgtccaccacctcaaagctggaggaagctgagcataaggttcagagcctacaaacagccctggaaaaaactcgaacagaattatttgacctgaaaaccaaatacgatgaagaaactactgcaaaggccgacgagattgaaatgatcatgacggaccttgaaagggcaaaccagagggcagaggtggctcagagagaggcggagaccttaagggaacagctctcatcggccaatcactccctccagctggcctcacagatccagaaggcaccagacgtggagcaggccatagaggtgctgacccgctccagcctagaagttgagttggccgccaaggagcgggagatcgcacagctggtggaggacgtgcagagactccaggccagcctcaccaagctgcgggagaattcggccagccagatctcacagcttgagcagcagctgagcgccaaaaacagcacactcaaacaactggaagaaaaactcaaaggccaggctgactatgaagaggtgaagaaagagctgaacattctgaagtccatggagtttgcaccgtccgagggcgctgggacacaggatgcggccaagcccctggaggtgctgttgctggagaagaaccgctcgctgcagtccgagaacgccgcgctgcgcatctccaacagcgacctgagcgggtcagccaggaggaaagggaaagaccagcctgaaagtcggcgcccgggatctttgccggccccccctccttctcagttgccccgcaacccgggggagcaggcttccaatactaatggtacacaccagttctcaccagcggggttaagtcaagactttttcagctcatccctggcaagccccagcctacccctggcttctacaggaaaatttgcactaaactctcttctccagcggcagctaatgcagtccttctactccaaggctatgcaggaagccggaagcacaagcatgattttttcaacaggtccatacagcacaaactccatatcttcccaaagtccattacaacaaagcccagatgtcaatggcatggccccatcccccagccagtcagaaagtgctgggagcgtctccgagggcgaggagatggacactgcagaaatcgcccggcaggtcaaagagcagctgattaagcacaatatcggacaacgtattttcggacattatgtgttgggactgtctcaagggtccgtgagcgagattctggcccggcccaagccatggaataaactgactgttcgtggcaaggagccatttcacaagatgaaacagttcctctccgatgagcagaacatcctggccctccgtagcatccaaggcagacaaagagagaatccaggccagagcctgaacagactatttcaggaagtaccgaaacgaagaaatgggtctgaaggtaacatcaccacccggatccgagcctcggagactggctctgatgaagccatcaagtccatcctagagcaagccaagagggagctccaagtgcagaaaactgcagagccggcccagccttcctccgcatccggcagcgggaactctgatgacgccatccgctccatcctgcagcaagcccgccgggagatggaggcccagcaggctgccctcgaccctgccttaaagcaggcaccactgtcccagagtgacatcaccatcctcacccccaagcttctgtccacctcgcccatgcccaccgtgtccagctacccacctctcgccatctccctgaagaagccctccgcagctcctgaggccggtgcctctgctctgccgaaccccccggccctcaaaaaggaggcccaggacgcccccgggctggacccccagggagcagccgattgtgcacaaggggtcctgagacaggtgaaaaatgaggtgggccgcagcggtgcctggaaggaccactggtggagcgcggtgcagccggagagaagaaatgccgcctcctccgaggaggccaaggccgaagaaacgggcggcgggaaagagaagggcagcggtggcagcggaggtggcagccagcctcgggccgagcgcagtcagctccagggaccctcgtcgtcagagtactggaaggagtggcccagcgctgagtccccatactcccagagctcagagctgagtctgaccggggccagccgcagcgagacaccacagaacagccccctgccatcctccccgatcgtgcccatgtccaagcccaccaagccctcggtccccccgctgacccccgagcagtacgaggtctacatgtaccaggaggtggacaccatcgagctcacccggcaggttaaggaaaagctggccaagaacggcatctgccagagaatcttcggggagaaggtgctgggcctgtcccagggcagcgtcagcgacatgctgtcccgaccgaagccatggagcaagctgacgcagaaaggccgagaacccttcatccggatgcagctctggctgaacggcgagctaggccagggtgttctacccgtccagggccagcagcaagggccagtcctccactccgtgacatcgctccaggacccgctgcagcagggctgtgtgagctcagaaagcactccaaagacctccgccagctgcagccctgcccctgagtccccgatgagttccagtgagtcggtgaagagcctgaccgagctggtccagcagccctgtccccccatcgaggcgagcaaggacagcaagccaccagagcccagtgacccgccagcatccgactcccagcccacaaccccgctgcctctctccggacactcggccctcagcatccaagaattagtagccatgtccccggagctggacacctacggcataaccaagcgggtgaaggaggtgctgacggacaacaacctcggccagcgcttatttggggagaccatcttagggctcacccaaggctctgtctctgacctccttgcccgccccaaaccctggcataagctcagtctgaaaggacgagagcccttcgtccggatgcagctgtggctgaacgaccccaacaatgtggagaagctgatggacatgaaacggatggagaagaaagcctacatgaagcggcggcacagctcagtcagtgacagccagccctgcgaaccgccctctgtcggcaccgagtacagccagggcgccagcccccagccccagcaccagctgaagaaaccccgggtggtgctggctccggaggagaaggaggcgctgaaacgagcgtatcagcaaaagccatacccgtcaccaaaaaccatcgaagacctcgccacccagctcaacctgaaaaccagcaccgtcatcaactggttccacaactacaggtctcggatccgcagagaactgttcattgaggaaattcaggccgggagtcagggccaggcgggcgccagcgactcaccctcggcccgcagcggccgggcggcgcccagctcggagggcgacagctgcgacggcgtggaggccactgagggcccaggcagcgccgacaccgaggagcccaagtctcagggagaggccgagcgggaggaggtgccgcggccggcggagcagacggagccgccgccctcggggaccccgggcccggacgacgcccgcgacgacgaccacgagggaggccccgtggaaggcccggggcccctgcccagccccgcctccgcgaccgccaccgccgcgcccgcggcccccgaggacgccgctacctcagccgccgccgcgccgggggagggccccgcggccccgagctccgcgccgccgcccagcaacagcagcagcagcagcgccccccgcaggcccagctcgctgcagagccttttcggcctccccgaggccgcgggcgcccgggactcgcgcgacaaccccctgcgcaagaagaaggccgcgaacttgaacagcatcatccaccgcctggagaaggccgccagccgggaggaacctatcgaatgggagttctgaggggccgcggccctggggcgggcagccaggctgggccgcaagggcctggacggggtcggacggggcaggcgctgcggacaccgtggcctgggcttggcccgcggcctgcaccgaccccgggccggacctgagcccgcagcccagaccccctccacggtccgcggcctgcaccgacccgaggcccagatccaaggccgcggcccagacccactctgcggcccgggccgaccctgcggcctccaccaaccccgcggcccagacccagcccgcggcctggacccctggaccgctttgcgcacttaccgccctgcgggccacagggcaaaatcgccataggccaaggtgcatatagaaaacaaaggagcattaagcccaatctatgtcgtgttttcaaggaagaaaacggaaatgtgtggtcgagcttttttgtaccctgaagtgttttttttattgccctaagtgatttccacaggttctggaataactcttacagctttgccttgtgtcctcctgttccgtgtgggctttaaaagaaaaaaaatcaaacccacatattaaaagggggctttttatctgccatctaatggcttcagagcgataatacactattatcttcttaaaccaggaaaaaataaaagggggggtgggatttttcagaaaaattaaaaaagaaagtttttgtagctgttcagttgccactaagagattgcacagtcaaaacgactctaaacacactagtttggattcctaaatattttcaagaaaagaatcttctcgtttgaaactttgaattaaaataaaacacatttactccacatattttttaacaaaaagaaaacgtcacatcaggaaactctgattttgtggtagctgacatagtgttttcttgtacgtgaatagaatcctgacatgtagtgcacattgatgtatagctttaactgaccctgggttttgcagaccagggtttgtttaatacactccattctaggccaaatcaggacaaaaaaaagaaaaaaaaagaaaaaaaaaaaagaaaagatccgaatctaggtattttataatctgctttttaacctctaaccgcagagcacgctgatcagacctcatatcttggaggtttaggagacaagttagaactgtagcatgtacctgttaattttgtttaatttatggtgtctcaatctgtctgtgcgtctgcacgtgtgcaagcattgaaagaaaggagagagtagtccgggcgagcacagcaggcagttccagggccagacgggcccatccccaagtagatagcagtctacggatctctctctggcacagaaggcacctcacctcacaccactctcctggatacctgatgaactgagccctcccaggggaagacactccccaggcctgggcagggcttacacgcgcactctctctcttctttccctttttcttcccaccgcaagcactgatgaccctgttgaactcgtgggaaacttcctttctctgcaggagagagaacgtggcattctgggctccccactcccatccctgtagaaatggcccaaactcacaccaaaacgtggatgctcttcaacttccaaacctaccatttgcccttctttcatttcgcctcttagttctttttatgcacagttttagggcagtctaagtacaaactgaaagtctaacttgtctctgattcctcccttgtctatgtgtatatgcgtgagaatagaggcgggtgagagtgtgcgtgcgtgtgcgtgtgtgcaattttatacgtctgtgtattttcttaagtacctgtgcacacgtagagtgcattactgccacctttttcaataagctgttttatcagttacggcttctacaagtttgctaatttagacttctttattgccatatctttaaactaacaatagatgatttcggtatatatatatatttttttttgcttatttataggtgctgtattttattatctgattgttaggaagggatgaaaggggcaaatattctttagagggatagactgccggcagtattgggtataatttacaagatgtagttgtcatactgtatattactgattgaaaactttttgaccgtattgtgtatcattgaaacctttgtcttaggtcaacatctttggatgacattttaatggtgcattcattatttcttaagtttaattaatattacttttttttttatttggggggtgggagggagttataattttaaaggtatgctctggctgttccacctccgtgtgcttgttaattaacttgtaggactttgactgtaagatgtgaaaccacgtttcttgcatgatgttttagagattatttcatttacagtcttttaacctgcagctgcagcacttagttcacgttttcacaaatttcaagagtcactacactaaagacaatgccttttcatgaataagaagttttcagaaggctctagggggctgggaggcaggctgttcgtttgtcttttgttgggggtatcatttctgaacttgaaatccagttcagggagaagagaattcaaaattagaggagcttaaggggacacgggtcaacatctagctcgattcaggtgcattgagaagagtgagttcacatcggtgacccttaggacagtgagtggcagagccctgacgactgtggtgtcctctccacaaaaccctcaagggacttttgtcatcatgtgtgatgaatctttaaatatcgtctaattttcataagaatgaaaagaagttaacaggaaatagtaggctagggtttagttttaaaggcatgactgttatttacaaaggtgttaaatctgaggaaattgacaaatacagatttgtccattctagtggccaaacagtaacagtctaaaatgcagtcattttgaccctcccaagcaatttagtcatatgtgttgttttctcttttctgtttttacttcttagatttttaactaggttactgttggttcccattctgtcttttttgccagacttacatctggtgccagatacaatcagttggttaaattttgcttgcagttctgtgtattttttttcctctattatttatttttttaaaaaaaatagagatcctaaccttagatctttgatgtgaagctagcactgtctgtaatacttctaagagctgccactaaaataatacagcaatccgtggccaggggagcaccccctcctggttgggcccctcagttggagtctaagggttaatctctcatcttgctaagcagtattcaagtgccttgaacagtgtcccctcggcatggctccccttcagcaggctggcattccaagcagtggcccccgcaggcagccgacccccttcctcttcacgctctatgagtttaaaaagctgatttgtacctctcccctgggggaaacggttccatataaaacactaacacttaattacaagctccattatgccattttaaatggcttctttttgttaattggaggcattgttcataacttaaggcttttgccattaacttagctggctaagcagaggctcggggtaaaatcagtgtttgcatttagcctcttgacccggagttccggcccaagctcccttgtgatagccgagatggcaggtgtgtgagttctgtcctagacctgtgcccaactcacttccaccccagaggagtcttctgtcctcctccccaacccccgagctccctggtaacctcctcttgaacttctgtatcagtgaagacatctgtggtttctgctcaccagacctctctttagaaagggttatcagagccatggagcttagctcaattggattcttctagacgatcttaggaggcatcttggcatgaggcagcttctaagcgtctcctgggacaggattggggtgacagcccagggatgcatgcatgggagaactctctgagaaatgccaggatcgtggctcacagggacccaccatcaaaacctgctactttgtgcaagtaattgaggcaaaagataccagtcgacagcctccctggggtagatcccttgtacctccaaagtacaaatacctccctgctcagtttccttcctgtcgccatctttgttttcttcccattgaaaaaccatcctgtctgatgtggacgttcaggtctgctggttggcggtccgggcccagagtgcagcagagctctgggttaaatattcctttctggccaccgcccaagcccaggtggccagctctcataccccatctccctccttggccagggccagcatcaggcgtgcagctcatgaccagtttacacaggctgcaaagagatcgctgtgggcctcggctgactactttaagattatgccacagccaggccctaaaaagagaggggaacaggagtccccaggtgagctctctgacgggcaggtgccttcccgactaaggttggactggatgactttgttcctcctgcatgcatgtcctttgatgcaagggtgatcaatgaactctgttgacattctatgcaatgtttttcattcctctgattttagcaaagcaaatcttactgaaaaatagcagagccaggggaacagacgcatgtccttctgggagtcacacaaaagcagagagattttgaactgaggggcgacagcctttgccttaaatgcagtatgacaggcgcttcttggcagaccagtaaaaacaaaagcccatagaccttactcatcccaaggccgacaagccagctgtacagggcgagatgtagcaacacggggcatgagcggtgggcgtgctgggctatttgctgtggtactttaggctggaggtttggctcctgtgctgccggtggggggccctgtccctccccagatgtcctccctcttcttcacactcctcattgtcccttctacctcactaacctgtcttctccatctgatgtcacccagaaccacaccccacagaactgtgaggcacgtgggctggagagagcagaaaagctgccagcgcagcagacacgaacatccctctgcctggtgggccggctttgtgtgtctctccttttgtgagcgcaacacggacaaacagctgtgctctgcaaggcacacggatgtttcccttccacctgttcccaaagctccagcagctgtttcttttgcaggcagggcgtggtctcggggctccgagggtcttgtctttggtccgccttcctttctgtccagtcctgctcagctgttaagatccatcatggccattatccttgtcccggactgccccaaagttcccagctggctttggggaacactgtagctcttgggtgtctcttgtctctggcatggttttagcgtcactgcgaacactcctttgcaaacatcaaacatctcaaagacggaaaaggatagatggcttcctccagcctacacgccccgtccacagtggcatcaccctcttatcccaaaagaatatgccagttcccatccagcaccgaagaaaatcagctcctggggctggtggttggaggtgggtctgtccactgtgggggccaaagtgttcccctgctggagacagtttgcaagtaagaacctaaggatggggacagcatcctgtgcttgggcattgaccagccaaagctcacatttagaaagccctcagtgcttctgtggtttcacctgggcatcgacgacattagggaagcctttgtgaccacaagggcagggcttgtgccctgagtggcgaggtggtgacctgaggccagtgtgatgtggttggatctcagcgtgtactgaatgccagtctggccggcacactcgaacgctaagagaatggtccaatttgatgatcttatttctatttcgatcaggttttgactttttgtagatgaaaactaccagggaaaaggggaagcaggtacccaataaagtttagaaagatccagtctgtgaaacccttagagatgggctgaaagttaagtccaccaacccttgggcttaatcaggacggaagaggagggggtgtggggggcagagcgtaaaacaagccccagccctactcccggccccccagcccagtcttcccaatcccagaggccccggcggcctgtgctcctcaccaccctggtcaggggaatagaaggaaatgcaatttccgcctgtctgcccgacttccaaaaactgcctcctcctgcccaggcctctcccaccaccaccttccctccaaagataaccgtgtccatgccatccgtggcatcatctcgagttttcatttttggatgaagtgacatttagctttaacaagacatttccaaagcgcctagtctcctccaaaatgctaactttaaaagttgggcattgtaggcgaaaaatcccaaaaaaaaaaaaagacaaaaaaaaaaggctggcgagagaaagacatttggctatgcataaatgtgcacttcccccatgcccccgttcttaaactcttaagatgcctttgagttgcttttcatgaatccttttagtttacccgataatgttaagaaagcattagtctacgttactgtaatttctgtagtgtttacgctttaatttctaccacaaaatatgctatatgctatgtatcaagctttctgtaatcagaaagaaaaggtgccttatatcccaatgtcacggctacatccctatggaaattaatcagaagcacagtgtgtacggaagcattgggacttctgctggtgaaacaagagaccattcagcaagacacattgaagtggcacggagctgcttttgttttataattcttttttccccccttttccttcttcttttttattattttattattttttttgtactttgctttaaacggaaagcacttaaatagatgactatgtgtaaaagctctgtgcaattgaaatcatttttcttcattttaaaaaaataacgtattgcacaccaaatgaactcaaagtaagctttagaccaggacgattcaggttatgaatgagtttgttcactgtagttccgtttgttcatgaaccgaagggaaaacaggcctccccgactccctccagtctcccagcctgcctcttggtgaccactgtgctgggcgtgcagggcccgcgggctctggccggagccgctggcctgacgaggcaggatagggagtatccgtgattcagaagctgagacccttccccagtgtctgaggccacagccatcccttccagcacttaatcttgtcttgttgaaatggactgactgctactgacctgccggcgtgcgtgagggtgattataaaaggatgtttccttgagaaaaaaaaaattatttctatcctcttctatttattattaggttaatcatttaagtacttatcaggagtgtattgttattttgtgttttgttgtcataaatgctttttgctgtcactctagtggttactatcctctgccttcctctcctcccctactcccccagagaaccaaggcgtctgggggattgactggggggcagagggggtttccccagcaaaatcaaacacctgtctccagagtagccactcaaaaactggtggtctctatgtgtctaactttttaaatgagagtgtttatgaacaaaaaaatttaccaacgtgtgagggagttgctgagttgaagaatgctcgcttgaggagcttcagaggaatcttagcaaagccaagttcagttccccaaagcctcctagagcctctggtaagacttctgggttcatgaagtttcggcgagccgtggtcagagagggcgcggtggcctggccaagactttacctccaagcgagagagtgatttcttgcaaggcccgcatgggttgatacgttttggttggttttttgttgttgtttttcttgcgtacaaagttggtcaaaaccatctttcaaagcaacagtgttttgtagtaccaggctgtggcttgagggctcacctaggagatcataggcagagggcccctttcccctataggtggttcaacgtggaggaaggttgggtgtggagattgcttgctgtggccccaagctcagccagcaggacacccagttgttgccaatcaggtgtgaaggtgaggcgccctgccttgatcccatgggcccagcagaaggaaacttaccccaggccaaggcaagggccctgctcaccccaaggtaggctgggaagagcatctctttccatatcatcacctccccttctccaagattgccgggggccctgattttgttctctctttgaaagaaaccctccaccgaaacaatggtccccatctccccagaagcctttttttttttcatttttctctaattagtctatgcatttctctctctcaaaccatcttctgcctcttcccttgagaaaacgggcatctcacgtacccccatctgagacctcttggaaaaaaaaaatcccgtgtattctggagatgtgagaattcacccaaaattcttaaaacattggagaatagcttgttataaaataaaagtgggggtaaaaagaaggtggttttccccacatccctttgcattgaataagagacctagttctttgcgtttgtgcaataactctttgctgcttgccttgagagcgggtagcaccacgctcctgtccagactactaacagcacaagacgcactcacagggtggcggaatcttccggaaaactctctataagctcagctccccccaccccacccccactctagcgttttgtcacgtcttacattttagcagtattttatattttctgtaacgcaccaagtcttagatctttctagagcttgtttgttcatcctcacaatcacagatttttttctccaatcctcacagagacccaattgaccaaaaaagaaaaaaggaaaaaaaaaaagtcgtcttttttttttttttttgtacaaatcgctttgagatgcctctggtgtgttgctgtgtgacatctctctggtaacattttatttcttgctatttgtttttctacattaagagtcaaagttgacctggctggcgtgggggtgggggaggcacccgtcggccccttggtgttgtccctctgtctttggttagccatacgatgtttgttctcagcactgtacaacggtccctatataatacggagaagcaatatcactgtatgagactcacaccatgtattattattcactagcaccctaggtgtgataattgaagtaaatatcttttatacaaacacaa

SEQ ID NO: 123290 - DNA, 2930 bp, Homo sapiens
  Payload ID: 4208
  Gene Symbol: CUX1
  Gene Name: cut-like homeobox 1
  Uniprot ID: Q13948
  ENST ID: ENST00000292538
  CDS Start-End: 27-2063
ctcactccgtctcaatatgtctcaagatggcggccaatgtgggatcgatgtttcaatattggaagcgctttgatttacagcagctgcagagagaactcgatgccaccgcaacggtattggcgaaccggcaggatgaaagtgagcagtccagaaagcggcttatcgaacagagccgggagttcaagaagaacactccagaggatttgcgcaagcaggtagcgccgctgctgaagagtttccaaggagagattgatgcactgagtaaaagaagcaaggaagctgaagcagctttcttgaatgtctacaaaagattgattgacgtcccagatcccgtaccagctttggatctcggacagcaactccagctcaaagtgcagcgcctgcacgatattgaaacagagaaccagaaacttagggaaactctggaagaatacaacaaggaatttgctgaagtgaaaaatcaagaggttacgataaaagcacttaaagagaaaatccgagaatatgaacagacactgaagaaccaagccgaaaccatagctcttgagaaggaacagaagttacagaatgactttgcagaaaaggagagaaagctgcaggagacacagatgtccaccacctcaaagctggaggaagctgagcataaggttcagagcctacaaacagccctggaaaaaactcgaacagaattatttgacctgaaaaccaaatacgatgaagaaactactgcaaaggccgacgagattgaaatgatcatgacggaccttgaaagggcaaaccagagggcagaggtggctcagagagaggcggagaccttaagggaacagctctcatcggccaatcactccctccagctggcctcacagatccagaaggcaccagacgtggagcaggccatagaggtgctgacccgctccagcctagaagttgagttggccgccaaggagcgggagatcgcacagctggtggaggacgtgcagagactccaggccagcctcaccaagctgcgggagaattcggccagccagatctcacagcttgagcagcagctgagcgccaaaaacagcacactcaaacaactggaagaaaaactcaaaggccaggctgactatgaagaggtgaagaaagagctgaacattctgaagtccatggagtttgcaccgtccgagggcgctgggacacaggatgcggccaagcccctggaggtgctgttgctggagaagaaccgctcgctgcagtccgagaacgccgcgctgcgcatctccaacagcgacctgagcggacgctgtgcggagctgcaagtccgtatcactgaggctgtggccacagccactgagcagagagagctgatcgcccgcctggagcaggacctgagcatcattcagtccatccagcggcccgatgccgagggtgccgctgagcaccgcctggagaagatcccagagcccatcaaagaggccactgccctattctacggacctgcagcaccagccagcggtgccctcccagagggccaggtggattcactgctttccatcatctccagccagagggagcgcttccgtgcccggaaccaggagcttgaggccgagaaccgcctggcccagcacaccctccaggccctgcagagtgagctggacagcctgcgcgccgacaacatcaagctctttgagaagatcaagttcctgcagagctaccctggccggggcagcggcagtgatgacacggagctgcggtactcgtcccagtacgaggagcgcctggaccccttctcctccttcagcaagcgggagcggcagaggaagtacctgagcttgagtccctgggacaaggccaccctcagcatggggcgtctggttctctccaacaagatggcgcgcaccatcggcttcttctacacactgttcctgcactgcctggtcttcctggtgctctacaagctggcatggagcgagagcatggagagggactgtgccaccttctgcgccaagaagttcgctgaccacctgcacaagttccacgagaatgacaacggggctgcggctggtgacttgtggcagtgataccccggggcctcccccgtgacagtgacggctgcgcctccaccccgactgctcagtgcatctaatcacttagactcccctgaagaatcccccatggaaactgcccttatccgctgtccagcagctgccagaggccccaggtcacctcgggtccccttgaaagaatgtctcggtcacatcaggcccgctaggtccagagagcgagcccccaatgcccggccaggctaagccgcagagaccctctcagcccccacctcaggttagggctctgcccgcagcctgacctctagccctggtggcagaggtccctcagctgcgaggctaattgggtgaccaccgattccagctgcggttaatccagcttgggcctgtctgcactgcgatcctcttgggctctcctaggatccccccatgccccgtaagaggtggaagacgcttccttccaggacagcaggctttgagtccagcacccccagcctgcctttgccaccagccccaccctgcagagtatatgaggcttgacagagtctgccccctcccccactgcaccccaagagagagagccccagccagcggaacagtttctattaccccctccctgcccccagacccatgtgatttctgctttcttctttagcaagatattctggtttctagataaggaagagtctctaatgagcccccgagccccagtctcttcagactcatggattggtatgaggggtctgaacgtctcctagccaatcagaactggctgtggaccaccctagcacggccacctctcagggccactggcaggccttcctgagttagatttgtagttgcatatttagctttgcacatttgaaataaaccacggttgcagcc

SEQ ID NO: 123291 - DNA, 13762 bp, Homo sapiens
  Payload ID: 4208
  Gene Symbol: CUX1
  Gene Name: cut-like homeobox 1
  Uniprot ID: P39880
  ENST ID: ENST00000360264
  CDS Start-End: 21-4571
ccgtctcaatatgtctcaagatggcggccaatgtgggatcgatgtttcaatattggaagcgctttgatttacagcagctgcagagagaactcgatgccaccgcaacggtattggcgaaccggcaggatgaaagtgagcagtccagaaagcggcttatcgaacagagccgggagttcaagaagaacactccagaggatttgcgcaagcaggtagcgccgctgctgaagagtttccaaggagagattgatgcactgagtaaaagaagcaaggaagctgaagcagctttcttgaatgtctacaaaagattgattgacgtcccagatcccgtaccagctttggatctcggacagcaactccagctcaaagtgcagcgcctgcacgatattgaaacagagaaccagaaacttagggaaactctggaagaatacaacaaggaatttgctgaagtgaaaaatcaagaggttacgataaaagcacttaaagagaaaatccgagaatatgaacagacactgaagaaccaagccgaaaccatagctcttgagaaggaacagaagttacagaatgactttgcagaaaaggagagaaagctgcaggagacacagatgtccaccacctcaaagctggaggaagctgagcataaggttcagagcctacaaacagccctggaaaaaactcgaacagaattatttgacctgaaaaccaaatacgatgaagaaactactgcaaaggccgacgagattgaaatgatcatgacggaccttgaaagggcaaaccagagggcagaggtggctcagagagaggcggagaccttaagggaacagctctcatcggccaatcactccctccagctggcctcacagatccagaaggcaccagacgtggagcaggccatagaggtgctgacccgctccagcctagaagttgagttggccgccaaggagcgggagatcgcacagctggtggaggacgtgcagagactccaggccagcctcaccaagctgcgggagaattcggccagccagatctcacagcttgagcagcagctgagcgccaaaaacagcacactcaaacaactggaagaaaaactcaaaggccaggctgactatgaagaggtgaagaaagagctgaacattctgaagtccatggagtttgcaccgtccgagggcgctgggacacaggatgcggccaagcccctggaggtgctgttgctggagaagaaccgctcgctgcagtccgagaacgccgcgctgcgcatctccaacagcgacctgagcgggtcagccaggaggaaagggaaagaccagcctgaaagtcggcgcccgggatctttgccggccccccctccttctcagttgccccgcaacccgggggagcaggcttccaatactaatggtacacaccagttctcaccagcggggttaagtcaagactttttcagctcatccctggcaagccccagcctacccctggcttctacaggaaaatttgcactaaactctcttctccagcggcagctaatgcagtccttctactccaaggctatgcaggaagccggaagcacaagcatgattttttcaacaggtccatacagcacaaactccatatcttcccaaagtccattacaacaaagcccagatgtcaatggcatggccccatcccccagccagtcagaaagtgctgggagcgtctccgagggcgaggagatggacactgcagaaatcgcccggcaggtcaaagagcagctgattaagcacaatatcggacaacgtattttcggacattatgtgttgggactgtctcaagggtccgtgagcgagattctggcccggcccaagccatggaataaactgactgttcgtggcaaggagccatttcacaagatgaaacagttcctctccgatgagcagaacatcctggccctccgtagcatccaaggcagacaaagagagaatccaggccagagcctgaacagactatttcaggaagtaccgaaacgaagaaatgggtctgaaggtaacatcaccacccggatccgagcctcggagactggctctgatgaagccatcaagtccatcctagagcaagccaagagggagctccaagtgcagaaaactgcagagccggcccagccttcctccgcatccggcagcgggaactctgatgacgccatccgctccatcctgcagcaagcccgccgggagatggaggcccagcaggctgccctcgaccctgccttaaagcaggcaccactgtcccagagtgacatcaccatcctcacccccaagcttctgtccacctcgcccatgcccaccgtgtccagctacccacctctcgccatctccctgaagaagccctccgcagctcctgaggccggtgcctctgctctgccgaaccccccggccctcaaaaaggaggcccaggacgcccccgggctggacccccagggagcagccgattgtgcacaaggggtcctgagacaggtgaaaaatgaggtgggccgcagcggtgcctggaaggaccactggtggagcgcggtgcagccggagagaagaaatgccgcctcctccgaggaggccaaggccgaagaaacgggcggcgggaaagagaagggcagcggtggcagcggaggtggcagccagcctcgggccgagcgcagtcagctccagggaccctcgtcgtcagagtactggaaggagtggcccagcgctgagtccccatactcccagagctcagagctgagtctgaccggggccagccgcagcgagacaccacagaacagccccctgccatcctccccgatcgtgcccatgtccaagcccaccaagccctcggtccccccgctgacccccgagcagtacgaggtctacatgtaccaggaggtggacaccatcgagctcacccggcaggttaaggaaaagctggccaagaacggcatctgccagagaatcttcggggagaaggtgctgggcctgtcccagggcagcgtcagcgacatgctgtcccgaccgaagccatggagcaagctgacgcagaaaggccgagaacccttcatccggatgcagctctggctgaacggcgagctaggccagggtgttctacccgtccagggccagcagcaagggccagtcctccactccgtgacatcgctccaggacccgctgcagcagggctgtgtgagctcagaaagcactccaaagacctccgccagctgcagccctgcccctgagtccccgatgagttccagtgagtcggtgaagagcctgaccgagctggtccagcagccctgtccccccatcgaggcgagcaaggacagcaagccaccagagcccagtgacccgccagcatccgactcccagcccacaaccccgctgcctctctccggacactcggccctcagcatccaagaattagtagccatgtccccggagctggacacctacggcataaccaagcgggtgaaggaggtgctgacggacaacaacctcggccagcgcttatttggggagaccatcttagggctcacccaaggctctgtctctgacctccttgcccgccccaaaccctggcataagctcagtctgaaaggacgagagcccttcgtccggatgcagctgtggctgaacgaccccaacaatgtggagaagctgatggacatgaaacggatggagaagaaagcctacatgaagcggcggcacagctcagtcagtgacagccagccctgcgaaccgccctctgtcggcaccgagtacagccagggcgccagcccccagccccagcaccagctgaagaaaccccgggtggtgctggctccggaggagaaggaggcgctgaaacgagcgtatcagcaaaagccatacccgtcaccaaaaaccatcgaagacctcgccacccagctcaacctgaaaaccagcaccgtcatcaactggttccacaactacaggtctcggatccgcagagaactgttcattgaggaaattcaggccgggagtcagggccaggcgggcgccagcgactcaccctcggcccgcagcggccgggcggcgcccagctcggagggcgacagctgcgacggcgtggaggccactgagggcccaggcagcgccgacaccgaggagcccaagtctcagggagaggccgagcgggaggaggtgccgcggccggcggagcagacggagccgccgccctcggggaccccgggcccggacgacgcccgcgacgacgaccacgagggaggccccgtggaaggcccggggcccctgcccagccccgcctccgcgaccgccaccgccgcgcccgcggcccccgaggacgccgctacctcagccgccgccgcgccgggggagggccccgcggccccgagctccgcgccgccgcccagcaacagcagcagcagcagcgccccccgcaggcccagctcgctgcagagccttttcggcctccccgaggccgcgggcgcccgggactcgcgcgacaaccccctgcgcaagaagaaggccgcgaacttgaacagcatcatccaccgcctggagaaggccgccagccgggaggaacctatcgaatgggagttctgaggggccgcggccctggggcgggcagccaggctgggccgcaagggcctggacggggtcggacggggcaggcgctgcggacaccgtggcctgggcttggcccgcggcctgcaccgaccccgggccggacctgagcccgcagcccagaccccctccacggtccgcggcctgcaccgacccgaggcccagatccaaggccgcggcccagacccactctgcggcccgggccgaccctgcggcctccaccaaccccgcggcccagacccagcccgcggcctggacccctggaccgctttgcgcacttaccgccctgcgggccacagggcaaaatcgccataggccaaggtgcatatagaaaacaaaggagcattaagcccaatctatgtcgtgttttcaaggaagaaaacggaaatgtgtggtcgagcttttttgtaccctgaagtgttttttttattgccctaagtgatttccacaggttctggaataactcttacagctttgccttgtgtcctcctgttccgtgtgggctttaaaagaaaaaaaatcaaacccacatattaaaagggggctttttatctgccatctaatggcttcagagcgataatacactattatcttcttaaaccaggaaaaaataaaagggggggtgggatttttcagaaaaattaaaaaagaaagtttttgtagctgttcagttgccactaagagattgcacagtcaaaacgactctaaacacactagtttggattcctaaatattttcaagaaaagaatcttctcgtttgaaactttgaattaaaataaaacacatttactccacatattttttaacaaaaagaaaacgtcacatcaggaaactctgattttgtggtagctgacatagtgttttcttgtacgtgaatagaatcctgacatgtagtgcacattgatgtatagctttaactgaccctgggttttgcagaccagggtttgtttaatacactccattctaggccaaatcaggacaaaaaaaagaaaaaaaaagaaaaaaaaaaaagaaaagatccgaatctaggtattttataatctgctttttaacctctaaccgcagagcacgctgatcagacctcatatcttggaggtttaggagacaagttagaactgtagcatgtacctgttaattttgtttaatttatggtgtctcaatctgtctgtgcgtctgcacgtgtgcaagcattgaaagaaaggagagagtagtccgggcgagcacagcaggcagttccagggccagacgggcccatccccaagtagatagcagtctacggatctctctctggcacagaaggcacctcacctcacaccactctcctggatacctgatgaactgagccctcccaggggaagacactccccaggcctgggcagggcttacacgcgcactctctctcttctttccctttttcttcccaccgcaagcactgatgaccctgttgaactcgtgggaaacttcctttctctgcaggagagagaacgtggcattctgggctccccactcccatccctgtagaaatggcccaaactcacaccaaaacgtggatgctcttcaacttccaaacctaccatttgcccttctttcatttcgcctcttagttctttttatgcacagttttagggcagtctaagtacaaactgaaagtctaacttgtctctgattcctcccttgtctatgtgtatatgcgtgagaatagaggcgggtgagagtgtgcgtgcgtgtgcgtgtgtgcaattttatacgtctgtgtattttcttaagtacctgtgcacacgtagagtgcattactgccacctttttcaataagctgttttatcagttacggcttctacaagtttgctaatttagacttctttattgccatatctttaaactaacaatagatgatttcggtatatatatatatttttttttgcttatttataggtgctgtattttattatctgattgttaggaagggatgaaaggggcaaatattctttagagggatagactgccggcagtattgggtataatttacaagatgtagttgtcatactgtatattactgattgaaaactttttgaccgtattgtgtatcattgaaacctttgtcttaggtcaacatctttggatgacattttaatggtgcattcattatttcttaagtttaattaatattacttttttttttatttggggggtgggagggagttataattttaaaggtatgctctggctgttccacctccgtgtgcttgttaattaacttgtaggactttgactgtaagatgtgaaaccacgtttcttgcatgatgttttagagattatttcatttacagtcttttaacctgcagctgcagcacttagttcacgttttcacaaatttcaagagtcactacactaaagacaatgccttttcatgaataagaagttttcagaaggctctagggggctgggaggcaggctgttcgtttgtcttttgttgggggtatcatttctgaacttgaaatccagttcagggagaagagaattcaaaattagaggagcttaaggggacacgggtcaacatctagctcgattcaggtgcattgagaagagtgagttcacatcggtgacccttaggacagtgagtggcagagccctgacgactgtggtgtcctctccacaaaaccctcaagggacttttgtcatcatgtgtgatgaatctttaaatatcgtctaattttcataagaatgaaaagaagttaacaggaaatagtaggctagggtttagttttaaaggcatgactgttatttacaaaggtgttaaatctgaggaaattgacaaatacagatttgtccattctagtggccaaacagtaacagtctaaaatgcagtcattttgaccctcccaagcaatttagtcatatgtgttgttttctcttttctgtttttacttcttagatttttaactaggttactgttggttcccattctgtcttttttgccagacttacatctggtgccagatacaatcagttggttaaattttgcttgcagttctgtgtattttttttcctctattatttatttttttaaaaaaaatagagatcctaaccttagatctttgatgtgaagctagcactgtctgtaatacttctaagagctgccactaaaataatacagcaatccgtggccaggggagcaccccctcctggttgggcccctcagttggagtctaagggttaatctctcatcttgctaagcagtattcaagtgccttgaacagtgtcccctcggcatggctccccttcagcaggctggcattccaagcagtggcccccgcaggcagccgacccccttcctcttcacgctctatgagtttaaaaagctgatttgtacctctcccctgggggaaacggttccatataaaacactaacacttaattacaagctccattatgccattttaaatggcttctttttgttaattggaggcattgttcataacttaaggcttttgccattaacttagctggctaagcagaggctcggggtaaaatcagtgtttgcatttagcctcttgacccggagttccggcccaagctcccttgtgatagccgagatggcaggtgtgtgagttctgtcctagacctgtgcccaactcacttccaccccagaggagtcttctgtcctcctccccaacccccgagctccctggtaacctcctcttgaacttctgtatcagtgaagacatctgtggtttctgctcaccagacctctctttagaaagggttatcagagccatggagcttagctcaattggattcttctagacgatcttaggaggcatcttggcatgaggcagcttctaagcgtctcctgggacaggattggggtgacagcccagggatgcatgcatgggagaactctctgagaaatgccaggatcgtggctcacagggacccaccatcaaaacctgctactttgtgcaagtaattgaggcaaaagataccagtcgacagcctccctggggtagatcccttgtacctccaaagtacaaatacctccctgctcagtttccttcctgtcgccatctttgttttcttcccattgaaaaaccatcctgtctgatgtggacgttcaggtctgctggttggcggtccgggcccagagtgcagcagagctctgggttaaatattcctttctggccaccgcccaagcccaggtggccagctctcataccccatctccctccttggccagggccagcatcaggcgtgcagctcatgaccagtttacacaggctgcaaagagatcgctgtgggcctcggctgactactttaagattatgccacagccaggccctaaaaagagaggggaacaggagtccccaggtgagctctctgacgggcaggtgccttcccgactaaggttggactggatgactttgttcctcctgcatgcatgtcctttgatgcaagggtgatcaatgaactctgttgacattctatgcaatgtttttcattcctctgattttagcaaagcaaatcttactgaaaaatagcagagccaggggaacagacgcatgtccttctgggagtcacacaaaagcagagagattttgaactgaggggcgacagcctttgccttaaatgcagtatgacaggcgcttcttggcagaccagtaaaaacaaaagcccatagaccttactcatcccaaggccgacaagccagctgtacagggcgagatgtagcaacacggggcatgagcggtgggcgtgctgggctatttgctgtggtactttaggctggaggtttggctcctgtgctgccggtggggggccctgtccctccccagatgtcctccctcttcttcacactcctcattgtcccttctacctcactaacctgtcttctccatctgatgtcacccagaaccacaccccacagaactgtgaggcacgtgggctggagagagcagaaaagctgccagcgcagcagacacgaacatccctctgcctggtgggccggctttgtgtgtctctccttttgtgagcgcaacacggacaaacagctgtgctctgcaaggcacacggatgtttcccttccacctgttcccaaagctccagcagctgtttcttttgcaggcagggcgtggtctcggggctccgagggtcttgtctttggtccgccttcctttctgtccagtcctgctcagctgttaagatccatcatggccattatccttgtcccggactgccccaaagttcccagctggctttggggaacactgtagctcttgggtgtctcttgtctctggcatggttttagcgtcactgcgaacactcctttgcaaacatcaaacatctcaaagacggaaaaggatagatggcttcctccagcctacacgccccgtccacagtggcatcaccctcttatcccaaaagaatatgccagttcccatccagcaccgaagaaaatcagctcctggggctggtggttggaggtgggtctgtccactgtgggggccaaagtgttcccctgctggagacagtttgcaagtaagaacctaaggatggggacagcatcctgtgcttgggcattgaccagccaaagctcacatttagaaagccctcagtgcttctgtggtttcacctgggcatcgacgacattagggaagcctttgtgaccacaagggcagggcttgtgccctgagtggcgaggtggtgacctgaggccagtgtgatgtggttggatctcagcgtgtactgaatgccagtctggccggcacactcgaacgctaagagaatggtccaatttgatgatcttatttctatttcgatcaggttttgactttttgtagatgaaaactaccagggaaaaggggaagcaggtacccaataaagtttagaaagatccagtctgtgaaacccttagagatgggctgaaagttaagtccaccaacccttgggcttaatcaggacggaagaggagggggtgtggggggcagagcgtaaaacaagccccagccctactcccggccccccagcccagtcttcccaatcccagaggccccggcggcctgtgctcctcaccaccctggtcaggggaatagaaggaaatgcaatttccgcctgtctgcccgacttccaaaaactgcctcctcctgcccaggcctctcccaccaccaccttccctccaaagataaccgtgtccatgccatccgtggcatcatctcgagttttcatttttggatgaagtgacatttagctttaacaagacatttccaaagcgcctagtctcctccaaaatgctaactttaaaagttgggcattgtaggcgaaaaatcccaaaaaaaaaaaaagacaaaaaaaaaaggctggcgagagaaagacatttggctatgcataaatgtgcacttcccccatgcccccgttcttaaactcttaagatgcctttgagttgcttttcatgaatccttttagtttacccgataatgttaagaaagcattagtctacgttactgtaatttctgtagtgtttacgctttaatttctaccacaaaatatgctatatgctatgtatcaagctttctgtaatcagaaagaaaaggtgccttatatcccaatgtcacggctacatccctatggaaattaatcagaagcacagtgtgtacggaagcattgggacttctgctggtgaaacaagagaccattcagcaagacacattgaagtggcacggagctgcttttgttttataattcttttttccccccttttccttcttcttttttattattttattattttttttgtactttgctttaaacggaaagcacttaaatagatgactatgtgtaaaagctctgtgcaattgaaatcatttttcttcattttaaaaaaataacgtattgcacaccaaatgaactcaaagtaagctttagaccaggacgattcaggttatgaatgagtttgttcactgtagttccgtttgttcatgaaccgaagggaaaacaggcctccccgactccctccagtctcccagcctgcctcttggtgaccactgtgctgggcgtgcagggcccgcgggctctggccggagccgctggcctgacgaggcaggatagggagtatccgtgattcagaagctgagacccttccccagtgtctgaggccacagccatcccttccagcacttaatcttgtcttgttgaaatggactgactgctactgacctgccggcgtgcgtgagggtgattataaaaggatgtttccttgagaaaaaaaaaattatttctatcctcttctatttattattaggttaatcatttaagtacttatcaggagtgtattgttattttgtgttttgttgtcataaatgctttttgctgtcactctagtggttactatcctctgccttcctctcctcccctactcccccagagaaccaaggcgtctgggggattgactggggggcagagggggtttccccagcaaaatcaaacacctgtctccagagtagccactcaaaaactggtggtctctatgtgtctaactttttaaatgagagtgtttatgaacaaaaaaatttaccaacgtgtgagggagttgctgagttgaagaatgctcgcttgaggagcttcagaggaatcttagcaaagccaagttcagttccccaaagcctcctagagcctctggtaagacttctgggttcatgaagtttcggcgagccgtggtcagagagggcgcggtggcctggccaagactttacctccaagcgagagagtgatttcttgcaaggcccgcatgggttgatacgttttggttggttttttgttgttgtttttcttgcgtacaaagttggtcaaaaccatctttcaaagcaacagtgttttgtagtaccaggctgtggcttgagggctcacctaggagatcataggcagagggcccctttcccctataggtggttcaacgtggaggaaggttgggtgtggagattgcttgctgtggccccaagctcagccagcaggacacccagttgttgccaatcaggtgtgaaggtgaggcgccctgccttgatcccatgggcccagcagaaggaaacttaccccaggccaaggcaagggccctgctcaccccaaggtaggctgggaagagcatctctttccatatcatcacctccccttctccaagattgccgggggccctgattttgttctctctttgaaagaaaccctccaccgaaacaatggtccccatctccccagaagcctttttttttttcatttttctctaattagtctatgcatttctctctctcaaaccatcttctgcctcttcccttgagaaaacgggcatctcacgtacccccatctgagacctcttggaaaaaaaaaatcccgtgtattctggagatgtgagaattcacccaaaattcttaaaacattggagaatagcttgttataaaataaaagtgggggtaaaaagaaggtggttttccccacatccctttgcattgaataagagacctagttctttgcgtttgtgcaataactctttgctgcttgccttgagagcgggtagcaccacgctcctgtccagactactaacagcacaagacgcactcacagggtggcggaatcttccggaaaactctctataagctcagctccccccaccccacccccactctagcgttttgtcacgtcttacattttagcagtattttatattttctgtaacgcaccaagtcttagatctttctagagcttgtttgttcatcctcacaatcacagatttttttctccaatcctcacagagacccaattgaccaaaaaagaaaaaaggaaaaaaaaaaagtcgtcttttttttttttttttgtacaaatcgctttgagatgcctctggtgtgttgctgtgtgacatctctctggtaacattttatttcttgctatttgtttttctacattaagagtcaaagttgacctggctggcgtgggggtgggggaggcacccgtcggccccttggtgttgtccctctgtctttggttagccatacgatgtttgttctcagcactgtacaacggtccctatataatacggagaagcaatatcactgtatgagactcacaccatgtattattattcactagcaccctaggtgtgataattgaagtaaatatcttttatacaaacacaa

SEQ ID NO: 123292 - DNA, 2331 bp, Homo sapiens
  Payload ID: 4208
  Gene Symbol: CUX1
  Gene Name: cut-like homeobox 1
  Uniprot ID: Q13948
  ENST ID: ENST00000393824
  CDS Start-End: 24-1943
actccgtctcaatatgtctcaagatggcggccaatgtgggatcgatgtttcaatattggaagcgctttgatttacagcagctgcaggatttgcgcaagcaggtagcgccgctgctgaagagtttccaaggagagattgatgcactgagtaaaagaagcaaggaagctgaagcagctttcttgaatgtctacaaaagattgattgacgtcccagatcccgtaccagctttggatctcggacagcaactccagctcaaagtgcagcgcctgcacgatattgaaacagagaaccagaaacttagggaaactctggaagaatacaacaaggaatttgctgaagtgaaaaatcaagaggttacgataaaagcacttaaagagaaaatccgagaatatgaacagacactgaagaaccaagccgaaaccatagctcttgagaaggaacagaagttacagaatgactttgcagaaaaggagagaaagctgcaggagacacagatgtccaccacctcaaagctggaggaagctgagcataaggttcagagcctacaaacagccctggaaaaaactcgaacagaattatttgacctgaaaaccaaatacgatgaagaaactactgcaaaggccgacgagattgaaatgatcatgacggaccttgaaagggcaaaccagagggcagaggtggctcagagagaggcggagaccttaagggaacagctctcatcggccaatcactccctccagctggcctcacagatccagaaggcaccagacgtggccatagaggtgctgacccgctccagcctagaagttgagttggccgccaaggagcgggagatcgcacagctggtggaggacgtgcagagactccaggccagcctcaccaagctgcgggagaattcggccagccagatctcacagcttgagcagcagctgagcgccaaaaacagcacactcaaacaactggaagaaaaactcaaaggccaggctgactatgaagaggtgaagaaagagctgaacattctgaagtccatggagtttgcaccgtccgagggcgctgggacacaggatgcggccaagcccctggaggtgctgttgctggagaagaaccgctcgctgcagtccgagaacgccgcgctgcgcatctccaacagcgacctgagcggacgctgtgcggagctgcaagtccgtatcactgaggctgtggccacagccactgagcagagagagctgatcgcccgcctggagcaggacctgagcatcattcagtccatccagcggcccgatgccgagggtgccgctgagcaccgcctggagaagatcccagagcccatcaaagaggccactgccctattctacggacctgcagcaccagccagcggtgccctcccagagggccaggtggattcactgctttccatcatctccagccagagggagcgcttccgtgcccggaaccaggagcttgaggccgagaaccgcctggcccagcacaccctccaggccctgcagagtgagctggacagcctgcgcgccgacaacatcaagctctttgagaagatcaagttcctgcagagctaccctggccggggcagcggcagtgatgacacggagctgcggtactcgtcccagtacgaggagcgcctggaccccttctcctccttcagcaagcgggagcggcagaggaagtacctgagcttgagtccctgggacaaggccaccctcagcatggggcgtctggttctctccaacaagatggcgcgcaccatcggcttcttctacacactgttcctgcactgcctggtcttcctggtgctctacaagctggcatggagcgagagcatggagagggactgtgccaccttctgcgccaagaagttcgctgaccacctgcacaagttccacgagaatgacaacggggctgcggctggtgacttgtggcagtgataccccggggcctcccccgtgacagtgacggctgcgcctccaccccgactgctcagtgcatctaatcacttagactcccctgaagaatcccccatggaaactgcccttatccgctgtccagcagctgccagaggccccaggtcacctcgggtccccttgaaagaatgtctcggtcacatcaggcccgctaggtccagagagcgagcccccaatgcccggccaggctaagccgcagagaccctctcagcccccacctcaggttagggctctgcccgcagcctgacctctagccctggtggcagaggtccctcagctgcgaggctaattgggtgaccaccgattccagctgcggttaatccagcttgggcctgtctgcactgcgatcctc

SEQ ID NO: 123293 - DNA, 2776 bp, Homo sapiens
  Payload ID: 4208
  Gene Symbol: CUX1
  Gene Name: cut-like homeobox 1
  Uniprot ID: P39880
  ENST ID: ENST00000425244
  CDS Start-End: 11-1909
atgtctcaagatggcggccaatgtgggatcgatgtttcaatattggaagcgctttgatttacagcagctgcagagagaactcgatgccaccgcaacggtattggcgaaccggcaggatgaaagtgagcagtccagaaagcggcttatcgaacagagccgggagttcaagaagaacactccagaggatttgcgcaagcaggtagcgccgctgctgaagagtttccaaggagagattgatgcactgagtaaaagaagcaaggaagctgaagcagctttcttgaatgtctacaaaagattgattgacgtcccagaggttacgataaaagcacttaaagagaaaatccgagaatatgaacagacactgaagaaccaagccgaaaccatagctcttgagaaggaacagaagttacagaatgactttgcagaaaaggagagaaagctgcaggagacacagatgtccaccacctcaaagctggaggaagctgagcataaggttcagagcctacaaacagccctggaaaaaactcgaacagaattatttgacctgaaaaccaaatacgatgaagaaactactgcaaaggccgacgagattgaaatgatcatgacggaccttgaaagggcaaaccagagggcagaggtggctcagagagaggcggagaccttaagggaacagctctcatcggccaatcactccctccagctggcctcacagatccagaaggcaccagacgtggagcaggccatagaggtgctgacccgctccagcctagaagttgagttggccgccaaggagcgggagatcgcacagctggtggaggacgtgcagagactccaggccagcctcaccaagctgcgggagaattcggccagccagatctcacagcttgagcagcagctgagcgccaaaaacagcacactcaaacaactggaagaaaaactcaaaggccaggctgactatgaagaggtgaagaaagagctgaacattctgaagtccatggagtttgcaccgtccgagggcgctgggacacaggatgcggccaagcccctggaggtgctgttgctggagaagaaccgctcgctgcagtccgagaacgccgcgctgcgcatctccaacagcgacctgagcggacgctgtgcggagctgcaagtccgtatcactgaggctgtggccacagccactgagcagagagagctgatcgcccgcctggagcaggacctgagcatcattcagtccatccagcggcccgatgccgagggtgccgctgagcaccgcctggagaagatcccagagcccatcaaagaggccactgccctattctacggacctgcagcaccagccagcggtgccctcccagagggccaggtggattcactgctttccatcatctccagccagagggagcgcttccgtgcccggaaccaggagcttgaggccgagaaccgcctggcccagcacaccctccaggccctgcagagtgagctggacagcctgcgcgccgacaacatcaagctctttgagaagatcaagttcctgcagagctaccctggccggggcagcggcagtgatgacacggagctgcggtactcgtcccagtacgaggagcgcctggaccccttctcctccttcagcaagcgggagcggcagaggaagtacctgagcttgagtccctgggacaaggccaccctcagcatggggcgtctggttctctccaacaagatggcgcgcaccatcggcttcttctacacactgttcctgcactgcctggtcttcctggtgctctacaagctggcatggagcgagagcatggagagggactgtgccaccttctgcgccaagaagttcgctgaccacctgcacaagttccacgagaatgacaacggggctgcggctggtgacttgtggcagtgataccccggggcctcccccgtgacagtgacggctgcgcctccaccccgactgctcagtgcatctaatcacttagactcccctgaagaatcccccatggaaactgcccttatccgctgtccagcagctgccagaggccccaggtcacctcgggtccccttgaaagaatgtctcggtcacatcaggcccgctaggtccagagagcgagcccccaatgcccggccaggctaagccgcagagaccctctcagcccccacctcaggttagggctctgcccgcagcctgacctctagccctggtggcagaggtccctcagctgcgaggctaattgggtgaccaccgattccagctgcggttaatccagcttgggcctgtctgcactgcgatcctcttgggctctcctaggatccccccatgccccgtaagaggtggaagacgcttccttccaggacagcaggctttgagtccagcacccccagcctgcctttgccaccagccccaccctgcagagtatatgaggcttgacagagtctgccccctcccccactgcaccccaagagagagagccccagccagcggaacagtttctattaccccctccctgcccccagacccatgtgatttctgctttcttctttagcaagatattctggtttctagataaggaagagtctctaatgagcccccgagccccagtctcttcagactcatggattggtatgaggggtctgaacgtctcctagccaatcagaactggctgtggaccaccctagcacggccacctctcagggccactggcaggccttcctgagttagatttgtagttgcatatttagctttgcacatttgaaataaaccacggttgcagcc

SEQ ID NO: 123294 - DNA, 3031 bp, Homo sapiens
  Payload ID: 4208
  Gene Symbol: CUX1
  Gene Name: cut-like homeobox 1
  Uniprot ID: Q13948
  ENST ID: ENST00000437600
  CDS Start-End: 128-2164
ctcggtggcggcggcggcggccggctccaggccgggttttggcgccgcccgcctgctgcctcctggcggctcctgaactccagccccctctctatcagccgctcactccgtctcaatatgtctcaagatggcggccaatgtgggatcgatgtttcaatattggaagcgctttgatttacagcagctgcagagagaactcgatgccaccgcaacggtattggcgaaccggcaggatgaaagtgagcagtccagaaagcggcttatcgaacagagccgggagttcaagaagaacactccagaggatttgcgcaagcaggtagcgccgctgctgaagagtttccaaggagagattgatgcactgagtaaaagaagcaaggaagctgaagcagctttcttgaatgtctacaaaagattgattgacgtcccagatcccgtaccagctttggatctcggacagcaactccagctcaaagtgcagcgcctgcacgatattgaaacagagaaccagaaacttagggaaactctggaagaatacaacaaggaatttgctgaagtgaaaaatcaagaggttacgataaaagcacttaaagagaaaatccgagaatatgaacagacactgaagaaccaagccgaaaccatagctcttgagaaggaacagaagttacagaatgactttgcagaaaaggagagaaagctgcaggagacacagatgtccaccacctcaaagctggaggaagctgagcataaggttcagagcctacaaacagccctggaaaaaactcgaacagaattatttgacctgaaaaccaaatacgatgaagaaactactgcaaaggccgacgagattgaaatgatcatgacggaccttgaaagggcaaaccagagggcagaggtggctcagagagaggcggagaccttaagggaacagctctcatcggccaatcactccctccagctggcctcacagatccagaaggcaccagacgtggagcaggccatagaggtgctgacccgctccagcctagaagttgagttggccgccaaggagcgggagatcgcacagctggtggaggacgtgcagagactccaggccagcctcaccaagctgcgggagaattcggccagccagatctcacagcttgagcagcagctgagcgccaaaaacagcacactcaaacaactggaagaaaaactcaaaggccaggctgactatgaagaggtgaagaaagagctgaacattctgaagtccatggagtttgcaccgtccgagggcgctgggacacaggatgcggccaagcccctggaggtgctgttgctggagaagaaccgctcgctgcagtccgagaacgccgcgctgcgcatctccaacagcgacctgagcggacgctgtgcggagctgcaagtccgtatcactgaggctgtggccacagccactgagcagagagagctgatcgcccgcctggagcaggacctgagcatcattcagtccatccagcggcccgatgccgagggtgccgctgagcaccgcctggagaagatcccagagcccatcaaagaggccactgccctattctacggacctgcagcaccagccagcggtgccctcccagagggccaggtggattcactgctttccatcatctccagccagagggagcgcttccgtgcccggaaccaggagcttgaggccgagaaccgcctggcccagcacaccctccaggccctgcagagtgagctggacagcctgcgcgccgacaacatcaagctctttgagaagatcaagttcctgcagagctaccctggccggggcagcggcagtgatgacacggagctgcggtactcgtcccagtacgaggagcgcctggaccccttctcctccttcagcaagcgggagcggcagaggaagtacctgagcttgagtccctgggacaaggccaccctcagcatggggcgtctggttctctccaacaagatggcgcgcaccatcggcttcttctacacactgttcctgcactgcctggtcttcctggtgctctacaagctggcatggagcgagagcatggagagggactgtgccaccttctgcgccaagaagttcgctgaccacctgcacaagttccacgagaatgacaacggggctgcggctggtgacttgtggcagtgataccccggggcctcccccgtgacagtgacggctgcgcctccaccccgactgctcagtgcatctaatcacttagactcccctgaagaatcccccatggaaactgcccttatccgctgtccagcagctgccagaggccccaggtcacctcgggtccccttgaaagaatgtctcggtcacatcaggcccgctaggtccagagagcgagcccccaatgcccggccaggctaagccgcagagaccctctcagcccccacctcaggttagggctctgcccgcagcctgacctctagccctggtggcagaggtccctcagctgcgaggctaattgggtgaccaccgattccagctgcggttaatccagcttgggcctgtctgcactgcgatcctcttgggctctcctaggatccccccatgccccgtaagaggtggaagacgcttccttccaggacagcaggctttgagtccagcacccccagcctgcctttgccaccagccccaccctgcagagtatatgaggcttgacagagtctgccccctcccccactgcaccccaagagagagagccccagccagcggaacagtttctattaccccctccctgcccccagacccatgtgatttctgctttcttctttagcaagatattctggtttctagataaggaagagtctctaatgagcccccgagccccagtctcttcagactcatggattggtatgaggggtctgaacgtctcctagccaatcagaactggctgtggaccaccctagcacggccacctctcagggccactggcaggccttcctgagttagatttgtagttgcatatttagctttgcacatttgaaataaaccacggttgcagcc

SEQ ID NO: 123295 - DNA, 4452 bp, Homo sapiens
  Payload ID: 4208
  Gene Symbol: CUX1
  Gene Name: cut-like homeobox 1
  Uniprot ID: P39880
  ENST ID: ENST00000549414
  CDS Start-End: 1-4452
atgttgtgcgtagccggagccaggttgaagagagaactcgatgccaccgcaacggtattggcgaaccggcaggatgaaagtgagcagtccagaaagcggcttatcgaacagagccgggagttcaagaagaacactccagaggatttgcgcaagcaggtagcgccgctgctgaagagtttccaaggagagattgatgcactgagtaaaagaagcaaggaagctgaagcagctttcttgaatgtctacaaaagattgattgacgtcccagatcccgtaccagctttggatctcggacagcaactccagctcaaagtgcagcgcctgcacgatattgaaacagagaaccagaaacttagggaaactctggaagaatacaacaaggaatttgctgaagtgaaaaatcaagaggttacgataaaagcacttaaagagaaaatccgagaatatgaacagacactgaagaaccaagccgaaaccatagctcttgagaaggaacagaagttacagaatgactttgcagaaaaggagagaaagctgcaggagacacagatgtccaccacctcaaagctggaggaagctgagcataaggttcagagcctacaaacagccctggaaaaaactcgaacagaattatttgacctgaaaaccaaatacgatgaagaaactactgcaaaggccgacgagattgaaatgatcatgacggaccttgaaagggcaaaccagagggcagaggtggctcagagagaggcggagaccttaagggaacagctctcatcggccaatcactccctccagctggcctcacagatccagaaggcaccagacgtggagcaggccatagaggtgctgacccgctccagcctagaagttgagttggccgccaaggagcgggagatcgcacagctggtggaggacgtgcagagactccaggccagcctcaccaagctgcgggagaattcggccagccagatctcacagcttgagcagcagctgagcgccaaaaacagcacactcaaacaactggaagaaaaactcaaaggccaggctgactatgaagaggtgaagaaagagctgaacattctgaagtccatggagtttgcaccgtccgagggcgctgggacacaggatgcggccaagcccctggaggtgctgttgctggagaagaaccgctcgctgcagtccgagaacgccgcgctgcgcatctccaacagcgacctgagcgggtcagccaggaggaaagggaaagaccagcctgaaagtcggcgcccgggatctttgccggccccccctccttctcagttgccccgcaacccgggggagcaggcttccaatactaatggtacacaccagttctcaccagcggggttaagtcaagactttttcagctcatccctggcaagccccagcctacccctggcttctacaggaaaatttgcactaaactctcttctccagcggcagctaatgcagtccttctactccaaggctatgcaggaagccggaagcacaagcatgattttttcaacaggtccatacagcacaaactccatatcttcccaaagtccattacaacaaagcccagatgtcaatggcatggccccatcccccagccagtcagaaagtgctgggagcgtctccgagggcgaggagatggacactgcagaaatcgcccggcaggtcaaagagcagctgattaagcacaatatcggacaacgtattttcggacattatgtgttgggactgtctcaagggtccgtgagcgagattctggcccggcccaagccatggaataaactgactgttcgtggcaaggagccatttcacaagatgaaacagttcctctccgatgagcagaacatcctggccctccgtagcatccaaggcagacaaagaggtaacatcaccacccggatccgagcctcggagactggctctgatgaagccatcaagtccatcctagagcaagccaagagggagctccaagtgcagaaaactgcagagccggcccagccttcctccgcatccggcagcgggaactctgatgacgccatccgctccatcctgcagcaagcccgccgggagatggaggcccagcaggctgccctcgaccctgccttaaagcaggcaccactgtcccagagtgacatcaccatcctcacccccaagcttctgtccacctcgcccatgcccaccgtgtccagctacccacctctcgccatctccctgaagaagccctccgcagctcctgaggccggtgcctctgctctgccgaaccccccggccctcaaaaaggaggcccaggacgcccccgggctggacccccagggagcagccgattgtgcacaaggggtcctgagacaggtgaaaaatgaggtgggccgcagcggtgcctggaaggaccactggtggagcgcggtgcagccggagagaagaaatgccgcctcctccgaggaggccaaggccgaagaaacgggcggcgggaaagagaagggcagcggtggcagcggaggtggcagccagcctcgggccgagcgcagtcagctccagggaccctcgtcgtcagagtactggaaggagtggcccagcgctgagtccccatactcccagagctcagagctgagtctgaccggggccagccgcagcgagacaccacagaacagccccctgccatcctccccgatcgtgcccatgtccaagcccaccaagccctcggtccccccgctgacccccgagcagtacgaggtctacatgtaccaggaggtggacaccatcgagctcacccggcaggttaaggaaaagctggccaagaacggcatctgccagagaatcttcggggagaaggtgctgggcctgtcccagggcagcgtcagcgacatgctgtcccgaccgaagccatggagcaagctgacgcagaaaggccgagaacccttcatccggatgcagctctggctgaacggcgagctaggccagggtgttctacccgtccagggccagcagcaagggccagtcctccactccgtgacatcgctccaggacccgctgcagcagggctgtgtgagctcagaaagcactccaaagacctccgccagctgcagccctgcccctgagtccccgatgagttccagtgagtcggtgaagagcctgaccgagctggtccagcagccctgtccccccatcgaggcgagcaaggacagcaagccaccagagcccagtgacccgccagcatccgactcccagcccacaaccccgctgcctctctccggacactcggccctcagcatccaagaattagtagccatgtccccggagctggacacctacggcataaccaagcgggtgaaggaggtgctgacggacaacaacctcggccagcgcttatttggggagaccatcttagggctcacccaaggctctgtctctgacctccttgcccgccccaaaccctggcataagctcagtctgaaaggacgagagcccttcgtccggatgcagctgtggctgaacgaccccaacaatgtggagaagctgatggacatgaaacggatggagaagaaagcctacatgaagcggcggcacagctcagtcagtgacagccagccctgcgaaccgccctctgtcggcaccgagtacagccagggcgccagcccccagccccagcaccagctgaagaaaccccgggtggtgctggctccggaggagaaggaggcgctgaaacgagcgtatcagcaaaagccatacccgtcaccaaaaaccatcgaagacctcgccacccagctcaacctgaaaaccagcaccgtcatcaactggttccacaactacaggtctcggatccgcagagaactgttcattgaggaaattcaggccgggagtcagggccaggcgggcgccagcgactcaccctcggcccgcagcggccgggcggcgcccagctcggagggcgacagctgcgacggcgtggaggccactgagggcccaggcagcgccgacaccgaggagcccaagtctcagggagaggccgagcgggaggaggtgccgcggccggcggagcagacggagccgccgccctcggggaccccgggcccggacgacgcccgcgacgacgaccacgagggaggccccgtggaaggcccggggcccctgcccagccccgcctccgcgaccgccaccgccgcgcccgcggcccccgaggacgccgctacctcagccgccgccgcgccgggggagggccccgcggccccgagctccgcgccgccgcccagcaacagcagcagcagcagcgccccccgcaggcccagctcgctgcagagccttttcggcctccccgaggccgcgggcgcccgggactcgcgcgacaaccccctgcgcaagaagaaggccgcgaacttgaacagcatcatccaccgcctggagaaggccgccagccgggaggaacctatcgaatgggagttctga

SEQ ID NO: 123296 - DNA, 4350 bp, Homo sapiens
  Payload ID: 4208
  Gene Symbol: CUX1
  Gene Name: cut-like homeobox 1
  Uniprot ID: P39880
  ENST ID: ENST00000550008
  CDS Start-End: 1-4350
atgttgtgcgtagccggagccaggttgaagagagaactcgatgccaccgcaacggtattggcgaaccggcaggatgaaagtgagcagtccagaaagcggcttatcgaacagagccgggagttcaagaagaacactccagaggatttgcgcaagcaggtagcgccgctgctgaagagtttccaaggagagattgatgcactgagtaaaagaagcaaggaagctgaagcagctttcttgaatgtctacaaaagattgattgacgtcccagatcccgtaccagctttggatctcggacagcaactccagctcaaagtgcagcgcctgcacgatattgaaacagagaaccagaaacttagggaaactctggaagaatacaacaaggaatttgctgaagtgaaaaatcaagaggttacgataaaagcacttaaagagaaaatccgagaatatgaacagacactgaagaaccaagccgaaaccatagctcttgagaaggaacagaagttacagaatgactttgcagaaaaggagagaaagctgcaggagacacagatgtccaccacctcaaagctggaggaagctgagcataaggttcagagcctacaaacagccctggaaaaaactcgaacagaattatttgacctgaaaaccaaatacgatgaagaaactactgcaaaggccgacgagattgaaatgatcatgacggaccttgaaagggcaaaccagagggcagaggtggctcagagagaggcggagaccttaagggaacagctctcatcggccaatcactccctccagctggcctcacagatccagaaggcaccagacgtggagcaggccatagaggtgctgacccgctccagcctagaagttgagttggccgccaaggagcgggagatcgcacagctggtggaggacgtgcagagactccaggccagcctcaccaagctgcgggagaattcggccagccagatctcacagcttgagcagcagctgagcgccaaaaacagcacactcaaacaactggaagaaaaactcaaaggccaggctgactatgaagaggtgaagaaagagctgaacattctgaagtccatggagtttgcaccgtccgagggcgctgggacacaggatgcggccaagcccctggaggtgctgttgctggagaagaaccgctcgctgcagtccgagaacgccgcgctgcgcatctccaacagcgacctgagcgggtcagccaggaggaaagggaaagaccagcctgaaagtcggcgcccgggatctttgccggccccccctccttctcagttgccccgcaacccgggggagcaggcttccaatactaatggtacacaccagttctcaccagcggggttaagtcaagactttttcagctcatccctggcaagccccagcctacccctggcttctacaggaaaatttgcactaaactctcttctccagcggcagctaatgcagtccttctactccaaggctatgcaggaagccggaagcacaagcatgattttttcaacaggtccatacagcacaaactccatatcttcccaaagtccattacaacaaagcccagatgtcaatggcatggccccatcccccagccagtcagaaagtgctgggagcgtctccgagggcgaggagatggacactgcagaaatcgcccggcaggtcaaagagcagctgattaagcacaatatcggacaacgtattttcggacattatgtgttgggactgtctcaagggtccgtgagcgagattctggcccggcccaagccatggaataaactgactgttcgtggcaaggagccatttcacaagatgaaacagttcctctccgatgagcagaacatcctggccctccgtagcatccaaggcagacaaagagcagagccggcccagccttcctccgcatccggcagcgggaactctgatgacgccatccgctccatcctgcagcaagcccgccgggagatggaggcccagcaggctgccctcgaccctgccttaaagcaggcaccactgtcccagagtgacatcaccatcctcacccccaagcttctgtccacctcgcccatgcccaccgtgtccagctacccacctctcgccatctccctgaagaagccctccgcagctcctgaggccggtgcctctgctctgccgaaccccccggccctcaaaaaggaggcccaggacgcccccgggctggacccccagggagcagccgattgtgcacaaggggtcctgagacaggtgaaaaatgaggtgggccgcagcggtgcctggaaggaccactggtggagcgcggtgcagccggagagaagaaatgccgcctcctccgaggaggccaaggccgaagaaacgggcggcgggaaagagaagggcagcggtggcagcggaggtggcagccagcctcgggccgagcgcagtcagctccagggaccctcgtcgtcagagtactggaaggagtggcccagcgctgagtccccatactcccagagctcagagctgagtctgaccggggccagccgcagcgagacaccacagaacagccccctgccatcctccccgatcgtgcccatgtccaagcccaccaagccctcggtccccccgctgacccccgagcagtacgaggtctacatgtaccaggaggtggacaccatcgagctcacccggcaggttaaggaaaagctggccaagaacggcatctgccagagaatcttcggggagaaggtgctgggcctgtcccagggcagcgtcagcgacatgctgtcccgaccgaagccatggagcaagctgacgcagaaaggccgagaacccttcatccggatgcagctctggctgaacggcgagctaggccagggtgttctacccgtccagggccagcagcaagggccagtcctccactccgtgacatcgctccaggacccgctgcagcagggctgtgtgagctcagaaagcactccaaagacctccgccagctgcagccctgcccctgagtccccgatgagttccagtgagtcggtgaagagcctgaccgagctggtccagcagccctgtccccccatcgaggcgagcaaggacagcaagccaccagagcccagtgacccgccagcatccgactcccagcccacaaccccgctgcctctctccggacactcggccctcagcatccaagaattagtagccatgtccccggagctggacacctacggcataaccaagcgggtgaaggaggtgctgacggacaacaacctcggccagcgcttatttggggagaccatcttagggctcacccaaggctctgtctctgacctccttgcccgccccaaaccctggcataagctcagtctgaaaggacgagagcccttcgtccggatgcagctgtggctgaacgaccccaacaatgtggagaagctgatggacatgaaacggatggagaagaaagcctacatgaagcggcggcacagctcagtcagtgacagccagccctgcgaaccgccctctgtcggcaccgagtacagccagggcgccagcccccagccccagcaccagctgaagaaaccccgggtggtgctggctccggaggagaaggaggcgctgaaacgagcgtatcagcaaaagccatacccgtcaccaaaaaccatcgaagacctcgccacccagctcaacctgaaaaccagcaccgtcatcaactggttccacaactacaggtctcggatccgcagagaactgttcattgaggaaattcaggccgggagtcagggccaggcgggcgccagcgactcaccctcggcccgcagcggccgggcggcgcccagctcggagggcgacagctgcgacggcgtggaggccactgagggcccaggcagcgccgacaccgaggagcccaagtctcagggagaggccgagcgggaggaggtgccgcggccggcggagcagacggagccgccgccctcggggaccccgggcccggacgacgcccgcgacgacgaccacgagggaggccccgtggaaggcccggggcccctgcccagccccgcctccgcgaccgccaccgccgcgcccgcggcccccgaggacgccgctacctcagccgccgccgcgccgggggagggccccgcggccccgagctccgcgccgccgcccagcaacagcagcagcagcagcgccccccgcaggcccagctcgctgcagagccttttcggcctccccgaggccgcgggcgcccgggactcgcgcgacaaccccctgcgcaagaagaaggccgcgaacttgaacagcatcatccaccgcctggagaaggccgccagccgggaggaacctatcgaatgggagttctga

SEQ ID NO: 123297 - DNA, 2878 bp, Homo sapiens
  Payload ID: 4208
  Gene Symbol: CUX1
  Gene Name: cut-like homeobox 1
  Uniprot ID: Q13948
  ENST ID: ENST00000547394
  CDS Start-End: 23-2011
ctccgtctcaatatgtctcaagatggcggccaatgtgggatcgatgtttcaatattggaagcgctttgatttacagcagctgcagagagaactcgatgccaccgcaacggtattggcgaaccggcaggatgaaagtgagcagtccagaaagcggcttatcgaacagagccgggagttcaagaagaacactccagagattgatgcactgagtaaaagaagcaaggaagctgaagcagctttcttgaatgtctacaaaagattgattgacgtcccagatcccgtaccagctttggatctcggacagcaactccagctcaaagtgcagcgcctgcacgatattgaaacagagaaccagaaacttagggaaactctggaagaatacaacaaggaatttgctgaagtgaaaaatcaagaggttacgataaaagcacttaaagagaaaatccgagaatatgaacagacactgaagaaccaagccgaaaccatagctcttgagaaggaacagaagttacagaatgactttgcagaaaaggagagaaagctgcaggagacacagatgtccaccacctcaaagctggaggaagctgagcataaggttcagagcctacaaacagccctggaaaaaactcgaacagaattatttgacctgaaaaccaaatacgatgaagaaactactgcaaaggccgacgagattgaaatgatcatgacggaccttgaaagggcaaaccagagggcagaggtggctcagagagaggcggagaccttaagggaacagctctcatcggccaatcactccctccagctggcctcacagatccagaaggcaccagacgtggagcaggccatagaggtgctgacccgctccagcctagaagttgagttggccgccaaggagcgggagatcgcacagctggtggaggacgtgcagagactccaggccagcctcaccaagctgcgggagaattcggccagccagatctcacagcttgagcagcagctgagcgccaaaaacagcacactcaaacaactggaagaaaaactcaaaggccaggctgactatgaagaggtgaagaaagagctgaacattctgaagtccatggagtttgcaccgtccgagggcgctgggacacaggatgcggccaagcccctggaggtgctgttgctggagaagaaccgctcgctgcagtccgagaacgccgcgctgcgcatctccaacagcgacctgagcggacgctgtgcggagctgcaagtccgtatcactgaggctgtggccacagccactgagcagagagagctgatcgcccgcctggagcaggacctgagcatcattcagtccatccagcggcccgatgccgagggtgccgctgagcaccgcctggagaagatcccagagcccatcaaagaggccactgccctattctacggacctgcagcaccagccagcggtgccctcccagagggccaggtggattcactgctttccatcatctccagccagagggagcgcttccgtgcccggaaccaggagcttgaggccgagaaccgcctggcccagcacaccctccaggccctgcagagtgagctggacagcctgcgcgccgacaacatcaagctctttgagaagatcaagttcctgcagagctaccctggccggggcagcggcagtgatgacacggagctgcggtactcgtcccagtacgaggagcgcctggaccccttctcctccttcagcaagcgggagcggcagaggaagtacctgagcttgagtccctgggacaaggccaccctcagcatggggcgtctggttctctccaacaagatggcgcgcaccatcggcttcttctacacactgttcctgcactgcctggtcttcctggtgctctacaagctggcatggagcgagagcatggagagggactgtgccaccttctgcgccaagaagttcgctgaccacctgcacaagttccacgagaatgacaacggggctgcggctggtgacttgtggcagtgataccccggggcctcccccgtgacagtgacggctgcgcctccaccccgactgctcagtgcatctaatcacttagactcccctgaagaatcccccatggaaactgcccttatccgctgtccagcagctgccagaggccccaggtcacctcgggtccccttgaaagaatgtctcggtcacatcaggcccgctaggtccagagagcgagcccccaatgcccggccaggctaagccgcagagaccctctcagcccccacctcaggttagggctctgcccgcagcctgacctctagccctggtggcagaggtccctcagctgcgaggctaattgggtgaccaccgattccagctgcggttaatccagcttgggcctgtctgcactgcgatcctcttgggctctcctaggatccccccatgccccgtaagaggtggaagacgcttccttccaggacagcaggctttgagtccagcacccccagcctgcctttgccaccagccccaccctgcagagtatatgaggcttgacagagtctgccccctcccccactgcaccccaagagagagagccccagccagcggaacagtttctattaccccctccctgcccccagacccatgtgatttctgctttcttctttagcaagatattctggtttctagataaggaagagtctctaatgagcccccgagccccagtctcttcagactcatggattggtatgaggggtctgaacgtctcctagccaatcagaactggctgtggaccaccctagcacggccacctctcagggccactggcaggccttcctgagttagatttgtagttgcatatttagctttgcacatttgaaataaaccacggttgcagcc

SEQ ID NO: 123298 - DNA, 4212 bp, Homo sapiens
  Payload ID: 4208
  Gene Symbol: CUX1
  Gene Name: cut-like homeobox 1
  Uniprot ID: P39880
  ENST ID: ENST00000546411
  CDS Start-End: 1-4212
atgttgtgcgtagccggagccaggttgaagagagaactcgatgccaccgcaacggtattggcgaaccggcaggatgaaagtgagcagtccagaaagcggcttatcgaacagagccgggagttcaagaagaacactccagaggatttgcgcaagcaggtagcgccgctgctgaagagtttccaaggagagattgatgcactgagtaaaagaagcaaggaagctgaagcagctttcttgaatgtctacaaaagattgattgacgtcccagatcccgtaccagctttggatctcggacagcaactccagctcaaagtgcagcgcctgcacgatattgaaacagagaaccagaaacttagggaaactctggaagaatacaacaaggaatttgctgaagtgaaaaatcaagaggttacgataaaagcacttaaagagaaaatccgagaatatgaacagacactgaagaaccaagccgaaaccatagctcttgagaaggaacagaagttacagaatgactttgcagaaaaggagagaaagctgcaggagacacagatgtccaccacctcaaagctggaggaagctgagcataaggttcagagcctacaaacagccctggaaaaaactcgaacagaattatttgacctgaaaaccaaatacgatgaagaaactactgcaaaggccgacgagattgaaatgatcatgacggaccttgaaagggcaaaccagagggcagaggtggctcagagagaggcggagaccttaagggaacagctctcatcggccaatcactccctccagctggcctcacagatccagaaggcaccagacgtggagcaggccatagaggtgctgacccgctccagcctagaagttgagttggccgccaaggagcgggagatcgcacagctggtggaggacgtgcagagactccaggccagcctcaccaagctgcgggagaattcggccagccagatctcacagcttgagcagcagctgagcgccaaaaacagcacactcaaacaactggaagaaaaactcaaaggccaggctgactatgaagaggtgaagaaagagctgaacattctgaagtccatggagtttgcaccgtccgagggcgctgggacacaggatgcggccaagcccctggaggtgctgttgctggagaagaaccgctcgctgcagtccgagaacgccgcgctgcgcatctccaacagcgacctgagcggtccatacagcacaaactccatatcttcccaaagtccattacaacaaagcccagatgtcaatggcatggccccatcccccagccagtcagaaagtgctgggagcgtctccgagggcgaggagatggacactgcagaaatcgcccggcaggtcaaagagcagctgattaagcacaatatcggacaacgtattttcggacattatgtgttgggactgtctcaagggtccgtgagcgagattctggcccggcccaagccatggaataaactgactgttcgtggcaaggagccatttcacaagatgaaacagttcctctccgatgagcagaacatcctggccctccgtagcatccaaggcagacaaagagagaatccaggccagagcctgaacagactatttcaggaagtaccgaaacgaagaaatgggtctgaaggtaacatcaccacccggatccgagcctcggagactggctctgatgaagccatcaagtccatcctagagcaagccaagagggagctccaagtgcagaaaactgcagagccggcccagccttcctccgcatccggcagcgggaactctgatgacgccatccgctccatcctgcagcaagcccgccgggagatggaggcccagcaggctgccctcgaccctgccttaaagcaggcaccactgtcccagagtgacatcaccatcctcacccccaagcttctgtccacctcgcccatgcccaccgtgtccagctacccacctctcgccatctccctgaagaagccctccgcagctcctgaggccggtgcctctgctctgccgaaccccccggccctcaaaaaggaggcccaggacgcccccgggctggacccccagggagcagccgattgtgcacaaggggtcctgagacaggtgaaaaatgaggtgggccgcagcggtgcctggaaggaccactggtggagcgcggtgcagccggagagaagaaatgccgcctcctccgaggaggccaaggccgaagaaacgggcggcgggaaagagaagggcagcggtggcagcggaggtggcagccagcctcgggccgagcgcagtcagctccagggaccctcgtcgtcagagtactggaaggagtggcccagcgctgagtccccatactcccagagctcagagctgagtctgaccggggccagccgcagcgagacaccacagaacagccccctgccatcctccccgatcgtgcccatgtccaagcccaccaagccctcggtccccccgctgacccccgagcagtacgaggtctacatgtaccaggaggtggacaccatcgagctcacccggcaggttaaggaaaagctggccaagaacggcatctgccagagaatcttcggggagaaggtgctgggcctgtcccagggcagcgtcagcgacatgctgtcccgaccgaagccatggagcaagctgacgcagaaaggccgagaacccttcatccggatgcagctctggctgaacggcgagctaggccagggtgttctacccgtccagggccagcagcaagggccagtcctccactccgtgacatcgctccaggacccgctgcagcagggctgtgtgagctcagaaagcactccaaagacctccgccagctgcagccctgcccctgagtccccgatgagttccagtgagtcggtgaagagcctgaccgagctggtccagcagccctgtccccccatcgaggcgagcaaggacagcaagccaccagagcccagtgacccgccagcatccgactcccagcccacaaccccgctgcctctctccggacactcggccctcagcatccaagaattagtagccatgtccccggagctggacacctacggcataaccaagcgggtgaaggaggtgctgacggacaacaacctcggccagcgcttatttggggagaccatcttagggctcacccaaggctctgtctctgacctccttgcccgccccaaaccctggcataagctcagtctgaaaggacgagagcccttcgtccggatgcagctgtggctgaacgaccccaacaatgtggagaagctgatggacatgaaacggatggagaagaaagcctacatgaagcggcggcacagctcagtcagtgacagccagccctgcgaaccgccctctgtcggcaccgagtacagccagggcgccagcccccagccccagcaccagctgaagaaaccccgggtggtgctggctccggaggagaaggaggcgctgaaacgagcgtatcagcaaaagccatacccgtcaccaaaaaccatcgaagacctcgccacccagctcaacctgaaaaccagcaccgtcatcaactggttccacaactacaggtctcggatccgcagagaactgttcattgaggaaattcaggccgggagtcagggccaggcgggcgccagcgactcaccctcggcccgcagcggccgggcggcgcccagctcggagggcgacagctgcgacggcgtggaggccactgagggcccaggcagcgccgacaccgaggagcccaagtctcagggagaggccgagcgggaggaggtgccgcggccggcggagcagacggagccgccgccctcggggaccccgggcccggacgacgcccgcgacgacgaccacgagggaggccccgtggaaggcccggggcccctgcccagccccgcctccgcgaccgccaccgccgcgcccgcggcccccgaggacgccgctacctcagccgccgccgcgccgggggagggccccgcggccccgagctccgcgccgccgcccagcaacagcagcagcagcagcgccccccgcaggcccagctcgctgcagagccttttcggcctccccgaggccgcgggcgcccgggactcgcgcgacaaccccctgcgcaagaagaaggccgcgaacttgaacagcatcatccaccgcctggagaaggccgccagccgggaggaacctatcgaatgggagttctga

SEQ ID NO: 123299 - DNA, 4044 bp, Homo sapiens
  Payload ID: 4208
  Gene Symbol: CUX1
  Gene Name: cut-like homeobox 1
  Uniprot ID: P39880
  ENST ID: ENST00000556210
  CDS Start-End: 1-4044
atgttgtgcgtagccggagccaggttgaagagagaactcgatgccaccgcaacggtattggcgaaccggcaggatgaaagtgagcagtccagaaagcggcttatcgaacagagccgggagttcaagaagaacactccagaggatttgcgcaagcaggtagcgccgctgctgaagagtttccaaggagagattgatgcactgagtaaaagaagcaaggaagctgaagcagctttcttgaatgtctacaaaagattgattgacgtcccagatcccgtaccagctttggatctcggacagcaactccagctcaaagtgcagcgcctgcacgatattgaaacagagaaccagaaacttagggaaactctggaagaatacaacaaggaatttgctgaagtgaaaaatcaagaggttacgataaaagcacttaaagagaaaatccgagaatatgaacagacactgaagaaccaagccgaaaccatagctcttgagaaggaacagaagttacagaatgactttgcagaaaaggagagaaagctgcaggagacacagatgtccaccacctcaaagctggaggaagctgagcataaggttcagagcctacaaacagccctggaaaaaactcgaacagaattatttgacctgaaaaccaaatacgatgaagaaactactgcaaaggccgacgagattgaaatgatcatgacggaccttgaaagggcaaaccagagggcagaggtggctcagagagaggcggagaccttaagggaacagctctcatcggccaatcactccctccagctggcctcacagatccagaaggcaccagacgtggagcaggccatagaggtgctgacccgctccagcctagaagttgagttggccgccaaggagcgggagatcgcacagctggtggaggacgtgcagagactccaggccagcctcaccaagctgcgggagaattcggccagccagatctcacagcttgagcagcagctgagcgccaaaaacagcacactcaaacaactggaagaaaaactcaaaggccaggctgactatgaagaggtgaagaaagagctgaacattctgaagtccatggagtttgcaccgtccgagggcgctgggacacaggatgcggccaagcccctggaggtgctgttgctggagaagaaccgctcgctgcagtccgagaacgccgcgctgcgcatctccaacagcgacctgagcggtccatacagcacaaactccatatcttcccaaagtccattacaacaaagcccagatgtcaatggcatggccccatcccccagccagtcagaaagtgctgggagcgtctccgagggcgaggagatggacactgcagaaatcgcccggcaggtcaaagagcagctgattaagcacaatatcggacaacgtattttcggacattatgtgttgggactgtctcaagggtccgtgagcgagattctggcccggcccaagccatggaataaactgactgttcgtggcaaggagccatttcacaagatgaaacagttcctctccgatgagcagaacatcctggccctccgtagcatccaaggcagacaaagagcagagccggcccagccttcctccgcatccggcagcgggaactctgatgacgccatccgctccatcctgcagcaagcccgccgggagatggaggcccagcaggctgccctcgaccctgccttaaagcaggcaccactgtcccagagtgacatcaccatcctcacccccaagcttctgtccacctcgcccatgcccaccgtgtccagctacccacctctcgccatctccctgaagaagccctccgcagctcctgaggccggtgcctctgctctgccgaaccccccggccctcaaaaaggaggcccaggacgcccccgggctggacccccagggagcagccgattgtgcacaaggggtcctgagacaggtgaaaaatgaggtgggccgcagcggtgcctggaaggaccactggtggagcgcggtgcagccggagagaagaaatgccgcctcctccgaggaggccaaggccgaagaaacgggcggcgggaaagagaagggcagcggtggcagcggaggtggcagccagcctcgggccgagcgcagtcagctccagggaccctcgtcgtcagagtactggaaggagtggcccagcgctgagtccccatactcccagagctcagagctgagtctgaccggggccagccgcagcgagacaccacagaacagccccctgccatcctccccgatcgtgcccatgtccaagcccaccaagccctcggtccccccgctgacccccgagcagtacgaggtctacatgtaccaggaggtggacaccatcgagctcacccggcaggttaaggaaaagctggccaagaacggcatctgccagagaatcttcggggagaaggtgctgggcctgtcccagggcagcgtcagcgacatgctgtcccgaccgaagccatggagcaagctgacgcagaaaggccgagaacccttcatccggatgcagctctggctgaacggcgagctaggccagggtgttctacccgtccagggccagcagcaagggccagtcctccactccgtgacatcgctccaggacccgctgcagcagggctgtgtgagctcagaaagcactccaaagacctccgccagctgcagccctgcccctgagtccccgatgagttccagtgagtcggtgaagagcctgaccgagctggtccagcagccctgtccccccatcgaggcgagcaaggacagcaagccaccagagcccagtgacccgccagcatccgactcccagcccacaaccccgctgcctctctccggacactcggccctcagcatccaagaattagtagccatgtccccggagctggacacctacggcataaccaagcgggtgaaggaggtgctgacggacaacaacctcggccagcgcttatttggggagaccatcttagggctcacccaaggctctgtctctgacctccttgcccgccccaaaccctggcataagctcagtctgaaaggacgagagcccttcgtccggatgcagctgtggctgaacgaccccaacaatgtggagaagctgatggacatgaaacggatggagaagaaagcctacatgaagcggcggcacagctcagtcagtgacagccagccctgcgaaccgccctctgtcggcaccgagtacagccagggcgccagcccccagccccagcaccagctgaagaaaccccgggtggtgctggctccggaggagaaggaggcgctgaaacgagcgtatcagcaaaagccatacccgtcaccaaaaaccatcgaagacctcgccacccagctcaacctgaaaaccagcaccgtcatcaactggttccacaactacaggtctcggatccgcagagaactgttcattgaggaaattcaggccgggagtcagggccaggcgggcgccagcgactcaccctcggcccgcagcggccgggcggcgcccagctcggagggcgacagctgcgacggcgtggaggccactgagggcccaggcagcgccgacaccgaggagcccaagtctcagggagaggccgagcgggaggaggtgccgcggccggcggagcagacggagccgccgccctcggggaccccgggcccggacgacgcccgcgacgacgaccacgagggaggccccgtggaaggcccggggcccctgcccagccccgcctccgcgaccgccaccgccgcgcccgcggcccccgaggacgccgctacctcagccgccgccgcgccgggggagggccccgcggccccgagctccgcgccgccgcccagcaacagcagcagcagcagcgccccccgcaggcccagctcgctgcagagccttttcggcctccccgaggccgcgggcgcccgggactcgcgcgacaaccccctgcgcaagaagaaggccgcgaacttgaacagcatcatccaccgcctggagaaggccgccagccgggaggaacctatcgaatgggagttctga

SEQ ID NO: 123300 - DNA, 2990 bp, Homo sapiens
  Payload ID: 4208
  Gene Symbol: CUX1
  Gene Name: cut-like homeobox 1
  Uniprot ID: Q13948
  ENST ID: ENST00000622516
  CDS Start-End: 93-2123
gttttggcgccgcccgcctgctgcctcctggcggctcctgaactccagccccctctctatcagccgctcactccgtctcaatatgtctcaagatggcggccaatgtgggatcgatgtttcaatattggaagcgctttgatttacagcagctgcagagagaactcgatgccaccgcaacggtattggcgaaccggcaggatgaaagtgagcagtccagaaagcggcttatcgaacagagccgggagttcaagaagaacactccagaggatttgcgcaagcaggtagcgccgctgctgaagagtttccaaggagagattgatgcactgagtaaaagaagcaaggaagctgaagcagctttcttgaatgtctacaaaagattgattgacgtcccagatcccgtaccagctttggatctcggacagcaactccagctcaaagtgcagcgcctgcacgatattgaaacagagaaccagaaacttagggaaactctggaagaatacaacaaggaatttgctgaagtgaaaaatcaagaggttacgataaaagcacttaaagagaaaatccgagaatatgaacagacactgaagaaccaagccgaaaccatagctcttgagaaggaacagaagttacagaatgactttgcagaaaaggagagaaagctgcaggagacacagatgtccaccacctcaaagctggaggaagctgagcataaggttcagagcctacaaacagccctggaaaaaactcgaacagaattatttgacctgaaaaccaaatacgatgaagaaactactgcaaaggccgacgagattgaaatgatcatgacggaccttgaaagggcaaaccagagggcagaggtggctcagagagaggcggagaccttaagggaacagctctcatcggccaatcactccctccagctggcctcacagatccagaaggcaccagacgtggccatagaggtgctgacccgctccagcctagaagttgagttggccgccaaggagcgggagatcgcacagctggtggaggacgtgcagagactccaggccagcctcaccaagctgcgggagaattcggccagccagatctcacagcttgagcagcagctgagcgccaaaaacagcacactcaaacaactggaagaaaaactcaaaggccaggctgactatgaagaggtgaagaaagagctgaacattctgaagtccatggagtttgcaccgtccgagggcgctgggacacaggatgcggccaagcccctggaggtgctgttgctggagaagaaccgctcgctgcagtccgagaacgccgcgctgcgcatctccaacagcgacctgagcggacgctgtgcggagctgcaagtccgtatcactgaggctgtggccacagccactgagcagagagagctgatcgcccgcctggagcaggacctgagcatcattcagtccatccagcggcccgatgccgagggtgccgctgagcaccgcctggagaagatcccagagcccatcaaagaggccactgccctattctacggacctgcagcaccagccagcggtgccctcccagagggccaggtggattcactgctttccatcatctccagccagagggagcgcttccgtgcccggaaccaggagcttgaggccgagaaccgcctggcccagcacaccctccaggccctgcagagtgagctggacagcctgcgcgccgacaacatcaagctctttgagaagatcaagttcctgcagagctaccctggccggggcagcggcagtgatgacacggagctgcggtactcgtcccagtacgaggagcgcctggaccccttctcctccttcagcaagcgggagcggcagaggaagtacctgagcttgagtccctgggacaaggccaccctcagcatggggcgtctggttctctccaacaagatggcgcgcaccatcggcttcttctacacactgttcctgcactgcctggtcttcctggtgctctacaagctggcatggagcgagagcatggagagggactgtgccaccttctgcgccaagaagttcgctgaccacctgcacaagttccacgagaatgacaacggggctgcggctggtgacttgtggcagtgataccccggggcctcccccgtgacagtgacggctgcgcctccaccccgactgctcagtgcatctaatcacttagactcccctgaagaatcccccatggaaactgcccttatccgctgtccagcagctgccagaggccccaggtcacctcgggtccccttgaaagaatgtctcggtcacatcaggcccgctaggtccagagagcgagcccccaatgcccggccaggctaagccgcagagaccctctcagcccccacctcaggttagggctctgcccgcagcctgacctctagccctggtggcagaggtccctcagctgcgaggctaattgggtgaccaccgattccagctgcggttaatccagcttgggcctgtctgcactgcgatcctcttgggctctcctaggatccccccatgccccgtaagaggtggaagacgcttccttccaggacagcaggctttgagtccagcacccccagcctgcctttgccaccagccccaccctgcagagtatatgaggcttgacagagtctgccccctcccccactgcaccccaagagagagagccccagccagcggaacagtttctattaccccctccctgcccccagacccatgtgatttctgctttcttctttagcaagatattctggtttctagataaggaagagtctctaatgagcccccgagccccagtctcttcagactcatggattggtatgaggggtctgaacgtctcctagccaatcagaactggctgtggaccaccctagcacggccacctctcagggccactggcaggccttcctgagttagatttgtagttgcatatttagctttgcacatttgaaataaaccacggttgcagcc

SEQ ID NO: 123301 - DNA, 6844 bp, Homo sapiens
  Payload ID: 4209
  Gene Symbol: CUX2
  Gene Name: cut-like homeobox 2
  Uniprot ID: O14529
  ENST ID: ENST00000261726
  CDS Start-End: 155-4615
ggccggagggcgcccgaggggccccgggccgcggcgctcagggcccgggcggccggcggcggccccggggctggggggagtccagcccggatattgagtgcagccattgagaaaagccaaactcttgtgtgtgcgcgtctcgatagcccccaagatggccgccaatgtgggatcgatgtttcaatattggaagcgatttgatctacggcgactccagaaggagcttaattccgtcgcttctgagctgtctgcacggcaggaggagagtgaacattctcataaacatttaattgaactccgccgggaatttaagaaaaatgtacctgaggaaatcagagagatggtggctcctgtattaaaaagcttccaagccgaggtggtggcccttagtaagagaagtcaggaggcggaggctgcttttctgagtgtttacaagcaattaattgaagcaccagaccccgtgcctgtgtttgaggcggcacgcagcctagacgacagactgcagccccccagctttgaccccagtgggcagccccggcgagacctccacacttcgtggaagaggaaccccgagctcctcagccccaaagagcagagagaggggacgtcgcctgccgggcccacgctgaccgagggaagccgcctcccaggcattcccgggaaagccctcctgacagaaaccttgctgcagagaaatgaggcggaaaaacaaaagggccttcaagaagtacagatcactttggcggccagactgggggaggcagaggagaaaatcaaagtcctacattcagcgctaaaggctacgcaggcagagctgctagagctgcggcggaagtacgacgaggaggcagcatccaaggcagatgaagtcggcctgatcatgaccaacctggagaaagctaatcagcgagctgaggctgcccagcgggaggtggaaagtctccgggaacagctggcctctgtcaacagctccatccgcctggcttgctgctctccccaggggcccagtggggataaggtgaacttcactctgtgctcgggccctcggctggaggccgcgctggcctccaaggacagggagatcctgcggctgctgaaggacgtgcagcacctccagagctcactgcaggagctggaggaggcatccgccaaccagatcgccgacctggagcggcagctcacggccaagtccgaggccatagaaaagctggaagagaagctccaggcccagtctgactatgaggaaattaaaacggagctgagcatcctgaaagccatgaagctggcctccagcacctgcagcctcccccagggcatggccaagcctgaagactcactgcttattgcaaaggaggccttcttccccacgcagaaattccttctggagaagcccagcctcctggccagccctgaggaagacccatcagaggacgattccatcaaggattcactgggcacggagcagtcctacccctcccctcagcagctcccacctccaccagggccagaagaccccctgtctcccagccccgggcagcccctgctgggccccagcttggggcctgacggcactcggactttctcgctgtcccccttccccagcctggcatcaggggagagactgatgatgcccccagccgccttcaagggagaggcgggcggcctgctggtgttccccccagccttctatggcgccaagccccccacagcccctgccaccccggcccctggccctgagccactgggcggtcctgagcccgcggatggtggtgggggcggagcggcggggcccggggcagaggaggagcagctggacacggcagagatcgccttccaggtgaaggagcagctgctgaaacacaacatcgggcagcgggtgtttgggcattacgtgctggggctgtcgcagggctcggtcagcgagatcctagcccggcccaagccctggcgcaagctcacggtgaagggcaaggagcccttcatcaagatgaagcagttcctgtcggatgagcagaatgtactggcgctcaggaccatccaagtgcggcagcgaggcagcatcaccccgagaatccgcacgcctgagacaggctcagacgacgccatcaagagcattctagagcaggccaagaaggagatcgagtcgcagaagggcggcgagcccaagacctcggtggccccgctgagcatcgccaacggcacgacccccgccagcacctcggaggacgccatcaagagcatcctggagcaggcacgccgtgagatgcaggcgcaacagcaggcgctgctggagatggaggtggcgcccaggggccgctcggtgcccccctcgcccccggagcggccatcactggccaccgcgagccagaacggggccccggccttggtgaagcaggaggagggcagcgggggccccgcgcaggcgccgctcccggtcctgtcccccgccgccttcgtgcagagcatcatccgcaaggtcaagtccgagatcggcgacgccggctacttcgaccaccactgggcctccgaccgcggcctgctcagccgcccctacgcctccgtgtcgccctcgctgtcctcctcctcctcctctggctactctggccagcccaacggccgcgcctggccccgcggggacgaggcccctgtgccccccgaggacgaggcggcggcaggggcggaggacgaaccccccaggacgggcgagctcaaggctgagggcgcgacggccgaggcgggcgcgcggctgccctactacccggcctacgtgccgcgcaccctgaagcccaccgtgccgccgctgacccccgagcagtacgagctgtacatgtaccgtgaggtagacacgctggagctcacccgccaggtcaaggagaagctggccaagaacggcatctgccagaggatcttcggggagaaggtgctgggcctgtcacagggcagcgtgagcgacatgctgtcccggccgaagccatggagcaagctgacgcagaaggggcgggagcccttcatccgcatgcagctgtggctctctgaccagctcggccaggcagtgggccagcagcctggtgcctcccaggccagtcccacagaaccaaggtcctcaccatccccaccccccagccccacagagcctgagaagagctcccaggagccgttgagcctgtccctggagagcagcaaggagaaccagcagccagagggccgctccagctcctcgttgagcgggaagatgtactcaggcagccaggccccagggggcatccaggagatcgtggccatgtcccccgagctggacacgtactccatcaccaagagggtgaaggaggtcctcacagacaacaatctagggcagcggctgtttggggaaagcatcctgggtctgacacagggctccgtgtctgacctgctgtcccggcccaaaccctggcacaagctgagcctgaaggggcgggagccttttgtccgcatgcagctgtggctcaatgacccccataacgtggagaagctgagggatatgaagaagctggagaagaaagcctacctgaaacgtcgctatggcctcatcagcaccggctcagacagtgagtccccggccacccgctcagagtgccccagcccctgcctgcagccccaggacctgagcctcctgcagatcaagaagccccgggtggtgctggcacccgaggagaaggaggcactgcggaaggcctatcagctggaaccctacccctcgcagcagaccatcgagctcctctccttccagctcaacctcaagaccaacaccgtcatcaactggttccacaactacaggtcccggatgcgccgggagatgttggtggaggggacccaggatgagccagaccttgatccaagcgggggtcctggaatcctaccgccaggccactcccacccagaccccaccccgcagagccctgactctgagactgaggaccagaagccaaccgtgaaggaactggagcttcaggagggccctgaggagaacagcacacccctgaccacccaggacaaggcccaagtgaggatcaagcaggaacagatggaggaggatgctgaggaagaggcaggcagccagccccaggactcaggggagctggacaaaggccaaggtccccccaaagaggagcatcccgaccctccgggtaatgatggactcccaaaagtggctcccgggcccctccttccaggtggatccaccccagactgtccctcacttcatccccaacaggagagtgaggccggggagcgacttcacccggaccctttaagttttaagtcagcctcagagtcctcacgctgcagcctggaggtgtcactgaactcgccctcggccgcctcctcaccaggcctcatgatgtctgtgtcacctgtcccctcctcctcagctcccatctccccatccccacctggcgccccccctgccaaagtgccgagtgccagccccactgctgacatggctggagccttgcaccccagtgccaaggtgaaccccaacttgcagcggcggcatgagaagatggccaatctgaacaacatcatttaccgagtagagcgggctgccaatcgggaggaggccctggagtgggagttctgaaggcagggtgagggggcaagggacataccctggtaactaccttccttctcgcacttactctcctcaacaggatggggtaagggagggaggaactcaaccatcaaaatgtggacagcaatgttatgccgtttacgttttttgttgtaatcctagttctatgaagctgtgtgagcaggtgggtcaaatgccattgcctccacttttctgcacccccctgctcctcttcaccctgacccctctgcaggaggcagaagcaaaatggcaccacatattcacctgaaaactccaaactcttttagaaaaataaataaatatttatagacctcttttagatattttaataaaggatcctttggaatttatcccagctgatgctgttttgatattacagagagttataaaatcaggatgctgtcacaactgttgcgaagtatacactgaagttgtgtcgtttttgccactagatgagattaaaagaagacaattattcaaagccatcacaaaacactataagactgaccaaaatttagataacctttgaaccacgatttttttccacatctgtctgtgagacacagcgcaatgctactgcccttccagaaactgtgctaaaaagagaaagtccaaaagactctaaacaaaaacctcgacgccgttgaggatgtgtttcattctggtggtctgttttgcaagcttgataacagaatgtccgtgccattgtaaatgttgtagagatgtgggccgtggcccaaccgtcctatatgagatgtagcatggtacagaacaaactgcttacacaggtctcactagttagaaacctgtgggccatggaggtcagacatccatcttgtccatctataggcaagaagtgtttccagatcctttggaaaggtgggcatggggcaggtgcttggagagtggcgtttgagccagagcgaccccatttcccgtgtgaaccataggcacaacccaggaagtttccccacttgtaggagtgtgggtattccagagcaagactgtggccaccatcttcccctcttggtgttttccgaaagtgacagtgttggtcatcccatgaccactgaagcttagtaaccagcgccaaaaagtagattcatcaaactagagaccccagctccccttctcgccatcttctttctcaagttgaccgtggtgctgtttctggaaggcatctgcaactccaagtccatgcagaactctggaaggccaagttcatcgcagcatgttcaccatatcccagcctccaaatctatcctcctaccttccaacgcatgacctgttggggagcagagacttaacccccaactcagaggaacccttcctccagcgtctttggcatggtttctagggtgagagttcccaatttggatagaacggccaccatattggttactgaatctctctcccttgtttttattacgtttcctttttcaaactgtccatgggaaggctgaattgagtgactccccagaatgaagatgagaaggtgaatataatcaatgccaatgtaatgccagcgggtgagatggccgatggaggtttcaaagatgtagctagcattttgaaaccatatgggcaaaacccggcaaccagaaggggacagataaggaccgttccagaaatcccaactctcacacccagcccaggctgcagtctccacaccaaacagtcaacaaaacacaaaccctgaaggaaaaccttttccatacacccaggctatgcattgaagagttttccactgtatacatttttatccagatgaaggtatttttatattttgacaataggaaacagtgaccattttcagagtaatcaaatctggaacaaatgaaacatcttttagccaccaccaccctgttgcaattaagacaaccgtgggggaacacaccactttttactgttgaaaccaacacaacgttgaaatccaggcttatacgcagactccgattcctagagaactaaatttggctttagtgtgacgggatttgattaagcacttagtatagtcttttgaacacggaaatcctgttgtacttaaagctagcggacccgtgaacaactttgtcaggttcacgtcctataacggttaaaaaacacacacacacatacacaaaccgtttctatgagagattgatgaactttgtttaaaattttaaaaaaaggaacacgttctgtaaacgagtcgctaaatacagaattgtataataa

SEQ ID NO: 123302 - DNA, 890 bp, Homo sapiens
  Payload ID: 4209
  Gene Symbol: CUX2
  Gene Name: cut-like homeobox 2
  ENST ID: ENST00000397643
  CDS Start-End: 137-890
cccggaaagccaggttgggtcactgctgggaggtatgaggtgagactcgggtttgcaggcagggcaagttgtggggaggtgggggtggccccctatttgttgggggcagacctgccatttgaaagccaccatcctcatgtgtagccctcacatgggagaacaggattggacctgcagggatcctggctgggagcagaacctgcgtcagctcagagtcctgtgggaagggaacggctttatcgcagcctttcgcttttatttttgcacattcgctttttatttgccggtggtgctgctgacgggccctcggagcggggctgtgtctggacacttctgggagccttggacggctctggagaggaggcaggagctgcccaggaaggagcttaattccgtcgcttctgagctgtctgcacggcaggaggagagtgaacattctcataaacatttaattgaactccgccgggaatttaagaaaaatgtacctgaggaaatcagagagatggtggctcctgtattaaaaagcttccaagccgaggtggtggcccttagtaagagaagtcaggaggcggaggctgcttttctgagtgtttacaagcaattaattgaagcaccagaccccgtgcctgtgtttgaggcggcacgcagcctagacgacagactgcagccccccagctttgaccccagtgggcagccccggcgagacctccacacttcgtggaagaggaaccccgagctcctcagccccaaagagcagagagaggggacgtcgcctgccgggcccacgctgaccgagggaagccgcctcccaggcattcccgggaaagccctcctgacagaaaccttgctgcagagaaatgaggcggaaaaacaaaagggccttcaagaag

SEQ ID NO: 123303 - DNA, 1576 bp, Homo sapiens
  Payload ID: 4210
  Gene Symbol: CWC15
  Gene Name: CWC15 spliceosome-associated protein
  Uniprot ID: Q9P013
  ENST ID: ENST00000279839
  CDS Start-End: 124-813
ggattttgcttccgggtcgtaggcgctagctctgggcgcagaggtttctgggagccaagagtggtaatggcgtctgtatgatcttcggagcctgctgcatcggacctcggccagtcataaaagatgacaacagcagccaggccaacctttgaacctgccagaggtggaaggggaaaaggagaaggtgatttgagccaactttcaaagcagtattcaagcagagacctaccctctcatacaaagataaaatacagacagactactcaggatgcccctgaagaggttcgtaaccgtgacttcaggagagagttggaagaaagagagagagctgctgcaagagagaaaaatagggatcgtccaacccgagaacatacaacctcctcttcagtgtcaaaaaagccacggttagaccagattcctgccgccaaccttgatgcagatgaccctctaacagatgaggaagatgaagattttgaagaagaaagtgatgatgatgatactgcagctcttcttgcagaactggaaaaaattaaaaaagaaagagctgaagagcaggccaggaaggaacaagaacaaaaagctgaagaagagaggattcgtatggaaaacattctgagcggaaaccctctccttaatctcactggcccatcccagcctcaggccaacttcaaagttaaaagaaggtgggatgatgacgttgtcttcaagaactgtgcaaaaggtgtagatgaccagaagaaagacaaaagatttgtaaatgacacactgcgatctgaatttcacaaaaagttcatggagaaatatattaaatagtacagttttatgtgcttaattaaagactgtaaaacgtaaaggatcattctgactttttttatgagttttttttttcttttcccctgtctaaattgtgtgtgggcttccccagttttaaactcctatctttttctttagtgataccttacttgataatggacttgggaataggtttaacccagtttgcattctccaaatgtttccagtgatatgttttcctgggaaaagcaaatctgcctgtaataaatatttttaatctaaataaccaaatctgggtgcccaactttttgttggaatttatgctgctagtaatacattccataatatcttttgaaaagaaaaattaccattgtgtattgtgcttgtgcattaacttgtccttttccccctgtttctctcacatttaagatgagttaattcatattttctctgcattttttaaaagagtgtaatggaagatgagagggattctattttggaccacatgttggtgtggaggagtgtcattgacagtaagcaccccaggcgtgtgtctgggagagcattgggtatcgctcacttctgcaggtacttgtttttttttctcatggccgaagaggagagctctgtaagcattcttttaaagtatacggtactcacttgtgttctggatactcaactgccatgtttcctttgaaagagattgaatatgcacctgacatgcatttagtgcaaagcctgagaaagcttcaaacaatatataaaataaaacctttggaaataa

SEQ ID NO: 123304 - DNA, 2392 bp, Homo sapiens
  Payload ID: 4211
  Gene Symbol: CWC22
  Gene Name: CWC22 spliceosome-associated protein
  ENST ID: ENST00000404136
  CDS Start-End: 158-2392
aagtgacgtacgtccggtgtaatggcggcgcggtggagctctaggtgatgtttgcagacagaaaaagtaaactgtcaaggaattcagagcattgggtacttgttatttggaccagtttgaagcatctttgatttattggaccaactggcaacagaaaatgaaaagtagtgtggcacagataaaaccttcttctggtcatgacagaagggaaaaccttaattcatatcagaggaactcctctccagaagacagatatgaagaacaagaacgatccccccgggatagagattactttgattacagcagatcagactatgagcattcaagaagaggacgttcttatgatagtagcatggagtcacgaaacagggaccgagaaaaacgcagagaaagagaaagagatacggatcggaaaaggtctcggaaatccccatctcctgggaggagaaacccagaaacatcagtaactcagagttcctctgctcaggatgaacctgctacaaagaaaaagaaagatgagctggatcctcttcttactcgcactggtggagcatatattccccctgcaaagctcaggatgatgcaggaacagattacagataaaaacagcttagcataccagaggatgagttgggaggccctgaagaagtcaattaatggccttatcaacaaagtcaacatttccaacataagtattattattcaagagcttcttcaagaaaatatagttagaggaagaggactgctgtccaggtctgttttgcaagcacagagtgcttctccaatcttcacccatgtttatgcagcattagtggcaattatcaactcaaaatttccacaaattggagaattaatcctcaaaaggttaattcttaattttcgaaaaggctatcgaagaaatgacaagcaactttgcctgactgcttcaaaatttgtggcgcatcttattaaccaaaatgtggcacacgaagtattatgcttagagatgctcactttgctcctggaaagaccaacagatgatagcgttgaagtagctattggttttcttaaggaatgtggcctcaaattaacacaagtgtcaccaagaggaatcaatgctatatttgaacgccttcgaaacattctgcatgagtctgaaattgacaaaagagttcaatatatgattgaagtgatgtttgctgtacggaaagatggattcaaggaccaccccattatcctagaaggtcttgatttggtggaagaagatgatcaattcactcatatgctccctctggaggatgactataatccagaagatgttcttaatgttttcaagatggatcctaattttatggagaatgaagagaagtacaaagctattaagaaagaaattcttgatgagggagatactgactcgaacacagaccaggatgctgggagtagtgaagaggacgaggaagaagaagaggaagagggagaagaagatgaagaaggacaaaaagtaactattcatgacaaaacagaaattaacctggtctcatttcgtcgtacaatttatcttgctattcagtcaagtttagattttgaagaatgtgctcacaaattgctgaaaatggagtttcctgaaagccaaacaaaagaactctgcaacatgatacttgattgctgtgcccaacagaggacatacgaaaaattttttggcttattagctgggcgattttgcatgctaaagaaagagtacatggaatcctttgaaggtatattcaaagaacagtatgataccatccatcgcttggaaacaaacaagttgcgaaatgttgctaagatgtttgctcaccttttatacactgattcacttccatggagtgttcttgaatgtataaaactgagtgaagaaaccactacatcatccagtagaatttttgtcaaaatatttttccaggaactgtgtgaatacatgggtcttcctaaacttaatgcaagattaaaggatgaaactctgcagccattctttgaaggattattaccccgagataatccaagaaacactcggtttgccatcaacttctttacttctataggtcttggaggtttaacggatgaactgcgggagcatctcaaaaatacaccaaaggtcattgtggcgcagaaaccagatgttgagcaaaataaatcctccccatcctcttcctcttcagcgtcctcctcttcagagtctgactcatccgactctgattctgacagcagtgatagcagttcagagtcttccagtgaagagagcgactcttcatccatcagtagtcatagctctgcctcagctaatgatgtaagaaagaagggacatgggaagaccagaagtaaagaggtagataaattgatcagaaaccagcaaacaaatgataggaaacaaaaa

SEQ ID NO: 123305 - DNA, 3280 bp, Homo sapiens
  Payload ID: 4211
  Gene Symbol: CWC22
  Gene Name: CWC22 spliceosome-associated protein
  Uniprot ID: Q9HCG8
  ENST ID: ENST00000410053
  CDS Start-End: 301-3027
gtggagtccccgcaggcagagacgcggagtgggggtggcgggtcgccggatcgggtgggaagtaaaagacccccaggagtgggtgcgggctcactgatacggctgtgagcggcattggagtgtgcgtgggtcttctcgctacgctcgggcccgcaagaggggtgtgagagcggctaggtccaagcaggtgatgtttgcagacagaaaaagtaaactgtcaaggaattcagagcattgggtacttgttatttggaccagtttgaagcatctttgatttattggaccaactggcaacagaaaatgaaaagtagtgtggcacagataaaaccttcttctggtcatgacagaagggaaaaccttaattcatatcagaggaactcctctccagaagacagatatgaagaacaagaacgatccccccgggatagagattactttgattacagcagatcagactatgagcattcaagaagaggacgttcttatgatagtagcatggagtcacgaaacagggaccgagaaaaacgcagagaaagagaaagagatacggatcggaaaaggtctcggaaatccccatctcctgggaggagaaacccagaaacatcagtaactcagagttcctctgctcaggatgaacctgctacaaagaaaaagaaagatgagctggatcctcttcttactcgcactggtggagcatatattccccctgcaaagctcaggatgatgcaggaacagattacagataaaaacagcttagcataccagaggatgagttgggaggccctgaagaagtcaattaatggccttatcaacaaagtcaacatttccaacataagtattattattcaagagcttcttcaagaaaatatagttagaggaagaggactgctgtccaggtctgttttgcaagcacagagtgcttctccaatcttcacccatgtttatgcagcattagtggcaattatcaactcaaaatttccacaaattggagaattaatcctcaaaaggttaattcttaattttcgaaaaggctatcgaagaaatgacaagcaactttgcctgactgcttcaaaatttgtggcgcatcttattaaccaaaatgtggcacacgaagtattatgcttagagatgctcactttgctcctggaaagaccaacagatgatagcgttgaagtagctattggttttcttaaggaatgtggcctcaaattaacacaagtgtcaccaagaggaatcaatgctatatttgaacgccttcgaaacattctgcatgagtctgaaattgacaaaagagttcaatatatgattgaagtgatgtttgctgtacggaaagatggattcaaggaccaccccattatcctagaaggtcttgatttggtggaagaagatgatcaattcactcatatgctccctctggaggatgactataatccagaagatgttcttaatgttttcaagatggatcctaattttatggagaatgaagagaagtacaaagctattaagaaagaaattcttgatgagggagatactgactcgaacacagaccaggatgctgggagtagtgaagaggacgaggaagaagaagaggaagagggagaagaagatgaagaaggacaaaaagtaactattcatgacaaaacagaaattaacctggtctcatttcgtcgtacaatttatcttgctattcagtcaagtttagattttgaagaatgtgctcacaaattgctgaaaatggagtttcctgaaagccaaacaaaagaactctgcaacatgatacttgattgctgtgcccaacagaggacatacgaaaaattttttggcttattagctgggcgattttgcatgctaaagaaagagtacatggaatcctttgaaggtatattcaaagaacagtatgataccatccatcgcttggaaacaaacaagttgcgaaatgttgctaagatgtttgctcaccttttatacactgattcacttccatggagtgttcttgaatgtataaaactgagtgaagaaaccactacatcatccagtagaatttttgtcaaaatatttttccaggaactgtgtgaatacatgggtcttcctaaacttaatgcaagattaaaggatgaaactctgcagccattctttgaaggattattaccccgagataatccaagaaacactcggtttgccatcaacttctttacttctataggtcttggaggtttaacggatgaactgcgggagcatctcaaaaatacaccaaaggtcattgtggcgcagaaaccagatgttgagcaaaataaatcctccccatcctcttcctcttcagcgtcctcctcttcagagtctgactcatccgactctgattctgacagcagtgatagcagttcagagtcttccagtgaagagagcgactcttcatccatcagtagtcatagctctgcctcagctaatgatgtaagaaagaagggacatgggaagaccagaagtaaagaggtagataaattgatcagaaaccagcaaacaaatgataggaaacaaaaagaaagaagacaagaacacgggcaccaggaaacaaggactgagagagaaagaaggtcagaaaaacacagagatcaaaattcaagtggttcaaattggagagatcctataacaaagtacacatcagacaaagatgttccttctgaacgaaataactacagtagagttgcgaatgacagagaccaagaaatgcatatagatttggaaaataagcatggtgatcccaaaaagaagagaggagagagaagaaattctttttctgaaaatgagaagcatacacaccgaattaaagacagtgaaaatttcagaagaaaagatagatcaaagtcaaaggaaatgaatagaaagcactcaggctcaagaagtgatgaagatagatatcaaaatggtgccgagagacgatgggaaaaatctagcagatactctgaacaatccagagaatcaaagaaaaatcaggaccggcgaagagaaaagtctccagcaaaacaaaaataattctacaaaatgacataaactggacatgccttatattcagttgaaacaaattattttttactttgacgaactttatagagaattcttgtataaagtattggtttgtatttgtaaatttaaaaaatgttttcattttaacatgttttataattgatacatctcaaggccctacccataaaattatttgaaaactttcaccagaaagggatgtaagtctcgcttatattttgtgaataaaatgatcaaaagctca

SEQ ID NO: 123306 - DNA, 3234 bp, Homo sapiens
  Payload ID: 4212
  Gene Symbol: CWC25
  Gene Name: CWC25 spliceosome-associated protein homolog
  Uniprot ID: Q9NXE8
  ENST ID: ENST00000614868
  CDS Start-End: 299-1576
agccaaaatgagacctcgacagcaaaggcctcgacagcggagcccggacctttgcaaaatctgcaagtaacgccaacgtcacaaagcgcgaccgagccctgtacgtcatcgttccgcgacgccgacgcggtgagatgacgccctcccggaagtgacctctagagcggtggtgaaactggcagttgacggctcctgggactagatcccgcgaggtagcccccgaactatttctctacgttttctcttgatcctcccgaaatcttccagatccgcgtagtgaggaatcgtctccaccgtcatggggggcggagacctgaatctgaagaagagctggcacccgcagaccctcaggaatgtggagaaagtgtggaaggccgagcagaagcatgaggctgagcggaagaagattgaggagcttcagcgggagctgcgagaagagagagcccgggaagagatgcagcgctatgcggaggatgttggggccgtcaagaaaaaagaagaaaagttggactggatgtaccagggtcctggtgggatggtgaaccgtgacgagtacctgctggggcgccccattgacaaatatgtttttgagaagatggaggagaaggaggcaggctgctcttctgaaacaggacttctcccaggctctatctttgccccatcaggtgccaattcccttcttgacatggccagcaagatccgggaggacccactcttcatcatcaggaagaaggaggaggagaaaaaacgagaggtattaaataatccagtgaaaatgaagaaaatcaaagaattgttgcaaatgagtctggaaaaaaaggagaagaagaaaaagaaggagaagaaaaagaagcacaagaaacataagcacagaagctcgagtagtgatcgttccagcagcgaggatgagcacagtgcagggagatcacagaagaagatggcaaattcctcccctgttttgtccaaagtccctggatatggcttacaggtccggaactctgaccgtaaccagggtcttcagggtcctctgacagcagagcaaaagagagggcatgggatgaagaaccattccagatccagaagctcctcccactcacccccaagacatgccagcaagaagagcaccagggaagcagggtcccgggacaggaggtctcgatccctgggcagaaggtcacggtccccaagacccagcaaactgcacaactctaaggtgaacaggagagagacaggccaaactaggagcccatcacctaaaaaagaggtctaccaaaggcgacatgctcccggatacaccagaaaactctctgcagaggaattagagcgaaaacggcaagagatgatggaaaacgccaaatggagggaggaggagagactgaacatcctcaagaggcatgctaaggatgaggaacgggagcagaggctagagaagctggactcccgggatgggaagttcatccaccgcatgaagctggagagtgcatctacttcctccctggaggatcgggtgaagcggaatatctactctttacagagaacttcggtagctctggagaagaactttatgaaaagatgaaaactgtcccctctcttattggttttcctgcattttccagggaagctgctgaccccttaattctctttataagagttcaaatgacttctttcacagatgtcaaaccaccagtgttcaaagtgaccctgcttcattgagtcctgaaacagctcacttcctttgagagctagtgtgacttgctttgtgggacactcagtaactttgggttttgactctttaacgggtgggcactggaccatctcggtgggagtgcttgtgccactctggaaggctgttccctggggttgtgatgtttatcatgccacttccttcttacctgtgccaacagacctatttcactgcctcagcgtacaccagacccttcagaaacctctctggtgtcacccagatagattgtgcttactgagacaaatgaacgtttacttgatttagaagataatgtgacagaatgatgtcaggttaggtcaaagccaagggagtgacagaatctggaaaatcaaacaatacaaaaagccctaaatgaactgttaactatttgatctttggatgtaaaattgtaatgcgtatatgtacaaatgtacaatttttacatgcttttaaaaaaggttagctttgtgaaaataccttgtttggtcaatgactttactgggtaatagaaccacattgaaccttgatggcaagtaatacaataaggcaggccagctcgtttttctctctgaatctggctggtttaggaggagcctgggtttatcgacgagatctggagtatctattcttttccactgcttgcagtctccaatgtaggcagtgtaaaggtatagtaaaatgattttaggagtcagaaccaaattgccaatatgctccatggctcctaaaggaaaataaaatggaagtttttattttgcggcttcacttcttaccgtgtagtaaccttactacaattacagattttcaggagttgtttgctagtctctttcagtcaggtactaaaaaaaaaacaaaaaacaggctgggcgcggtggctcacacctgtaatctcagcactttgggaggctgaggtgggcggatcacgaggtcaggagatcgagaccatcctggcgaacacggtgaaaccccgtctctactaaaaaaatacaaaaaattagccgggcgtggtggcgggcgcctgtagtcccagctactcgggaggctgaggcaggagaatggcgtgaacccaggaggcggagcttgcagtgagccgagattgtgccaccgcactccagcctgggtgacagagcgagattccgtctcaaaaaacaacagcaacaaaacaaaaccctcgaggggccactctcctgtctttactccttttcccttctctattctttcaccagaagccctcatttgaccagtgaactcctaggccctcttgacccgcacattagctgggcgatttccttgttctgctaattcctaattctgcttaaaatgtatttggatttctgtttttgaacacttatgatgccaggcactgtaatgcttgaaacccgatctttccctagagaatgtaacatacgtttttattcatttaatcacttcattatgccggggttaattatgtttattttataattggtaataaaggccacatttatttttgtaactgtttaaagagcgac

SEQ ID NO: 123307 - DNA, 3234 bp, Homo sapiens; identical to SEQ ID NO: 123306
  Payload ID: 4212
  Gene Symbol: CWC25
  Gene Name: CWC25 spliceosome-associated protein homolog
  Uniprot ID: Q9NXE8
  ENST ID: ENST00000614790
  CDS Start-End: 299-1576

SEQ ID NO: 123308 - DNA, 1160 bp, Homo sapiens
  Payload ID: 4212
  Gene Symbol: CWC25
  Gene Name: CWC25 spliceosome-associated protein homolog
  ENST ID: ENST00000618122
  CDS Start-End: 1-10
ttggaaatgaaagcataatataaagactctgtaaaggagactcgagaagctctgagccaagatccacaccccatgttgaggaacactggttttccttataaattgctttatgaaaaaagaagaaaagttggactggatgtaccagggtcctggtgggatggtgaaccgtgacgagtacctgctggggcgccccattgacaaatatgtttttgagaagatggaggagaaggaggcaggctgctcttctgaaacaggacttctcccaggctctatctttgccccatcaggtgccaattcccttcttgacatggccagcaagatccgggaggacccactcttcatcatcaggaagaaggaggaggagaaaaaacgagaggtattaaataatccagtgaaaatgaagaaaatcaaagaattgttgcaaatgagtctggaaaaaaaggagaagaagaaaaagaaggagaagaaaaagaagcacaagaaacataagcacagaagctcgagtagtgatcgttccagcagcgaggatgagcacagtgcagggaggtgagcatgtggcgactggcctcccttctcgttgattcacttgctcattcactcattcattccacagacatgaacacctgccctgtgctggaagctgccaggtactgggcattcagtgatgaacacttgaacatgggcccagtgcccacagagcttgccatctaatgctagagttccttggagatgctaaatatcacagaagaagatggcaaattcctcccctgttttgtccaaagtccctggatatggcttacaggtccggaactctgaccgtaaccagggtcttcagggtcctctgacagcagagcaaaagagagggcatgggatgaagaaccattccagatccagaagctcctcccactcacccccaagacatgccagcaagaagagcaccagggaagcagggtcccgggacaggaggtctcgatccctgggcagaaggtcacggtccccaagacccagcaaactgcacaactctaaggtgaacaggagagagacaggccaaactaggagcccatcacctaaaaaagaggtctaccaaaggcgacatgctcccggatacaccagaaaactctctgcagaggaattagagcgaaaacggcaagagatgatgg

SEQ ID NO: 123309 - DNA, 650 bp, Homo sapiens
  Payload ID: 4212
  Gene Symbol: CWC25
  Gene Name: CWC25 spliceosome-associated protein homolog
  ENST ID: ENST00000619462
  CDS Start-End: 1-180
ttgcaaatgagtctggaaaaaaaggagaagaagaaaaagaaggagaagaaaaagaagcacaagaaacataagcacagaagctcgagtagtgatcgttccagcagcgaggatgagcacagtgcagggagacatgaacacctgccctgtgctggaagctgccaggtactgggcattcagtgatgaacacttgaacatgggcccagtgcccacagagcttgccatctaatgctagagttccttggagatgctaaatatcacagaagaagatggcaaattcctcccctgttttgtccaaagtccctggatatggcttacaggtccggaactctgaccgtaaccagggtcttcagggtcctctgacagcagagcaaaagagagggcatgggatgaagaaccattccagatccagaagctcctcccactcacccccaagacatgccagcaagaagagcaccagggaagcagggtcccgggacaggaggtctcgatccctgggcagaaggtcacggtccccaagacccagcaaactgcacaactctaaggtgaacaggagagagacaggccaaactaggagcccatcacctaaaaaagaggtctaccaaaggcgacatgctcccggatacaccagaaaactctctgcagaggaatta

SEQ ID NO: 123310 - DNA, 976 bp, Homo sapiens
  Payload ID: 4212
  Gene Symbol: CWC25
  Gene Name: CWC25 spliceosome-associated protein homolog
  ENST ID: ENST00000622665
  CDS Start-End: 124-330
ctggcagttgacggctcctgggactagatcccgcgaggtagcccccgaactatttctctacgttttctcttgatcctcccgaaatcttccagatccgcgtagtgaggaatcgtctccaccgtcatggggggcggagacctgaatctgaagaagagctggcacccgcagaccctcaggaatgtggagaaagtgtggaaggccgagcagaagcatgaggctgagcggaagaagattgaggagcttcagcgggagctgcgagaagagagagcccgggaagagatgcagcgctatgcggaggatgttggggccgtcaagtcatcttggaaatgaaagcataatataaagactctgtaaaggagactcgagaagctctgagccaagatccacaccccatgttgaggaacactggttttccttataaattgctttatgaaaaaagaagaaaagttggactggatgtaccagggtcctggtgggatggtgaaccgtgacgagtacctgctggggcgccccattgacaaatatgtttttgagaagatggaggagaaggaggcaggctgctcttctgaaacaggacttctcccaggctctatctttgccccatcaggtgccaattcccttcttgacatggccagcaagatccgggaggacccactcttcatcatcagaaggaggaggagaaaaaacgagaggtattaaataatccagtgaaaatgaagaaaatcaaagaattgttgcaaatgagtctggaaaaaaaggagaagaagaaaaagaaggagaagaaaaagaagcacaagaaacataagcacagaagctcgagtagtgatcgttccagcagcgaggatgagcacagtgcagggaggtgagcatgtggcgactggcctcccttctcgttgattcacttgctcattcactcattcattccacagacatgaacacctgccctgtgctggaagctgccaggtactgggcattc

SEQ ID NO: 123311 - DNA, 1894 bp, Homo sapiens
  Payload ID: 4212
  Gene Symbol: CWC25
  Gene Name: CWC25 spliceosome-associated protein homolog
  ENST ID: ENST00000619299
  CDS Start-End: 133-339
gtggtgaaactggcagttgacggctcctgggactagatcccgcgaggtagcccccgaactatttctctacgttttctcttgatcctcccgaaatcttccagatccgcgtagtgaggaatcgtctccaccgtcatggggggcggagacctgaatctgaagaagagctggcacccgcagaccctcaggaatgtggagaaagtgtggaaggccgagcagaagcatgaggctgagcggaagaagattgaggagcttcagcgggagctgcgagaagagagagcccgggaagagatgcagcgctatgcggaggatgttggggccgtcaagtcatcttggaaatgaaagcataatataaagactctgtaaaggagactcgagaagctctgagccaagatccacaccccatgttgaggaacactggttttccttataaattgctttatgaaaaaagaagaaaagttggactggatgtaccagggtcctggtgggatggtgaaccgtgacgagtacctgctggggcgccccattgacaaatatgtttttgagaagatggaggagaaggaggcaggctgctcttctgaaacaggacttctcccaggctctatctttgccccatcaggtgccaattcccttcttgacatggccagcaagatccgggaggacccactcttcatcatcaggaagaaggaggaggagaaaaaacgagaggtattaaataatccagtgaaaatgaagaaaatcaaagaattgttgcaaatgagtctggaaaaaaaggagaagaagaaaaagaaggagaagaaaaagaagcacaagaaacataagcacagaagctcgagtagtgatcgttccagcagcgaggatgagcacagtgcagggagatcacagaagaagatggcaaattcctcccctgttttgtccaaagtccctggatatggcttacaggtccggaactctgaccgtaaccagggtcttcagggtcctctgacagcagagcaaaagagagggcatgggatgaagaaccattccagatccagaagctcctcccactcacccccaagacatgccagcaagaagagcaccagggaagcagggtcccgggacaggaggtctcgatccctgggcagaaggtcacggtccccaagacccagcaaactgcacaactctaaggtgaacaggagagagacaggccaaactaggagcccatcacctaaaaaagaggtctaccaaaggcgacatgctcccggatacaccagaaaactctctgcagaggaattagagcgaaaacggcaagagatgatggaaaacgccaaatggagggaggaggagagactgaacatcctcaagaggcatgctaaggatgaggaacgggagcagaggctagagaagctggactcccgggatgggaagttcatccaccgcatgaagctggagagtgcatctacttcctccctggaggatcgggtgaagcggaatatctactctttacagagaacttcggtagctctggagaagaactttatgaaaagatgaaaactgtcccctctcttattggttttcctgcattttccagggaagctgctgaccccttaattctctttataagagttcaaatgacttctttcacagatgtcaaaccaccagtgttcaaagtgaccctgcttcattgagtcctgaaacagctcacttcctttgagagctagtgtgacttgctttgtgggacactcagtaactttgggttttgactctttaacgggtgggcactggaccatctcggtgggagtgcttgtgccactctggaaggctgttccctggggttgtgatgtttatcatgccacttccttcttacctgtgccaacagacctatttcactgcctcagcgtacaccagacccttcaga

SEQ ID NO: 123312 - DNA, 976 bp, Homo sapiens; identical to SEQ ID NO: 123310
  Payload ID: 4212
  Gene Symbol: CWC25
  Gene Name: CWC25 spliceosome-associated protein homolog
  ENST ID: ENST00000632717
  CDS Start-End: 124-330

SEQ ID NO: 123313 - DNA, 1160 bp, Homo sapiens; identical to SEQ ID NO: 123308
  Payload ID: 4212
  Gene Symbol: CWC25
  Gene Name: CWC25 spliceosome-associated protein homolog
  ENST ID: ENST00000631509
  CDS Start-End: 1-10

SEQ ID NO: 123314 - DNA, 650 bp, Homo sapiens; identical to SEQ ID NO: 123309
  Payload ID: 4212
  Gene Symbol: CWC25
  Gene Name: CWC25 spliceosome-associated protein homolog
  ENST ID: ENST00000633854
  CDS Start-End: 1-180

SEQ ID NO: 123315 - DNA, 1894 bp, Homo sapiens; identical to SEQ ID NO: 123311
  Payload ID: 4212
  Gene Symbol: CWC25
  Gene Name: CWC25 spliceosome-associated protein homolog
  ENST ID: ENST00000631731
  CDS Start-End: 133-339

SEQ ID NO: 123316 - DNA, 2078 bp, Homo sapiens
  Payload ID: 4213
  Gene Symbol: CWC27
  Gene Name: CWC27 spliceosome-associated protein homolog
  Uniprot ID: Q6UX04
  ENST ID: ENST00000381070
  CDS Start-End: 218-1636
agcggtgctcgggtccggtaacaacatggcggcgtccgtgaggggctcctttgggcaggggtagtgtttggtgtccctgtcttgcgtgatattgacaaactgaagctttcctgcaccactggacttaaggaagagtgtactcgtaggcggacagctttagtggccggccggccgctctcatcccccgtaaggagcagagtcctttgtactgaccaagatgagcaacatctacatccaggagcctcccacgaatgggaaggttttattgaaaactacagctggagatattgacatagagttgtggtccaaagaagctcctaaagcttgcagaaattttatccaactttgtttggaagcttattatgacaataccatttttcatagagttgtgcctggtttcatagtccaaggcggagatcctactggcacagggagtggtggagagtctatctatggagcgccattcaaagatgaatttcattcacggttgcgttttaatcggagaggactggttgccatggcaaatgctggttctcatgataatggcagccagtttttcttcacactgggtcgagcagatgaacttaacaataagcataccatctttggaaaggttacaggggatacagtatataacatgttgcgactgtcagaagtagacattgatgatgacgaaagaccacataatccacacaaaataaaaagctgtgaggttttgtttaatccttttgatgacatcattccaagggaaattaaaaggctgaaaaaagagaaaccagaggaggaagtaaagaaattgaaacccaaaggcacaaaaaattttagtttactttcatttggagaggaagctgaggaagaagaggaggaagtaaatcgagttagtcagagcatgaagggcaaaagcaaaagtagtcatgacttgcttaaggatgatccacatctcagttctgttccagttgtagaaagtgaaaaaggtgatgcaccagatttagttgatgatggagaagatgaaagtgcagagcatgatgaatatattgatggtgatgaaaagaacctgatgagagaaagaattgccaaaaaattaaaaaaggacacaagtgcgaatgttaaatcagctggagaaggagaagtggagaagaaatcagtcagccgcagtgaagagctcagaaaagaagcaagacaattaaaacgggaactcttagcagcaaaacaaaaaaaagtagaaaatgcagcaaaacaagcagaaaaaagaagtgaagaggaagaagcccctccagatggtgctgttgccgaatacagaagagaaaagcaaaagtatgaagctttgaggaagcaacagtcaaagaagggaacttcccgggaagatcagacccttgcactgctgaaccagtttaaatctaaactcactcaagcaattgctgaaacgcctgaaaatgacattcctgaaacagaagtagaagatgatgaaggatggatgtcacatgtacttcagtttgaggataaaagcagaaaagtgaaagatgcaagcatgcaagactcagatacatttgaaatctatgatcctcggaatccagtgaataaaagaaggagggaagaaagcaaaaagctgatgagagagaaaaaagaaagaagataaaatgagaataatgataaccagaacttgctggaaatgtgcctacaatggccttgtaacagccattgttcccaacagcatcacttaggggtgtgaaaagaagtatttttgaacctgttgtctggttttgaaaaacaattatcttgttttgcaaattgtggaatgatgtaagcaaatgcttttggttactggtacatgtgttttttcctagctgaccttttatattgctaaatctgaaataaaataactttccttccacattacatgttaaccattgcagactgcaagcctgtttgtgtccttttaccctaaaatatatgaaggcttccttttcaagatttttttataagaagttcctacagaaagaatatttgtgggaaacctccctttcactaacttcagaatataataaaatattataaataaaatatagaatataaatatg

SEQ ID NO: 123317 - DNA, 2103 bp, Homo sapiens
  Payload ID: 4213
  Gene Symbol: CWC27
  Gene Name: CWC27 spliceosome-associated protein homolog
  ENST ID: ENST00000508024
  CDS Start-End: 202-1347
ggtaacaacatggcggcgtccgtgaggggctcctttgggcaggggtagtgtttggtgtccctgtcttgcgtgatattgacaaactgaagctttcctgcaccactggacttaaggaagagtgtactcgtaggcggacagctttagtggccggccggccgctctcatcccccgtaaggagcagagtcctttgtactgaccaagatgagcaacatctacatccaggagcctcccacgaatgggaaggttttattgaaaactacagctggagatattgacatagagttgtggtccaaagaagctcctaaagcttgcagaaattttatccaactttgtttggaagcttattatgacaataccatttttcatagagttgtgcctggtttcatagtccaaggcggagatcctactggcacagggagtggtggagagtctatctatggagcgccattcaaagatgaatttcattcacggttgcgttttaatcggagaggactggttgccatggcaaatgctggttctcatgataatggcagccagtttttcttcacactgggtcgagcagatgaacttaacaataagcataccatctttggaaaggttacaggggatacagtatataacatgttgcgactgtcagaagtagacattgatgatgacgaaagaccacataatccacacaaaataaaaagctgtgaggttttgtttaatccttttgatgacatcattccaagggaaattaaaaggctgaaaaaagagaaaccagaggaggaagtaaagaaattgaaacccaaaggcacaaaaaattttagtttactttcatttggagaggaagctgaggaagaagaggaggaagtaaatcgagttagtcagagcatgaagggcaaaagcaaaagtagtcatgacttgcttaaggatgatccacatctcagttctgttccagttgtagaaagtgaaaaaggtgatgcaccagatttagttgatgatggagaagatgaaagtgcagagcatgatgaatatattgatggtgatgaaaagaacctgatgagagaaagaattgccaaaaaattaaaaaaggacacaagtgcgaatgttaaatcagctggagaaggagaagtggagaagaaatcagtcagccgcagcccaccttctctatgcctgtatcttgactactggatacagctcagcagaatcacacaggcatatacaagctggtattattatggatttctagattccagcctcagctgtgtctccagtgcttccttattactcactcgccacaatgtttacttcacacttcaaactcactcaacggatcacctggctgcttgtttttttatgaaatgagagtaaatttcttcaacccgtatttctttctcttccccgcttcgagagtaaaaactaacaaaaccattccattttatttcctgtccctacctccttcctatttatttctaaatacatatcatctagcttctcacctaccactccactgaaactacttccactaaggccatctagttgataatcgactggctactttccatttttttttcttggtcttcctgctctggagatttttgtctcttttctcttgagactaatctctctcaagaaccttactatttaaagtgtgatctgtgaagcagtagcattagtatcacttgggaacttgttagaaataccgagtctcaggccctgtcctacacatttttaattagaatctgcattctaacaagatccccaggtgatttttgtgtgcattagtttgagaagcagtcctgtagaatattaatttttatccctactgctcctggatgagttcaagtttgtatcatgttagttccaaggtcagcaagttgtcagcaagttggtactatattccctgactccttagtgcaaacctatgtgcacccttttcacactcctgtaatattaggttacatatacattttttcttctttgtgtatccttatactgtaactttcttgaaggtagtgatcatatccatttacatttgtatctccatgttcaaacagcgtaggtacccaaatatttttgtaaatacatgaacaaaaaatgaataaattcttctttggcaaa

SEQ ID NO: 123318 - DNA, 2633 bp, Homo sapiens
  Payload ID: 4214
  Gene Symbol: CWF19L1
  Gene Name: CWF19-like 1, cell cycle control (S. pombe)
  Uniprot ID: Q69YN2
  ENST ID: ENST00000354105
  CDS Start-End: 88-1704
gattgttgcgcggtcgcatttttccggggagcgcggattcgcattcccaattttaggtggcagtcgcaacccatactattcggacagatggcacagaaaccgctgcgcctcttggcttgtggagatgttgaaggaaagtttgatattttattcaatagagttcaagcaattcagaagaaaagtggaaactttgatctgctgttgtgtgtaggaaatttctttggctccacccaagatgctgaatgggaggagtataagactggcatcaagaaagctcctattcagacatatgtgcttggtgctaataaccaggaaacagtaaaatatttccaggatgctgatggatgtgaattagctgaaaacattacttatctgggtcgtaaaggtatcttcactggaagctcggggctgcagattgtgtacctcagtgggacagaatccttaaatgagccagtaccaggttatagttttagtcccaaggatgtgtcttctctgagaatgatgctgtgtacaacctcccagtttaagggtgttgatatcttgctcacatccccatggcccaagtgtgtggggaactttgggaattcttctggagaagtggataccaaaaaatgtggttctgctttggtttccagtcttgccacgggcttgaaaccaagataccattttgctgctttggaaaagacctattatgagaggcttccatatcgaaaccatatcattctacaggaaaatgcacagcatgccacccggtttatagctctggcaaatgttggaaatccagaaaagaaaaagtatctttacgcgttcagtattgttcccatgaagctaatggatgcagcagaactggtaaaacagcctccggatgtcactgaaaacccttacagaaaatctgggcaggaagcatccataggaaagcaaattcttgcccctgtggaagaatcagcctgtcagtttttctttgatttaaatgaaaagcagggaaggaagcgttcatccacaggtagagatagcaaatcttctcctcatccaaagcagcctcgcaaacctcctcagcctccaggaccctgctggttttgccttgctagccctgaagtggaaaaacatttggtggtcaacatcggcacacattgctaccttgccctggccaaaggaggcttatctgatgaccatgtcctcatcctgcctattggacactaccagtcagtggtggagctttcagcagaggtggtagaagaggtggagaagtataaggccactctgagacggttctttaagagtcgagggaaatggtgtgttgtatttgagagaaattataagagccatcacctccagctacaggtcattcctgtcccaatcagctgctctactactgatgacattaaagatgccttcattacccaggcacaggagcagcagatagagctgttggaaatcccagagcactctgacatcaagcagattgcacagccaggagcagcatatttttatgttgaacttgacacaggagaaaagcttttccacagaattaaaaagaattttcctttgcagtttggaagggaggtcctggccagtgaagccatccttaatgttcctgataagtctgactggaggcagtgtcagatcagcaaggaagacgaggagaccctggctcgccgcttccggaaagactttgagccctatgactttactctggatgactaaaacaaagggaagaactttttatgaactccacaggaagtagtaaagcttttttttttttttaattaaaagaattttttttgagacaaagtctcgctctgtcacccaagcaggattgcagtggcataactgtggctcactgtagcctcaacctcctgggctctagagttcctcccacctcagcctcatgagtagctgggaccacaggcgcatgctaccatgcctggcaaacttttttgattttttatagagacaggagggtctccctgtgttgcccaggctggtctgtaatgcctaggctcaagggatcctctgccttggcttcttaacctgctgggattacaagcatgagacaccattcctggcctagaagcctatttttaaagaaactacaatctcccatggggactgtttccctgcctcttttgtgcagtcccatggaacttgcctacagcaagaggcctaagattgaatctttttggggaaaagtcattctaggatgaaaatcctatgttaaggccgggcgcagtggctcacgcctgtaatcccagtactttgggaagccgaggcaggtggatcacctgaggtgaggagtttgagaccagcctggccaacatggtgaaaccccgtctttactaaagctacaaaaattagctgggcgtggtgccaggcacttgtaatcccagctactcaggaggctgaggcaggagaattgcttgagcctgggaggtggaggttgcagtgagccaagatcgctccattgcactccagcctgggtgacagtgaaactccatctcaaaaataaaagaataaaagtatgtctgtcatccagctcctatgtctgttatccagctccaagtacagcttgtgtatatcaacattttcaaaaacctttaaactaccaaatgaaatccagatgtttttccatggtt

SEQ ID NO: 123319 - DNA, 815 bp, Homo sapiens
  Payload ID: 4214
  Gene Symbol: CWF19L1
  Gene Name: CWF19-like 1, cell cycle control (S. pombe)
  ENST ID: ENST00000370379
  CDS Start-End: 4-765
cccatgaagctaatggatgcagcagaactggtaaaacagcctccggatgtcactgaaaacccttacagaaaatctgggcaggaagcatccataggaaagcaaattcttgcccctgtggaagaatcagcctgtcagtttttctttgatttaaatgaaaagcagggaaggaagcgttcatccacaggtagagatagcaaatcttctcctcatccaaagcagcctcgcaaacctcctcagcctccaggaccctgctggttttgccttgctagccctgaagtggaaaaacatttggtggtcaacatcggcacacattgctaccttgccctggccaaaggaggcttatctgatgaccatgtcctcatcctgcctattggacactaccagtcagtggtggagctttcagcagaggtggtagaagaggtggagaagtataaggccactctgagacggttctttaagagtcgagggaaatggtgtgttgtatttgagagaaattataagagccatcacctccagctacagattgcacagccaggagcagcatatttttatgttgaacttgacacaggagaaaagcttttccacagaattaaaaagaattttcctttgcagtttggaagggaggtcctggccagtgaagccatccttaatgttcctgataagtctgactggaggcagtgtcagatcagcaaggaagacgaggagaccctggctcgccgcttccggaaagactttgagccctatgactttactctggatgactaaaacaaagggaagaactttttatgaactccacaggaagtagtaaagctttt

SEQ ID NO: 123320 - DNA, 3278 bp, Homo sapiens
  Payload ID: 4215
  Gene Symbol: CWF19L2
  Gene Name: CWF19-like 2, cell cycle control (S. pombe)
  Uniprot ID: Q2TBE0
  ENST ID: ENST00000282251
  CDS Start-End: 29-2713
aattttcttgcggcttcttagctttacgatggcaacaagtatggcggctgctagtggtagatttgaaagtgcgaagagtatcgaagagcggaaagaacagacccggaatgccagggccgaggtgttgcgccaggctaaagccaattttgaaaaagaagaaaggcgtaaagaacttaagcgacttcggggtgaggatacatggatgctacctgatgtgaatgagagaattgaacagttctcacaggaacactctgtgaagaaaaagaagaaaaaagacaagcattcaaaaaaagcaaagaaagaaaagaaaaaaaagagcaagaaacagaaatatgaaaaaaacaatgagtcatctgatagctcatcaagctctgaagatgagtgggttgaggctgttccatcccagactcctgacaaggaaaaagcctggaaagtgaaagatgaaaagtcaggaaaagatgacacccaaattatcaagagggatgagtggatgactgttgattttatgtctgttaaaactgtgtcatcatcatcactcaaagctgaaaaggaaactatgaggaaaatagagcaagagaaaaaccaagcgcttgaacagtccaaactgatggaaagagaattgaatccgtactggaaggatggtgggacaggtcttccacctgaagactgtagtgtgtcatcgattactaaagtttcagtggtagaagatggtggattaagctggctaaggaaatcttatctaagaatgaaggaacaagctgagaaacaaagtagaaactttgaggacattgtagccgaaagatatgggtcaatggaaatatttcagtcaaaattagaagatgctgaaaaagctgcatccacgaaagaagattatagacgggaacggtggaggaaacccacatattcagataaagcacaaaattgtcaagaaagtagagaatcagacttagtaaaatatggtaacagttcaagggatagatatgctacaacagatactgcaaaaaatagcaataatgaaaaatttattggtgatgaaaaagataagagacctgggtctttagaaacgtgtagaagagaatctaacccaaggcaaaatcaagagttttcttttggcaatttgagagctaaattcttgagaccctctgatgatgaagaactgtcatttcacagcaagggcagaaaatttgaaccacttagttcatcttcagcattggtagctcagggctctttgtgtagtggttttagaaaacccaccaagaacagtgaagaaagattaacatcatggagtcgctctgatgggagaggagacaagaaacattcaaatcaaaagccatcggaaaccagtactgatgaacaccaacatgttccagaagacccaagagaaaaatcacaagatgaagtcttgagagatgaccctccaaaaaaagaacatctacgggatacaaagtctacatttgctggcagtccagagcgtgagtccattcacatcctgagtgttgatgagaagaacaagttgggagccaagattatcaaagcagagatgatggggaatatggaattagctgaacaacttaaagttcaacttgaaaaggcaaataaattcaaagaaactataacacagataccaaaaaaatctggggtagagaatgaagaccagcaagaagtaatccttgtcagaacagatcagtctggaagagtatggcctgtgaacacacccggaaaatctctggaatcacaaggaggaagaagaaagagacagatggtttcaacccatgaggaaagagaaagggtcagatactttcatgatgatgataatctaagcctaaatgatttagtcaaaaatgaaaagatgggaacagcagaaaatcaaaacaagctctttatgagaatggcatctaagtttatgggaaaaacagatggagactattacaccctggatgacatgtttgtctccaaagcagctgagagagaacgtcttggtgaagaggaagagaaccaaaggaaaaaagctattgctgagcatcggagtcttgctgcacaaatggaaaaatgtctgtattgttttgacagctctcaatttcccaagcatcttattgttgcaataggtgttaaggtttatttatgtttacccaacgtacggtctcttactgaggggcactgcctgatagtccctttgcagcaccatagagcagctactttgttggatgaagacatctgggaggagatccagatgttcagaaaatcattggtaaagatgtttgaagataaaggattagactgcatttttttggaaactaatatgagcatgaagaaacagtatcacatggtttatgaatgtattcctcttcccaaggaagtgggtgacatggctcccatctattttaagaaagccataatggaatctgatgaagagtggtccatgaacaagaagttgatagatctctcttcaaaagatatcagaaagtctgtacccagagggttaccttacttctctgtggattttggccttcacggagggtttgcccatgtcattgaagatcagcacaaattccctcattactttggaaaggaaatcataggtgggatgctggatatagaaccaagactttggaggaaaggcatccgagaaagctttgaggatcagaggaaaaaagcactgcagtttgctcagtggtggaaaccatatgacttcaccaaaagtaaaaactattgaggtgtaccttccattttaaaatttttcttcagatcccgttcagttttatttccattgcatctaatgaagcaactgaccctcaggtcacaggcagagagagtcacagcagcagactgctctgggtcagtgacaactgtacatcaggagattgtgttgttttcttcttcacctgctcctatctatggacttcattttagtcaccatggagtaaaaacatatattcgatgatctgctcacattcctgctctctacctacttcttggtattccgaattgttcagttaatttagagaaggccttttctgaagggatatctaaaaagcataggaaatccttggttcagagggaagtgggtctgcttcatggttgttaagtctactgtctggcttcttttgcatttttaaaaataagacgatttaattttaatttcataggattttatagaaaagctcttaattttctactagcagtatatagtatcacttctattctttttgttaaaggaaaaggaaatgtccccaaagtattaaagaattaaatgatactgaaaatttgtatgattcaaa

SEQ ID NO: 123321 - DNA, 2955 bp, Homo sapiens
  Payload ID: 4215
  Gene Symbol: CWF19L2
  Gene Name: CWF19-like 2, cell cycle control (S. pombe)
  ENST ID: ENST00000431778
  CDS Start-End: 1-1872
gttgaggctgttccatcccagactcctgacaaggaaaaagcctggaaagtgaaagatgaaaagtcaggaaaagatgacacccaaattatcaagagggatgagtggatgactgttgattttatgtctgttaaaactgtgtcatcatcatcactcaaagctgaaaaggaaactatgaggaaaatagagcaagagaaaaaccaagcgcttgaacagtccaaactgatggaaagagaattgaatccgtactggaaggatggtgggacaggtcttccacctgaagactgtagtgtgtcatcgattactaaagtttcagtggtagaagatggtggattaagctggctaaggaaatcttatctaagaatgaaggaacaagctgagaaacaaagtagaaactttgaggacattgtagccgaaagatatgggtcaatggaaatatttcagtcaaaattagaagatgctgaaaaagctgcatccacgaaagaagattatagacgggaacggtggaggaaacccacatattcagataaagcacaaaattgtcaagaaagtagagaatcagacttagtaaaatatggtaacagttcaagggatagatatgctacaacagatactgcaaaaaatagcaataatgaaaaatttattggtgatgaaaaagataagagacctgggtctttagaaacgtgtagaagagaatctaacccaaggcaaaatcaagagttttcttttggcaatttgagagctaaattcttgagaccctctgatgatgaagaactgtcatttcacagcaagggcagaaaatttgaaccacttagttcatcttcagcattggtagctcagggctctttgtgtagtggttttagaaaacccaccaagaacagtgaagaaagattaacatcatggagtcgctctgatgggagaggagacaagaaacattcaaatcaaaagccatcggaaaccagtactgatgaacaccaacatgttccagaagacccaagagaaaaatcacaagatgaagtcttgagagatgaccctccaaaaaaagaacatctacgggatacaaagtctacatttgctggcagtccagagcgtgagtccattcacatcctgagtgttgatgagaagaacaagttgggagccaagattatcaaagcagagatgatggggaatatggaattagctgaacaacttaaagttcaacttgaaaaggcaaataaattcaaagaaactataacacagataccaaaaaaatctggggtagagaatgaagaccagcaagaagtaatccttgtcagaacagatcagtctggaagagtatggcctgtgaacacacccggaaaatctctggaatcacaaggaggaagaagaaagagacagatggtttcaacccatgaggaaagagaaagggtcagatactttcatgatgatgataatctaagcctaaatgatttagtcaaaaatgaaaagatgggaacagcagaaaatcaaaacaagctctttatgagaatggcatctaagtttatgggaaaaacagatggagactattacaccctggatgacatgtttgtctccaaagcagctgagagagaacgtcttggtgaagaggaagagaaccaaaggaaaaaagctattgctgagcatcggagtcttgctgcacaaatggaaaaatgtctgtattgttttgacagctctcaatttcccaagcatcttattgttgcaataggtgttaaggtttatttatgtttacccaacgtacggtctcttactgaggggcactgcctgatagtccctttgcagcaccatagagcagctactttgttggatgaagacatctgggaggagatccagataaaatctagaacagtcatccaataattaagccagaaagggagtatgaacaaacatgaagtaaagatgtttgtgagatgttcagaaaatcattggtaaagatgtttgaagataaaggattagactgcatttttttggaaactaatatgagcatgaagaaacagtatcacatggtttatgaatgtattcctcttcccaaggaagtgggtgacatggctcccatctattttaagaaagccataatggaatctgatgaagagtggtccatgaacaagaagttgatagatctctcttcaaaagatatcagaaagtctgtacccagagggttaccttacttctctgtggattttggccttcacggagggtttgcccatgtcattgaagatcagcacaaattccctcattactttggaaaggaaatcataggtgggatgctggatatagaaccaagactttggaggaaaggcatccgagaaagctttgaggatcagaggaaaaaagcactgcagtttgctcagtggtggaaaccatatgacttcaccaaaagtaaaaactattgaggtgtaccttccattttaaaatttttcttcagatcccgttcagttttatttccattgcatctaatgaagcaactgaccctcaggtcacaggcagagagagtcacagcagcagactgctctgggtcagtgacaactgtacatcaggagattgtgttgttttcttcttcacctgctcctatctatggacttcattttagtcaccatggagtaaaaacatatattcgatgatctgctcacattcctgctctctacctacttcttggtattccgaattgttcagttaatttagagaaggccttttctgaagggatatctaaaaagcataggaaatccttggttcagagggaagtgggtctgcttcatggttgttaagtctactgtctggcttcttttgcatttttaaaaataagacgatttaattttaatttcataggattttatagaaaagctcttaattttctactagcagtatatagtatcacttctattctttttgttaaaggaaaaggaaatgtccccaaagtattaaagaattaaatgatactgaaaa

SEQ ID NO: 123322 - DNA, 2383 bp, Homo sapiens
  Payload ID: 4215
  Gene Symbol: CWF19L2
  Gene Name: CWF19-like 2, cell cycle control (S. pombe)
  ENST ID: ENST00000532251
  CDS Start-End: 1-1662
gttgaggctgttccatcccagactcctgacaaggaaaaagcctggaaagtgaaagatgaaaagtcaggaaaagatgacacccaaattatcaagagggatgagtggatgactgttgattttatgtctgttaaaactgtgtcatcatcatcactcaaagctgaaaaggaaactatgaggaaaatagagcaagagaaaaaccaagcgcttgaacagtccaaactgatggaaagagaattgaatccgtactggaaggatggtgggacaggtcttccacctgaagactgtagtgtgtcatcgattactaaagtttcagtggtagaagatggtggattaagctggctaaggaaatcttatctaagaatgaaggaacaagctgagaaacaaagtagaaactttgaggacattgtagccgaaagatatgggtcaatggaaatatttcagtcaaaattagaagatgctgaaaaagctgcatccacgaaagaagattatagacgggaacggtggaggaaacccacatattcagataaagcacaaaattgtcaagaaagtagagaatcagacttagtaaaatatggtaacagttcaagggatagatatgctacaacagatactgcaaaaaatagcaataatgaaaaatttattggtgatgaaaaagataagagacctgggtctttagaaacgtgtagaagagaatctaacccaaggcaaaatcaagagttttcttttggcaatttgagagctaaattcttgagaccctctgatgatgaagaactgtcatttcacagcaagggcagaaaatttgaaccacttagttcatcttcagcattggtagctcagggctctttgtgtagtggttttagaaaacccaccaagaacagtgaagaaagattaacatcatggagtcgctctgatgggagaggagacaagaaacattcaaatcaaaagccatcggaaaccagtactgatgaacaccaacatgttccagaagacccaagagaaaaatcacaagatgaagtcttgagagatgaccctccaaaaaaagaacatctacgggatacaaagtctacatttgctggcagtccagagcgtgagtccattcacatcctgagtgttgatgagaagaacaagttgggagccaagattatcaaagcagagatgatggggaatatggaattagctgaacaacttaaagttcaacttgaaaaggcaaataaattcaaagaaactataacacagataccaaaaaaatctggggtagagaatgaagaccagcaagaagtaatccttgtcagaacagatcagtctggaagagtatggcctgtgaacacacccggaaaatctctggaatcacaaggaggaagaagaaagagacagatggtttcaacccatgaggaaagagaaagggtcagatactttcatgatgatgataatctaagcctaaatgatttagtcaaaaatgaaaagatgggaacagcagaaaatcaaaacaagctctttatgagaatggcatctaagcagctgagagagaacgtcttggtgaagaggaagagaaccaaaggaaaaaagctattgctgagcatcggagtcttgctgcacaaatggaaaaatgtctgtattgttttgacagctctcaatttcccaagcatcttattgttgcaataggtgttaaggtttatttatgtttacccaacgtacggtctcttactgaggggcactgcctgatagtccctttgcagcaccatagagcagctactttgttggatgaagacatctgggaggagatccagatgttcagaaaatcattggtaaagatgtttgaagataaaggattagactgcatttttttggaaactaatatgagcatgaagaaacagtatcacatggtttatgaatgtattcctcttcccaaggaagtgggtgacatggctcccatctattttaagaaagccataatggaatctgatgaagagtggtccatgaacaagaagttgatagatctctcttcaaaagatatcagaaagtctgtacccagagggttaccttacttctctgtggattttggccttcacggagggtttgcccatgtcattgaagatcagcacaaattccctcattactttggaaaggaaatcataggtgggatgctggatatagaaccaagactttggaggaaaggcatccgagaaagctttgaggatcagaggaaaaaagcactgcagtttgctcagtggtggaaaccatatgacttcaccaaaagtaaaaactattgaggtgtaccttccattttaaaatttttcttcagatcccgttcagttttatttccattgcatctaatgaagcaactgaccctcaggtcacaggcagagagagtcacagcagcaga

SEQ ID NO: 123323 - DNA, 724 bp, Homo sapiens
  Payload ID: 4216
  Gene Symbol: CMC1
  Gene Name: C-x(9)-C motif containing 1
  ENST ID: ENST00000334841
  CDS Start-End: 171-314
gggaaggaagagggaacgggtcctggcggtgctttgcaaagggcccgtgtttctgttgcgggaagctcccgggggtcgcacgtgcgtccgagcccaagcccctcccctccactccccttcctgcgtgccccggagccgccaagcggctacgttcttctcggcccgccgagatggcgctcgaccccgcaggtaccggggcgggaagcggggtttgccgaggggcctcgccccgggtctcacgccgcgggccatgcgggctggatgccgacctgggaaagaccagcatctcagacatgtcgaaaaagatgttttgatccctaaaataatgagagaaaaggccaaagagaggtgttctgaacaagttcaagattttaccaaatgttgcaagaactctggagttcttatggtagtaaaatgccggaaagaaaattctgcattgaaagaatgtctaactgcttactataatgatccagccttttatgaagaatgcaaaatggaatacctgaaggaaagggaagaattcagaaaaactggaattcctacaaagaaaaggctacagaagcttccaacaagcatgtaggcagatactcaaatgacattcaggaactctaatattcatggaagtcattttatagtccttaaataatggactcaagcatatatgtttgctttaccttaattatggaaatattaactttatctgaaataaatattttatttcaaa

SEQ ID NO: 123324 - DNA, 549 bp, Homo sapiens
  Payload ID: 4216
  Gene Symbol: CMC1
  Gene Name: C-x(9)-C motif containing 1
  ENST ID: ENST00000423894
  CDS Start-End: 177-407
gagcctgggaaggaagagggaacgggtcctggcggtgctttgcaaagggcccgtgtttctgttgcgggaagctcccgggggtcgcacgtgcgtccgagcccaagcccctcccctccactccccttcctgcgtgccccggagccgccaagcggctacgttcttctcggcccgccgagatggcgctcgaccccgcagattttaccaaatgttgcaagaactctggagttcttatggtagtaaaatgccggaaagaaaattctgcattgaaagaatgtctaactgcttactataatgatccagccttttatgaagaatgcaaaatggaatacctgaaggaaagggaagaattcagaaaaactggaattcctacaaagaaaaggctacagaagcttccaacaagcatgtaggcagatactcaaatgacattcaggaactctaatattcatggaagtcattttatagtccttaaataatggactcaagcatatatgtttgctttaccttaattatggaaatattaactttatctgaaataaatattttatttca

SEQ ID NO: 123325 - DNA, 484 bp, Homo sapiens
  Payload ID: 4216
  Gene Symbol: CMC1
  Gene Name: C-x(9)-C motif containing 1
  ENST ID: ENST00000418849
  CDS Start-End: 1-340
cagagtaaacagtagcaccaaactgtcttcaggagcaaaccagcatctcagacatgtcgaaaaagatgttttgatccctaaaataatgagagaaaaggccaaagagaggtgttctgaacaagttcaagattttaccaaatgttgcaagaactctggagttcttatggtagtaaaatgccggaaagaaaattctgcattgaaagaatgtctaactgcttactataatgatccagccttttatgaagaatgcaaaatggaatacctgaaggaaagggaagaattcagaaaaactggaattcctacaaagaaaaggctacagaagcttccaacaagcatgtaggcagatactcaaatgacattcaggaactctaatattcatggaagtcattttatagtccttaaataatggactcaagcatatatgtttgctttaccttaattatggaaatattaactttatctgaaataaatattttatttcaaa

SEQ ID NO: 123326 - DNA, 6033 bp, Homo sapiens
  Payload ID: 4216
  Gene Symbol: CMC1
  Gene Name: C-x(9)-C motif containing 1
  Uniprot ID: Q7Z7K0
  ENST ID: ENST00000466830
  CDS Start-End: 200-520
ggcgcaacgggcggcggaagtaggagcctgggaaggaagagggaacgggtcctggcggtgctttgcaaagggcccgtgtttctgttgcgggaagctcccgggggtcgcacgtgcgtccgagcccaagcccctcccctccactccccttcctgcgtgccccggagccgccaagcggctacgttcttctcggcccgccgagatggcgctcgaccccgcagaccagcatctcagacatgtcgaaaaagatgttttgatccctaaaataatgagagaaaaggccaaagagaggtgttctgaacaagttcaagattttaccaaatgttgcaagaactctggagttcttatggtagtaaaatgccggaaagaaaattctgcattgaaagaatgtctaactgcttactataatgatccagccttttatgaagaatgcaaaatggaatacctgaaggaaagggaagaattcagaaaaactggaattcctacaaagaaaaggctacagaagcttccaacaagcatgtaggcagatactcaaatgacattcaggaactctaatattcatggaagtcattttatagtccttaaataatggactcaagcatatatgtttgctttaccttaattatggaaatattaactttatctgaaataaatattttatttcaaagttttggtttcttaaatgggaaaggagtagttactgaattgggatatggttttcctggtcattctggaccttttgaaagttttcccacaactatagttctataacagtgatactgattttttagagttcaatatggtccttatattatttttttccagtgtatatgctaatggctaatcatgggagccaaaactaaagaaaagcaggaatggacaaccttcaaaggtgttaataataactaggcagtatagcagaatggctatgaaccagaatccttcctgattctaccacttattagctatacagctgtggaagtaaatctaatacagtttgtgaggatgtactgagtattgcatatagcaggtacacgtacagtgtataagacagtgcttcagacctggtacatgctcttatattggtagttactgttagtagtagtagaggcttatttggaaactatcttagtccattttctgttgctatgggagaatacccaagaccaggtaatttataagaaaagtttgtttggctcacagttctggagtttatttgccagcagcttctggcaagggttttcatactgcatcaaaacataatagggtgtaaaaaatagaaggacaaacaagtgtgggcaaacttttataacagcccgctctcttgagaactaatacctgtaataatggcataaatccattcacgagggctccagcctcatcaccctattacctcttaaaggctccatttcttagtcctgttaaattagcaactaagtttccaacacatgaactcttgggggacacatcaaaccatagcagaaccatagataaggagatacctacttatatgaattaattttacttacatctttgatgtagaattttctaaaacataatgttcttaacctgataacttgttagtcctttaatctttcattttgaaaagttatatttctaagtgaattaccattctgtaacatagtaatggactcaggaagtagtataaaaaatttatgtcccaatttaataatttgagcttttatattaaaagttattttttccccatgagctgttaactcttccacagccattgtaactagtttcaagataagtaaattttacgtatattttcacagtcctcattaaaatcacaaatagaaattactacccactaagacaaggtttaactttccctaatcccatgcaatagatctgagagatttttttttaagaaagaatttaaataggacactaaagaatcaattcaagttccacactttactcttgagtgaaccactcaaaaaactattttacttttatttgaaatacaaagaaaccacattttcccaggccacagatcaaaaggagggagattactagagcagacaaaagcaaagcaaatatagaaatctagagaccacacagcataggggcaaacatgcccatatttccacattgacctttggtattggtgcatttcctagagcacaggaagttaactgtttttagagataaatgaaaatggaagagttactttaagaagctagtgaaatatacaatctattttatagctttgattaaaatcagaagtagcccacttcatgtagaaaattcacttatgtacatgttgctttccccatagaagccagattagattacacagtataaataatatgttcatcctccttatgtcaaagactaaaccattcattgtagccttcagaatacccatgtgtatccatactgaagatttttttcacctggtacatctgtctcagttgtgtcttgcttgcttatgggtgcctctgttgatattattccctgttaatatgtggtaacccacaggttttttaccccttaagatacaccttctccaagtagcctttctgaattaagatcagtactttgttgtcacatgattcagctcttcaagtctgaattttcccatttattttggttttctaatgtttcacataggcatgttcctgcttttaagaattcagttccattttggcagcaactcagtaagtcttacagatgtaaattttactttagctaataagggagcaagaggaaggaataggtggctttttgttatgttttcttcattctgtcgatttatggatgtactgaattgaaccttataaaaagaaatctaaagattccaaaggaagctctttagagcaagtttcagctagtatgaaagaagtcaacataaaatattcaattttaaatagattcataagctacagatgggccactgttttttggttgtttgaattttacctagaacagagatatcaagtgtagatttaaaagcttctagctgggtaaaaaatttttggctaatctttccttactaaagaaccttatacatcatttgtctaacactttaaactgtcacagtcactgactttttagtatacctgtttgatagctatcatcactgtactgtttaaatggaaaataattttctccactcaaaagctggtttaacaaatgtctattgtatgaatcatattaacaaccaacaattagtactagattttgagatctataggcaaggacaatatttcacatccacttcaatttcaaacaaaaatatttattttaattaaacaatttcttggtattgttcaaaacattaatcaagcaattatctcataagactttttttctttacaaaggaaaatttccaattttggttttaaaaaaggcaaaccagtaagctacattagagatcagatataatatacagcctatgcagccacatgagaaatagtttttgctgctttgttattacacaggtagttgcttccttcagctaaagcctggagtattgtatttcttttatgcatattgggtttggttctattacttggcaggagattgtactcccctgagtcagctgtgttcattggtcagaataaattccagcatctgacaccaattccattaatcacagacaagcttgaataagtgtaagataatagaaaaaaatatctagtgaatggcgaacattgtctatgtatgtatgctattcagtaatacagtagaagagatctgagatattgagttcaagatatatgaaactgtctatcaaaaaggataaaagtcctcctacatgaaatactttaattcaggcaaaaggtgtatgaaccaagtaaatctccaccctgaaagaacttaaatttccatgtgaagccatctttatttccttctttatttccaaataattggccacttagaataagtgtggacatttcatgatcgacaatatcaatacagcccaaaccctgatttctatgattaaaaataataattttaaatcactttctcaataaatagaatattacatttcaacacaaagtctaacaatttagaagctgctctacacaatgtgcagctagctgtagtctctttgaagaaaatgactttttatcattacacacatttatgtttatattatggcccacagaagggcagattagactgaaatctgtgtgatgctccttctactacttattgaatagtgtgtagggttacaatcatttgtttacaccccagagtttttcaactatttcatttttttttttttttttcccaattaggacttaaggaatgtgctgggacaaagttggcttcagtgatcaggttgtttcaagtcttagaattcaaacttcaattctaaaaaaattttatcaacaaaacactgtgaccaaaaaatcactttaaatcttaaatattgaaacgcaatagcatataaagatggtataacctaagatgcttttatttcattatattttcaatatctttacgcattataacaacagaaatgtaacctactcacattgccatttgttccattatgcaatttgaagaaacatgttttccttttatttttatgaacagatatttagacatttcacattttgtaaaaccacgtctacaatctccaattccattcttctgagaggcaaaattttacaattaatatagaaggcagagttttttaaacaccttaagtttacttattaattagtatagtagcatatttcagattcttagaatatggagctagagggtgctctttcatactagaaaaccaactatgttggtttttgtactattgtacagtgtgttcaaatatagatactgaagacctctgcaaaattttaatcaaaatctcctttcagtttgttaaataatttcttgggaggaccactgaaagagataagtgtcctcatggtgaaatcgtgaatctcttccaaattaattcttataaaggcagttctgattatgttgatccaagtaatgcagtggtggaaggttgggtaaaggcaaagttttagttttagtttccccaaatgctgtctcacttgatttaggaggacttggaaatacccaggaattgtcttccagagaatttctgccataagaactgtgttcctgaaagcatgtaccatcattaggaatggatctctcattgtctgtccatgattggaggattgctttctctgataaaacctttacatctcctggtaaaggggaagatgtggtatgacaaagagctttgccatttggtaagagagggggatgtcttgtgtatgttgcagtaaaattcatcaagtgcagttttgtgctgtctcttccaaggtcttcactgcatcctacaggggcacaggctaaaaagaaaacacagactaaatgtcagttttcattacatttgtgatcataaaattcgataacacttcaccaatttgaattctagaactggtgatgaaattaagatttccaagttagtgtgatcattgaggcactgtgactaggagataaatgacagatgatctgagttttaatcctggatcagcaatttactgtgactttagatatttgtctcttagctgctcctgatgtctctttccttgtctgcagaatggatatagaattcctgtcccaactatgtcatagagcttttaaaagatgaagaactacatatttttaaaagttggaaactaatacagttaaaatacaaataaagatcctgttcttggctcttattgtggctggagaaggattgcagactgttcacatgtcagtggggactgagacagttcttaagttttagcattttttagttaaatataatattcctttgctcaaactctttgtccacaggcagtccaaaagcaaattttttagaaataattgcatttttaattggtgagacccaaatgaagtttttatatatcaaaggcttttatggataaagcagtttaaataaaatttgtgaaatcttgtttcttgtaaaacacagcaaatgttaatgctactgtggtcacaatgtaggtaaagtaaaaaaaaaaaaaaaaa

SEQ ID NO: 123327 - DNA, 10301 bp, Homo sapiens
  Payload ID: 4217
  Gene Symbol: CMC2
  Gene Name: C-x(9)-C motif containing 2
  Uniprot ID: Q9NRP2
  ENST ID: ENST00000219400
  CDS Start-End: 417-656
cgaaggtcgccgagccccccacgccgctcttcttagaagtgtgcaaccttgcaccagtagtggacttacacataggctccgttaggacctggcttatgtgctcggcttgtggcttagacgctgccgtgccccagtggactcactgtgcctccccccacgacggacggaaatgggcccctccaggacaggcggcgcatgcgccttggggcccgcgggcggcgggggcgaggagccgggagcacggtggagcggtggagggcgtcactgggtttcggcgtctggcaagcggttcagctgtctgctccctagcagccggccttcgggtcgggcgtctccgccggctactgccgcttcagttctcccggtgtggccacgagtcgggttgcactgctgtgatccatcctcatctcctaaagatgcatcctgacttatctccacacttgcacactgaagaatgcaacgtcttgattaacttgcttaaggaatgtcacaaaaatcacaacattctgaaattttttggttattgtaatgatgttgatcgggagttgagaaaatgcctgaagaatgagtacgtagaaaacaggaccaagagcagggagcatggcattgcaatgcgaaagaaactttttaatcctccagaggaatccgaaaaataaattgtattttcactcgatgccttggctgagagaagacctaaagactctgggttgatacctgaaagaatcctgtcttatttggtctccataatcctttgaatggaaagtgacctgtgagagattgaaccatggagaaatatgaaaaccctggattctgagtatttgttgggcagggcgtttagtactgtctcccctttaccagcaaacctgacttcaccatgtttattccctttgcctacaaccagttaatatctgagtaacttatctccttcaataaaataatttaaataatttttttctcctttctcttagattcttttggcattagaggaaaatgttgccattaggctttttctttttgacaacatgatgttgaagaattctggggaaatcccagcagtgttaactatttgaaaatgttgcaactttattgtttttaaagagtgattttctaaatgattaaaaaaaattttttttttgagacatagtgttactttgctgcccaggctggagtgcagtggtgcgatctcagcttactgtaacctccacctcccggattcaagtgattctccagcctcagcctctctagtagctggggctacaggcgcaggctaccatgcctggctggtttttgtatttttggtagagacagagttttgccatgttggccaggctgatctcaaattcctgagcttaggtgatccgcccacttcagcctcccaaagtgttgggattacaagcgtgagccactgtgcccagactaaaagattaaatatttacacttaacattgataaaatttcatctggttaggaattgagtcttagcagactttgctttcccatttggttgaatgtgtccactcgaggtgccagttaactcctggacattaaccttaggccagtgtgtctcctctctgctgagtataggactgttcttcccgtgcccaattctagcagtcatttcaccagtgttccttctgccaagtgtttctgagacctgtgacaatctggaagtcagcagcttccagctgcagtcacagcaggggcttgatcttgtcaggtgtcagggaacagactcagctgtgagctccttctagtggagttctgtgtataatatccagcatgaggccttgttggtgttggtgtttaataagtgacttccccatcacaggaggtattcaagaagctggactttcgctcagtacgtcgattacagagcataacagacattcagtgaaaggatggggaaagaaccagaattaattctgaagtaccttccaagacaaagtgtatgaatatttattcagtccccctagtgtcaggcagtagaaatacagaaatgagacattttgcctttagaatcttgtagttaactgaaaagttgacttttagtcacctgtaatcatcaaagtgccatgattaggtagatgtcatagaagacagaggactttcatgttcagtcttcatgaagaaggagctattccaagaaagctatttagcaaagatgacctttgacaaatgagtgaaaatgggatacattctgaggcgcactttaaggcatttagcatgactagaatatgggagcttagagtggaggaagatcatagacagctttgaaatctgttggaattttattttcagtgctgtgatgaccagttgcaggttttaatatggtgattagggatttgggtagaggagttagttggaaggctgatatatttcaatttgtattttagtaagtttttttggttatagtttgggggataaattggaggggaaggaagataacgcccaaggagagcaattaggtttttgtgctaacttgagtgagaaatgagggcctggatgaaagatgtggctttggggattaggaggagtgacgattcaagcattgagtcagcatgactgactaggtgtagggtttaaggaagtgtctaggatgtctcaggcatttgatttgtgcctgcttgggagggagtactggggaggtgaagtgtgtgtggaggatccagcgggagagggcttccgggttgctgctgggtatttaggtctgcagcttgttagagtcacctggattagaacaaaattgggagatgtcagcatgcagatgccagctaaggccctgtaggccaatgtcagtagctgaccataagagcaggatgaaactttggaagttcattcttaaaaattttataagtaatatatgagtacgtttttatgggatattcaaaccacctactgtttttaggtcttactctcttgtgttgcagctgttgctgatccctgtagagtaaagtacacactgaaggctatggcaatgatctacctttccagcttcctctaggaagggagtttgacaaataaaatgctagtgaactggagcacagtgagcaagggggagggtggcatgagctgaggacacaggtgggcagggccagaacacacaggccttggacatcacctcagggaacttgcatgttatttggagcataatggaaaaccattagaaagttttagggagtggttatgatttcatttatttatattttataaagatctttctggttattcggtgaatagttatggttaaaccagttcaacccagtgacagtacctgtcacatagagttattgtgaggattggttgagatgtatgtgatagattatctggcacaaagtaagggccccctcaatattgtttttctctcaagtgcacccaaattggggtattggaaacacttcctccgtagtttggtagaaggcaccaaatcactagggctgataccgtttgagtggggccccagctgatggggcagggggtaaaggggtgaggggcttaatatgaggcagaaggaagggccaggcctctagaactcatcccaagccggccccattctctggctccctgtacatcctgcctttccatagaggaagccagtcccaggggtggctgcatcttattccatgctttacatctcatcagccttgctgactttccccagcctgctgtagatcagagtgaaatctgtttctcctgtctagagcaagcgcactttttcctgaggatttccaaatattttgaattcccatatgcagtggaagccgaagaagctggagggagagtggggttgggaggtgcagaggttccatgtcttcttgcctttatgaagcttctggcattgtgctgggtgcaggtgataccatggaataagatggatgtggttctagtgacggttcacatcacgaaggaccatctgtgtcctcttagggagtctggctttcctgctaagggcaacaggaaggcattgtagggtctgtgcaggataccaagtgaaggaagagatttccttactgtggacttgcagacgataagtaaacttttgggtcataagagaccatctcttggaagctgaagaacttaggccaaggttttcctgagaaatctagttttgcagaatgttgtgaaccttgatgctctggtgacagtgaattaatggtttattttaggaagcactacacaattttacttaagagtgaggctagaaagttgagctgtttctcaccttttataaatgaagtttaagatcagattaatctccatggagtttttagctcaaagcacaattagttttctatagaaagggcttgggctgaaccaaattatgccattgatctgcctggtagacatacaaatcattctgttcttagaaaaaaacaaaaaaaacgaaaaacaaaaaatcctcactgtcccaagggagttgctcctttcactacaccctgatattgaaaccctgatattgaaatttgtgccccttaaatgatatcatattcagggaaccagctataccagaatctaccttaatccatagacatccctgcctcctctagagaggtcactgaaggagataagtacatagcagaaagtggtgaagggaaagcaaagggatgctttattgttaccagtctcctgcctctggtatcagatggagcaggtggcctgggctagaggcctgtggggccatttctgtcctctaagctctagtctgatctcaccggcagctggtcacatgggaggacaggagatggagaacaagactgacagtagggaggggagagcagagacaggtggctgagtttctctcacttagagaaaagaaactggctgagtgtataccacgtctgaagtgagcaaaagggaagattgcccaaatcctgtaaaggaccttttttgtggtattaatgctattcttttttatgacaaaatgtttcaggtttacagaaaactatacagactaatacgaacactcacatagctgctatctaagtcatacttttaaaaaatacaggtttaaaaaaataataatacaaaagtgggtaaagcctcctgtgtttgtcaccccaagcccgttccacttatttctttattggtggtaactactaccctgactttgatatatttcattctcatgcatgatttcatacatatatatatatgcatgatttcatacatatatatatatatatatataaaatgtatgtatgtcagtatccatagccatattttattttgcatgtttagtcattttacttaggaggcgtcatgatgtgtgtagcctttggtagcgtaccttttttttttaaaaaaaaaatactatgttgataaatgaggttcttgtttatttgttttgcctgctatatagcattttgttgtaggcctataccacggtttatgtatttccccgtagatggtcacttagatatccagtctttgctattgtaaacttcaatgaacgttcttacttaccttcttgtccaatctgggagagtgtttttaggtataaacctaggattttaattattgggctgtaaggtatgcattttcaaacttactagaagttgctaaattacaccccaaatgtttttaagattttatgatttgtatttttgttgttgttttttgagacagagtctcaccctgtcacccaggctggagtgcagtggtatgatctcagctcgctgcaacttccacctcctggcttcaagcaattctcgtgccttagcctcctgagtggctgggactacaggcatgtgccaccatgccctgctaatttttgtattttttagtagagatagggtttcaccatgtccaggctggaaaattttatgatttttaaaatagtgttcttatacatcttttgctagatttgtgtctaaggggtatttttaaaattacttattctaatatctcttaaaatttttttataaagcagggattataggcatgagcccctgcatccaatttattctaatttcctattactgatacattggagtgtaattgacttctgtatatttatcttacattcagaaggcttgccaaactttcttaataattctggggcctatagattattttagatttttctatgtagacagtcacatcacttttgaatagtaacagtaatgaatcatttgtttctttccaatgtttatacttccttattttattgtacttagaacattcagtataatgtttaatagatacatcagacttctcttgtgactgatgttaaatccttacatttcactgacaagtagcaaatttgtagtaggtttttggaagatgtctgttcctccctaaggaagttccttttggtaattgtagatagacttgctcaacctctactgcacctccttctagtgtgccttcccatatttgtgaaactcaaaagctaaatactgcattttctccaattcctttacagttaggattccagataggaattaatgtccattaatcggtgagatttggatttggaattgacttaaattgagagagagacggtccatgaagcatccattttctggtatggatcagagcagaaatggtggggttatagagcctgcaactgtagccgcagttttctcttttttgctagacagctttttaattgcaatgtggctctgaagtttcttcatccctcccaatggtcaggtaagttatttaaatacctgtctgtcattgcttactacactgtccttttaatcttcattatataaacaataaagacatacttaatgctcaccgctagtcttgtgttaatatctccctagtcattttggttgtctgagcctcattttccagcagattcctaaggaagttctcatgggaacaatattccatgggtttttttcttttctaattgagacggagtcttgctgtgtcacccaggctggggtgcagtggtgtgatcttggctccctgcaaccttgctgcctgggttcaagtgattcttgtgcctcagcctcccaagtagctgggattacaggcatgcaccatgatgcccggctaatttttttgtccttttagtagagacggggtttcaccatgttgcccaggctggtcttgaactcccgacctcaagtgatccacctgcctcggcctcctgaagtgctgggattacaggcctgaaccaccgtgcctggctctcttcatcacttctgttgtccctatcctgttcaattttttttctgctccctgcagttcctcctcactttggagtcttgtcctgggagggaaccctacgggatcagttttgagagttcattaatgctaaattgttccagccccttcagaccttcctgtgggccccatttactgaagtgggcaagaaccttcccagtaccaattgctgttctcaaattggccctccgggctttgcagtgaatatctgttgttttgggttcttcggtccttagttggttcaggtaccttgtgcctccctgtgctgctttccacatcgatgctgagacctcccaggactcctctggctcttgatgctctgtcctcacctcactcatttgtattttgggatatgagggttacattttaacctaattttgttgtaaatactgtctctcctcctgccctttttatatcataaaaaagatagttgcttccacagtcacaactatctttccagaatttcccaccagtaactttctgacacacacacttaacttaccaatgggaaacatattttttctgctcagagcccaaggtgagtcacactggccttactcttacctccctatgctggcaagtgttatgttttctagttaatgttttcttagaggattaccatctcctggctttatgtgatattcttgtttctcacaccattcctcgtagagactcagtatcttccatctttttccattgtgtttatgaaaacctcacttcctggtacctggaactggtctaggctgcatagcatgtgctgatgcacttactttctggtttacagttctctctgatttcaacccccaaggattttctttcctttcttgtgagctcaactacacctttaaaaactatatttgatatatgctatctagtatttgtagatagctttttagcaggagtgttttcagattacctaatgagctattttaccagaaacagatatcctgtacataaaattttaccttggaaagactgccccctaggaatgattatattttcaacagttagagaactaactcattcctagaagatggggggaggatgggagttggggagggcatggcaaagagaggagttataagagcatcttctgttcagagaccttcatcttcatctgcatttgggccattagactgtggtccgtgggccagcagctttagcgtaacccgggaaagtttgttagcaacgcagaatctcagccgtgtggggtggcttgcgcctgtaatcccagtactttcgaaggccgaggtgggagaattgcttgaggccagggagttcaagaccagcttgggcaacatagtaagaccctgtctctacaaaaataaaaataaaaaaaagaaatggagagttttagaccccaccctgacctactaactgagaatctgcattttaatgaaatccccagatgatttgcatgcatataaaaattggagaagcattgacttagactctttctgatgtaactgccttccataaaatgcctacttctttagggttaatgaccttcatccactcttgtcatcacttctagcttactcttttttctgcatttaatttttaagcagtttcctcaaataacttttgtatttaagtttttgagaaaagttcttattggtgatatattatgttgagaatgtgatttgaaaaaaaaataggaagcgttaatatggtatgttgtcattgaatatgacagcaaaatcttaagggcaaagctgttacgaaattctcagggcatttactttttcctcaactctggcgagtagagggctaagaaagtaaagcattctgcaattctgcatacagaaatttagacctggctatttttcactggagtatttgcttacagagcatccatatttcctaaaatgctatgattggattattgagctaatgattggacttgctacaaatattgaaaagtacgaggaaggctgggcgaggtggctcacgcctgtaaacccagcactttgggaggccgaggcgggcggatcacgaggtcaggagatcgagaccatcctggctaacacggtgaaaccccgtctctactaaaaatacaaaaaattatccgggcgtggtagtgggcgcctgtagtcccagctacttgggaggctgaggcgggagaatggcgtgaacccgggaggcggagcttgcagtgagccgagatcgtgccactgcactccagcctgggcgacacggcgagctccgtctcaaaaaacaaaacaaaacaaaacaaaaaacgaggatatcttttcaaagcagatacaattaaaggaaaattctctagggatagttcaagttgctgtgatggctttatctgctaaaattttagttaagctagcagataatttatgagcaagttcatgatacatggaattcaggttatgtgtagactgaaagctctctgggctgacacctctctgggcagacaccacattattcctgtatctgcagctcttaggacagtggttaacacataattggtattcaataaatgctttttcactgaatgaatgaatttttagtgaataaagaataaataaagtgttgaagtagcccaaaggactttaaaatttacattttctttttctgtagatcacttgataggtacattgttggatgtaattaaaataagacgggctctatatgtctacgaataggacagtagttaaataaacaatgatgcatttacacaaaggtataccatgaatctatacaaaggaatgaagatttcgtgtgtctgtatgtatgactatatggtgattatataaagaaaagaagaaattcctaaaacttgaaaacaagctgaaacaaataactcgagtacatgtcaagttgattttataaccacagaaaggaaatgattataagtgttgttcaaatacaatattttgactttacatctccagaaggtgatacatcctgaagataaggagaactgcaaaaaaagtaaaactttataataaaaataatattgttttgaaattggtattataaaatatcacgttttaaagttatgatgttagtgtcagtagaaaccaagattttcaacctaagaccaaaacaagatacaagtgtaaaattcaagtcaaaacatgcattaaatttgaattggaaatagta

SEQ ID NO: 123328 - DNA, 399 bp, Homo sapiens
  Payload ID: 4217
  Gene Symbol: CMC2
  Gene Name: C-x(9)-C motif containing 2
  ENST ID: ENST00000565108
  CDS Start-End: 189-356
ggagccgggagcacggtggagcggtggagggcgtcactgggtttcggcgtctggcaagcggttcagctgtctgctccctagcagccggccttcgggtcgggcgtctccgccggctactgccgcttcagttctcccggtgtggccacgagtcgggttgcactgctgtgatccatcctcatctcctaaagatgcatcctgacttatctccacacttgcacactgaagaatgcaacgtcttgattaacttgcttaaggaatgtcacaaaaattacgtagaaaacaggaccaagagcagggagcatggcattgcaatgcgaaagaaactttttaatcctccagaggaatccgaaaaataaattgtattttcactcgatgccttggctgagagaagacctaaag

SEQ ID NO: 123329 - DNA, 640 bp, Homo sapiens
  Payload ID: 4217
  Gene Symbol: CMC2
  Gene Name: C-x(9)-C motif containing 2
  ENST ID: ENST00000565925
  CDS Start-End: 248-472
cacggtggagcggtggagggcgtcactgggtttcggcgtctggcaagcggttcagctgtctgctccctagcagccggccttcgggtcgggcgtctccgccggctactgccgcttcagttctcccggtgtggccacgagtcggcagtagccatcctaatggatatgggttggttcctgttttctatttggaactttaaaaaaaattaaagcaggttgcactgctgtgatccatcctcatctcctaaagatgcatcctgacttatctccacacttgcacactgaagaatgcaacgtcttgattaacttgcttaaggaatgtcacaaaaatcacaacattctgaaattttttggttattgtaatgatgttgatcgggagttgagaaaatgcctgaagaatgaggttcttgctctgtcacctaagctggagtgcagtagggtgatcgtaactcacggaagcctcaaactcaagtgatcctcccacctcagcctcctgagtagctaggacgacagtacgtagaaaacaggaccaagagcagggagcatggcattgcaatgcgaaagaaactttttaatcctccagaggaatccgaaaaataaattgtattttcactcgatgccttggctgagagaagacctaaag

SEQ ID NO: 123330 - DNA, 919 bp, Homo sapiens
  Payload ID: 4217
  Gene Symbol: CMC2
  Gene Name: C-x(9)-C motif containing 2
  ENST ID: ENST00000567593
  CDS Start-End: 209-319
cgtctggcaagcggttcagctgtctgctccctagcagccggccttcgggtcgggcgtctccgccggctactgccgcttcagttctcccggtgtggccacgagtcggtagccatcctaatggatatgggttggttcctgttttctatttggaactttaaaaaaaattaaagcaggttgcactgctgtgatccatcctcatctcctaaagatgcatcctgacttatctccacacttgcacactgaagaatgcaacgtcttgattaacttgcttaaggaatgtcacaaaaatgattccgtccaggatacacattacacttagttcttgtcactctttaggctcctgttatctgtgacattttctttgtttttgatgacccgaaaaggtttgaggcataatggccaggtatttggtagaatgctcctctgtttgaatttgtcttgttttcctcataattggattgggatcatgtgttttcggatgaagaccacagagcacaacattctgaaattttttggttattgtaatgatgttgatcgggagttgagaaaatgcctgaagaatgaggttcttgctctgtcacctaagctggagtgcagtagggtgatcgtaactcacggaagcctcaaactcaagtgatcctcccacctcagcctcctgagtagctaggacgacagtacgtagaaaacaggaccaagagcagggagcatggcattgcaatgcgaaagaaactttttaatcctccagaggaatccgaaaaataaattgtattttcactcgatgccttggctgagagaagacctaaagactctgggttgatacctgaaagaatcctgtcttatttggtctccataatcctttgaatggaaagtgacctgtgagagattgaaccatggagaaatatgaaaaccctggattctg

SEQ ID NO: 123331 - DNA, 801 bp, Homo sapiens
  Payload ID: 4217
  Gene Symbol: CMC2
  Gene Name: C-x(9)-C motif containing 2
  ENST ID: ENST00000570086
  CDS Start-End: 178-333
cacggtggagcggtggagggcgtcactgggtttcggcgtctggcaagcggttcagctgtctgctccctagcagccggccttcgggtcgggcgtctccgccggctactgccgcttcagttctcccggtgtggccacgagtcgggttgcactgctgtgatccatcctcatctcctaaagatgcatcctgacttatctccacacttgcacactgaagaatgcaacgtcttgattaacttgcttaaggaatgtcacaaaaatggcactagaacagttatattcagcgctgacacttctgattataatggaattattctaaaagtatctgctctttgatggctaccattctgtgtttaatgcacaacattctgaaattttttggttattgtaatgatgttgatcgggagttgagaaaatgcctgaagaatgagtacgtagaaaacaggaccaagagcagggagcatggcattgcaatgcgaaagaaactttttaatcctccagaggaatccgaaaaataaattgtattttcactcgatgccttggctgagagaagacctaaagactctgggttgatacctgaaagaatcctgtcttatttggtctccataatcctttgaatggaaagtgacctgtgagagattgaaccatggagaaatatgaaaaccctggattctgagtatttgttgggcagggcgtttagtactgtctcccctttaccagcaaacctgacttcaccatgtttattccctttgcctacaaccagttaatatctgagtaacttatctccttcaataaaataattta

SEQ ID NO: 123332 - DNA, 663 bp, Homo sapiens
  Payload ID: 4217
  Gene Symbol: CMC2
  Gene Name: C-x(9)-C motif containing 2
  ENST ID: ENST00000565613
  CDS Start-End: 157-381
gtcactgggtttcggcgtctggcaagcggttcagctgtctgctccctagcagccggccttcgggtcgggcgtctccgccggctactgccgcttcagttctcccggtgtggccacgagtcgggttgcactgctgtgatccatcctcatctcctaaagatgcatcctgacttatctccacacttgcacactgaagaatgcaacgtcttgattaacttgcttaaggaatgtcacaaaaatcacaacattctgaaattttttggttattgtaatgatgttgatcgggagttgagaaaatgcctgaagaatgaggttcttgctctgtcacctaagctggagtgcagtagggtgatcgtaactcacggaagcctcaaactcaagtgatcctcccacctcagcctcctgagtagctaggacgacagggaccatctggacttcctttggagatgtcttagcatattttaatgtagactatattttaatttgctttgtaacttattttattggcctgctacaaagtattatcttctgaagagtttcccttaagacccttctcaacctgattgctgggggcaatccagtagacgtgattaaagtacgtagaaaacaggaccaagagcagggagcatggcattgcaatgcgaaagaaactttttaatcctccag

SEQ ID NO: 123333 - DNA, 825 bp, Homo sapiens
  Payload ID: 4217
  Gene Symbol: CMC2
  Gene Name: C-x(9)-C motif containing 2
  ENST ID: ENST00000568228
  CDS Start-End: 386-541
gggggcgaggagccgggagcacggtggagcggtggagggcgtcactgggtttcggcgtctggcaagcggttcagctgtctgctccctagcagccggccttcgggtcgggcgtctccgccggctactgccgcttcagttctcccggtgtggccacgagtcgggaactgctataccagtttccacagtggctatcccagtttacatgcccgcccacagtgcgcaggagtttcagtttctccacatcctctttagcgtttgttattttctgtttttttttcagcagtagccatcctaatggatatgggttggttcctgttttctatttggaactttaaaaaaaattaaagcaggttgcactgctgtgatccatcctcatctcctaaagatgcatcctgacttatctccacacttgcacactgaagaatgcaacgtcttgattaacttgcttaaggaatgtcacaaaaatggcactagaacagttatattcagcgctgacacttctgattataatggaattattctaaaagtatctgctctttgatggctaccattctgtgtttaatgcacaacattctgaaattttttggttattgtaatgatgttgatcgggagttgagaaaatgcctgaagaatgagtacgtagaaaacaggaccaagagcagggagcatggcattgcaatgcgaaagaaactttttaatcctccagaggaatccgaaaaataaattgtattttcactcgatgccttggctgagagaagacctaaagactctgggttgatacctgaaagaatcctgtcttatttggtctccataatcctttgaatg

SEQ ID NO: 123334 - DNA, 424 bp, Homo sapiens
  Payload ID: 4217
  Gene Symbol: CMC2
  Gene Name: C-x(9)-C motif containing 2
  ENST ID: ENST00000564174
  CDS Start-End: 224-391
gtcactgggtttcggcgtctggcaagcggttcagctgtctgctccctagcagccggccttcgggtcgggcgtctccgccggctactgccgcttcagttctcccggtgtggccacgagtcggtagccatcctaatggatatgggttggttcctgttttctatttggaactttaaaaaaaattaaagcaggttgcactgctgtgatccatcctcatctcctaaagatgcatcctgacttatctccacacttgcacactgaagaatgcaacgtcttgattaacttgcttaaggaatgtcacaaaaattacgtagaaaacaggaccaagagcagggagcatggcattgcaatgcgaaagaaactttttaatcctccagaggaatccgaaaaataaattgtattttcactcgatgccttggctgagaga

SEQ ID NO: 123335 - DNA, 671 bp, Homo sapiens
  Payload ID: 4217
  Gene Symbol: CMC2
  Gene Name: C-x(9)-C motif containing 2
  Uniprot ID: Q9NRP2
  ENST ID: ENST00000565650
  CDS Start-End: 267-506
gggggcgaggagccgggagcacggtggagcggtggagggcgtcactgggtttcggcgtctggcaagcggttcagctgtctgctccctagcagccggccttcgggtcgggcgtctccgccggctactgccgcttcagttctcccggtgtggccacgagtcggcagtagccatcctaatggatatgggttggttcctgttttctatttggaactttaaaaaaaattaaagcaggttgcactgctgtgatccatcctcatctcctaaagatgcatcctgacttatctccacacttgcacactgaagaatgcaacgtcttgattaacttgcttaaggaatgtcacaaaaatcacaacattctgaaattttttggttattgtaatgatgttgatcgggagttgagaaaatgcctgaagaatgagtacgtagaaaacaggaccaagagcagggagcatggcattgcaatgcgaaagaaactttttaatcctccagaggaatccgaaaaataaattgtattttcactcgatgccttggctgagagaagacctaaagactctgggttgatacctgaaagaatcctgtcttatttggtctccataatcctttgaatggaaagtgacctgtgagagattgaaccatggagaaatatgaaaaccctggattctgagtatttg

SEQ ID NO: 123336 - DNA, 528 bp, Homo sapiens
  Payload ID: 4217
  Gene Symbol: CMC2
  Gene Name: C-x(9)-C motif containing 2
  Uniprot ID: Q9NRP2
  ENST ID: ENST00000565914
  CDS Start-End: 199-438
cagaagcggtgtattgcgcctcagcatggaggaggacgtgaaggcgtacggagtctgggagtagtacaccacgtagattttggatataagtaatgtgcaggtttcttacatgggtacattggatgacactgaggtttggggtactgttgatcccatcatgcaggttgcactgctgtgatccatcctcatctcctaaagatgcatcctgacttatctccacacttgcacactgaagaatgcaacgtcttgattaacttgcttaaggaatgtcacaaaaatcacaacattctgaaattttttggttattgtaatgatgttgatcgggagttgagaaaatgcctgaagaatgagtacgtagaaaacaggaccaagagcagggagcatggcattgcaatgcgaaagaaactttttaatcctccagaggaatccgaaaaataaattgtattttcactcgatgccttggctgagagaagacctaaagactctgggttgatacctgaaagaatcctgtcttatttggtctccata

SEQ ID NO: 123337 - DNA, 683 bp, Homo sapiens
  Payload ID: 4217
  Gene Symbol: CMC2
  Gene Name: C-x(9)-C motif containing 2
  ENST ID: ENST00000561614
  CDS Start-End: 1-164
acttgcacactgaagaatgcaacgtcttgattaacttgcttaaggaatgtcacaaaaatcacaacattctgaaattttttggttattgtaatgatgttgatcgggagttgagaaaatgcctgaagaatgagggaccatctggacttcctttggagatgtcttagcatattttaatgtagactatattttaatttgctttgtaacttattttattggcctgctacaaagtattatcttctgaagagtttcccttaagacccttctcaacctgattgctgggggcaatccagtagacgtgattaaagtacgtagaaaacaggaccaagagcagggagcatggcattgcaatgcgaaagaaactttttaatcctccagaggaatccgaaaaataaattgtattttcactcgatgccttggctgagagaagacctaaagactctgggttgatacctgaaagaatcctgtcttatttggtctccataatcctttgaatggaaagtgacctgtgagagattgaaccatggagaaatatgaaaaccctggattctgagtatttgttgggcagggcgtttagtactgtctcccctttaccagcaaacctgacttcaccatgtttattccctttgcctacaaccagttaatatctgagtaacttatctccttcaataaaataatttaaataa

SEQ ID NO: 123338 - DNA, 766 bp, Homo sapiens
  Payload ID: 4217
  Gene Symbol: CMC2
  Gene Name: C-x(9)-C motif containing 2
  ENST ID: ENST00000486645
  CDS Start-End: 198-350
cgggggcgaggagccgggagcacggtggagcggtggagggcgtcactgggtttcggcgtctggcaagcggttcagctgtctgctccctagcagccggccttcgggtcgggcgtctccgccggctactgccgcttcagttctcccggtgtggccacgagtcgggttgcactgctgtgatccatcctcatctcctaaagatgcatcctgacttatctccacacttgcacactgaagaatgcaacgtcttgattaacttgcttaaggaatgtcacaaaaatgttcttgctctgtcacctaagctggagtgcagtagggtgatcgtaactcacggaagcctcaaactcaagtgatcctcccacctcagcctcctgagtagctaggacgacagtacgtagaaaacaggaccaagagcagggagcatggcattgcaatgcgaaagaaactttttaatcctccagaggaatccgaaaaataaattgtattttcactcgatgccttggctgagagaagacctaaagactctgggttgatacctgaaagaatcctgtcttatttggtctccataatcctttgaatggaaagtgacctgtgagagattgaaccatggagaaatatgaaaaccctggattctgagtatttgttgggcagggcgtttagtactgtctcccctttaccagcaaacctgacttcaccatgtttattccctttgcctacaaccagttaatatctgagtaacttatctccttcaataaaataatttaaataa

SEQ ID NO: 123339 - DNA, 890 bp, Homo sapiens
  Payload ID: 4217
  Gene Symbol: CMC2
  Gene Name: C-x(9)-C motif containing 2
  Uniprot ID: Q9NRP2
  ENST ID: ENST00000564249
  CDS Start-End: 411-650
cacattgtgctgatccattgtctgttggactcttgggttgcttccatgttttaattattgtgaataatatgccgtgaacatgggtgttcaaatatctcttcaaaaccctgcatttaattcttatgaaaatatagccggaagtggaattgttggatcatatggtaatttcatttttaattttttgaggaactgctataccagtttccacagtggctatcccagtttacatgcccgcccacagtgcgcaggagtttcagtttctccacatcctctttagcgtttgttattttctgtttttttttcagcagtagccatcctaatggatatgggttggttcctgttttctatttggaactttaaaaaaaattaaagcaggttgcactgctgtgatccatcctcatctcctaaagatgcatcctgacttatctccacacttgcacactgaagaatgcaacgtcttgattaacttgcttaaggaatgtcacaaaaatcacaacattctgaaattttttggttattgtaatgatgttgatcgggagttgagaaaatgcctgaagaatgagtacgtagaaaacaggaccaagagcagggagcatggcattgcaatgcgaaagaaactttttaatcctccagaggaatccgaaaaataaattgtattttcactcgatgccttggctgagagaagacctaaagactctgggttgatacctgaaagaatcctgtcttatttggtctccataatcctttgaatggaaagtgacctgtgagagattgaaccatggagaaatatgaaaaccctggattctgagtatttgttgggcagggcgtttagtactgtctcccctttaccagcaaacctgacttcaccatgtttattccctttgcctaca

SEQ ID NO: 123340 - DNA, 871 bp, Homo sapiens
  Payload ID: 4217
  Gene Symbol: CMC2
  Gene Name: C-x(9)-C motif containing 2
  ENST ID: ENST00000570195
  CDS Start-End: 174-455
gtggagcggtggagggcgtcactgggtttcggcgtctggcaagcggttcagctgtctgctccctagcagccggccttcgggtcgggcgtctccgccggctactgccgcttcagttctcccggtgtggccacgagtcgggttgcactgctgtgatccatcctcatctcctaaagatgcatcctgacttatctccacacttgcacactgaagaatgcaacgtcttgattaacttgcttaaggaatgtcacaaaaatgaaacgtgcatcatatctgcaacttactcggttcagaagaaaagctcgggtgtatatcacaacattctgaaattttttggttattgtaatgatgttgatcgggagttgagaaaatgcctgaagaatgaggttcttgctctgtcacctaagctggagtgcagtagggtgatcgtaactcacggaagcctcaaactcaagtgatcctcccacctcagcctcctgagtagctaggacgacagtacgtagaaaacaggaccaagagcagggagcatggcattgcaatgcgaaagaaactttttaatcctccagaggaatccgaaaaataaattgtattttcactcgatgccttggctgagagaagacctaaagactctgggttgatacctgaaagaatcctgtcttatttggtctccataatcctttgaatggaaagtgacctgtgagagattgaaccatggagaaatatgaaaaccctggattctgagtatttgttgggcagggcgtttagtactgtctcccctttaccagcaaacctgacttcaccatgtttattccctttgcctacaaccagttaatatctgagtaacttatctccttcaataaaataatttaaataa

SEQ ID NO: 123341 - DNA, 573 bp, Homo sapiens
  Payload ID: 4217
  Gene Symbol: CMC2
  Gene Name: C-x(9)-C motif containing 2
  ENST ID: ENST00000562713
  CDS Start-End: 248-472
gggcgtcactgggtttcggcgtctggcaagcggttcagctgtctgctccctagcagccggccttcgggtcgggcgtctccgccggctactgccgcttcagttctcccggtgtggccacgagtcggattttggatataagtaatgtgcaggtttcttacatgggtacattggatgacactgaggtttggggtactgttgatcccatcatgcaggttgcactgctgtgatccatcctcatctcctaaagatgcatcctgacttatctccacacttgcacactgaagaatgcaacgtcttgattaacttgcttaaggaatgtcacaaaaatcacaacattctgaaattttttggttattgtaatgatgttgatcgggagttgagaaaatgcctgaagaatgaggttcttgctctgtcacctaagctggagtgcagtagggtgatcgtaactcacggaagcctcaaactcaagtgatcctcccacctcagcctcctgagtagctaggacgacagtacgtagaaaacaggaccaagagcagggagcatggcattgcaatgcgaaagaaactttttaat

SEQ ID NO: 123342 - DNA, 481 bp, Homo sapiens
  Payload ID: 4217
  Gene Symbol: CMC2
  Gene Name: C-x(9)-C motif containing 2
  ENST ID: ENST00000630396
  CDS Start-End: 200-481
ggcgggggcgaggagccgggagcacggtggagcggtggagggcgtcactgggtttcggcgtctggcaagcggttcagctgtctgctccctagcagccggccttcgggtcgggcgtctccgccggctactgccgcttcagttctcccggtgtggccacgagtcgggttgcactgctgtgatccatcctcatctcctaaagatgcatcctgacttatctccacacttgcacactgaagaatgcaacgtcttgattaacttgcttaaggaatgtcacaaaaatgaaacgtgcatcatatctgcaacttactcggttcagaagaaaagctcgggtgtatatcacaacattctgaaattttttggttattgtaatgatgttgatcgggagttgagaaaatgcctgaagaatgaggttcttgctctgtcacctaagctggagtgcagtagggtgatcgtaactcacggaagcctcaaactcaagtga

SEQ ID NO: 123343 - DNA, 864 bp, Homo sapiens
  Payload ID: 4218
  Gene Symbol: CMC4
  Gene Name: C-x(9)-C motif containing 4
  Uniprot ID: P56277
  ENST ID: ENST00000369479
  CDS Start-End: 443-649
gttctgttcagtatttggcaatcacttcatccactactgcagtgcacccacccttgggcctggggggagggagtgggttgaaaaactgctcaagaaacagaagtttagcaagggtcatgaagaatactgcaagtgaaactgcagagagaggttacgtaggcagaaagcaagtcaacaaaagcacttagtcaggatccgtaacttgaaattgactcctttggaaattgccatagaacccttaatggacatcatcggctggacctgggatctgatgaatcccacaaaagtcagcaccttctacagaacagatgccctgatcaccaaggacttggtactgatttagagagaagagagcagctcctagcagcatcaacatctatttgtcgcttatttgccctgcagcaattcacctgcctttccttctcccatcctttttctggatatgccgcagaaggatccgtgccagaagcaagcctgtgagatacagaaatgtttacaagccaacagctacatggaatcaaagtgtcaggctgtcatccaagaactgcgtaagtgttgtgctcagtatcccaagggaagatctgtcgtctgttcaggatttgaaaaagaagaggaagaaaacctaacacggaagtctgcatcaaagtaaagttcttctgaagtgctgctccatgtttccaccaaatgaattttttttatcctcctgactcttcaggccaggtagcagcaaatagcaaatgaaaaagtcagctacaaaagttaatgaatatgccatctatgcagaacaggcagaaatataaacacattaaaagacaaatatgtagaatgtaatatactgagctgctaaaataaacctgtttaaga

SEQ ID NO: 123344 - DNA, 1107 bp, Homo sapiens
  Payload ID: 4218
  Gene Symbol: CMC4
  Gene Name: C-x(9)-C motif containing 4
  Uniprot ID: P56277
  ENST ID: ENST00000369484
  CDS Start-End: 680-886
gggcggggctgtgggggcgaggagggggcagcgggcgcgcggctggcgcgcgggggcgggccttggggcacgggggcggggcccgcccagcagcacctgggaaacgcccgcgcggtttggggcaggcgtggccgtcggggcggagggcggtggccggccgcggtccgggcgtcaggccgggcggcgggggcggcagggaggcggcgctctggggccgcaggcggacgtactctgtgagcggcgcccgggcgcctgggcaggcgcctcccgagtaccggcgcccattttgcccgcccgctaaggagacccgtgcgcggcctacacgcttgggggacagccctttaagacgacatctccgcgaacgccggcctcttgagccagggggacgctcttttgaaagtcagtcccaaaacagttaaggttttattttattttgttttatttccaagtcacagcccccgaatctcgtacaactctccctggaccacttccggttgccggcccgcgcctcataacttcggttcgagtgacctcggcccgggatgcccctcggctcaccccgggctcacgtcgcgatcctggcttgagtggcccagggtgggagacctggaagttttagcctagctgttctcaaggcggattaattagcccaagaaacattatattcatttttctggatatgccgcagaaggatccgtgccagaagcaagcctgtgagatacagaaatgtttacaagccaacagctacatggaatcaaagtgtcaggctgtcatccaagaactgcgtaagtgttgtgctcagtatcccaagggaagatctgtcgtctgttcaggatttgaaaaagaagaggaagaaaacctaacacggaagtctgcatcaaagtaaagttcttctgaagtgctgctccatgtttccaccaaatgaattttttttatcctcctgactcttcaggccaggtagcagcaaatagcaaatgaaaaagtcagctacaaaagttaatgaatatgccatctatgcagaacaggcagaaatataaacacattaaaagacaaatatgtagaatgtaatatactgagctgctaaaataaacctgtttaagagaaaaa

SEQ ID NO: 123345 - DNA, 5072 bp, Homo sapiens
  Payload ID: 4219
  Gene Symbol: CLMP
  Gene Name: CXADR-like membrane protein
  Uniprot ID: Q9H6B4
  ENST ID: ENST00000448775
  CDS Start-End: 342-1463
agctgaattttttttttccctctctctttcttcactcctttttctttccaaacagggaaaagtgttccacgaagcggtagcgccttttcgcctcgcgttttcctccctgaccctggtcccggctcccgtccgggcgccagctggtggggcgagcgccgggagcccatctgcccccaggggcacggggcgcggggccggctcccgcccggcacatggctgcagccacctcgcgcgcaccccgaggcgccgcgcccagctcgcccgaggtccgtcggaggcgcccggccgccccggagccaagcagcagctgagcggggaagcgcccgcgtccggggatcgggatgtccctcctccttctcctcttgctagtttcctactatgttggaaccttggggactcacactgagatcaagagagtggcagaggaaaaggtcactttgccctgccaccatcaactggggcttccagaaaaagacactctggatattgaatggctgctcaccgataatgaagggaaccaaaaagtggtgatcacttactccagtcgtcatgtctacaataacttgactgaggaacagaagggccgagtggcctttgcttccaatttcctggcaggagatgcctccttgcagattgaacctctgaagcccagtgatgagggccggtacacctgtaaggttaagaattcagggcgctacgtgtggagccatgtcatcttaaaagtcttagtgagaccatccaagcccaagtgtgagttggaaggagagctgacagaaggaagtgacctgactttgcagtgtgagtcatcctctggcacagagcccattgtgtattactggcagcgaatccgagagaaagagggagaggatgaacgtctgcctcccaaatctaggattgactacaaccaccctggacgagttctgctgcagaatcttaccatgtcctactctggactgtaccagtgcacagcaggcaacgaagctgggaaggaaagctgtgtggtgcgagtaactgtacagtatgtacaaagcatcggcatggttgcaggagcagtgacaggcatagtggctggagccctgctgattttcctcttggtgtggctgctaatccgaaggaaagacaaagaaagatatgaggaagaagagagacctaatgaaattcgagaagatgctgaagctccaaaagcccgtcttgtgaaacccagctcctcttcctcaggctctcggagctcacgctctggttcttcctccactcgctccacagcaaatagtgcctcacgcagccagcggacactgtcaactgacgcagcaccccagccagggctggccacccaggcatacagcctagtggggccagaggtgagaggttctgaaccaaagaaagtccaccatgctaatctgaccaaagcagaaaccacacccagcatgatccccagccagagcagagccttccaaacggtctgaattacaatggacttgactcccacgctttcctaggagtcagggtctttggactcttctcgtcattggagctcaagtcaccagccacacaaccagatgagaggtcatctaagtagcagtgagcattgcacggaacagattcagatgagcattttccttatacaataccaaacaagcaaaaggatgtaagctgattcatctgtaaaaaggcatcttattgtgcctttagaccagagtaagggaaagcaggagtccaaatctatttgttgaccaggacctgtggtgagaaggttggggaaaggtgaggtgaatatacctaaaacttttaatgtgggatattttgtatcagtgctttgattcacaattttcaagaggaaatgggatgctgtttgtaaattttctatgcatttctgcaaacttattggattattagttattcagacagtcaagcagaacccacagccttattacacctgtctacaccatgtactgagctaaccacttctaagaaactccaaaaaaggaaacatgtgtcttctattctgacttaacttcatttgtcataaggtttggatattaatttcaaggggagttgaaatagtgggagatggagaagagtgaatgagtttctcccactctatactaatctcactatttgtattgagcccaaaataactatgaaaggagacaaaaatttgtgacaaaggattgtgaagagctttccatcttcatgatgttatgaggattgttgacaaacattagaaatatataatggagcaattgtggatttcccctcaaatcagatgcctctaaggactttcctgctagatatttctggaaggagaaaatacaacatgtcatttatcaacgtccttagaaagaattcttctagagaaaaagggatctaggaatgctgaaagattacccaacataccattatagtctcttctttctgagaaaatgtgaaaccagaattgcaagactgggtggactagaaagggagattagatcagttttctcttaatatgtcaaggaaggtagccgggcatggtgccaggcacctgtaggaaaatccagcaggtggaggttgcagtgagccaagattatgccattgcactccagcctgggtgacaaagcaagactccatctcaaaaaaaaaaaaaaatcaaggaaggataaaaggaagttcagtattgtaccacacttggaacttcctccatttcttccattttagaaggatatgaacctggaacttttgatgattctaagccttaaactatcaaaaagatcagggattgccaatgcttctaatggcactgcaagtatatgccataaccgttccctcctaaaagtgaaaaatgagagaaattcagtattttcccaggctcagcatccagaagtctagctctgggctggaagaaaagggtactaatatttagggaagagatgagaataagtagtgggtggcaggagagggctgagctagtgcctgctaacattttagttgtatcttggaaagatttagcaaaaataactcaccaggatagctgctgaagagttgatgaatgggagaagaaagatgtttgagaaataaagaaaacagcagcctgcaatacaataacttgcctttttaatagttttgattactcttgatacctacagcacaaatgctggacctgaatcagctcttcaaggaccctagcacaaatgtcaactgatcacctctgggagagtagaaaacttttttttttttgagacgaagtctcgctctgttgcccaggctggagtgcagtggcaccatctcagctcactgcagcgtccgcctcttgggttcaagtgattctcctgccttgtcctcctgagtcgctggtattacaggtgcctgccatcacacccagctaatttttggagttctgatagagacagggtttctccatgttggccaggcttgtctcaagctcctgacctcaagtgacctacccacccttggcctcccacagtgctggaagccactgcacctggctcagaatacttttttttttgagatgcagtcttgctctcatcacgcaggctggagtgcagtggcgtatctcggctcactgcgacctccacctcccgagttcaagcgattctccttcctcagtcccccaagtagcttggattataggtgtgcgccaccacgtacagctaatttttgtatttttagtagagatggggtttcgccatgttgaccaggctggtctcaaaacgcctgacctcaggtgatccacccacctcggccccacaaagtgctaggattacaggtgtgagccaccatgcccggcccagaatactttttaaaagaagagcaggttagaggaaagaaaaaaattgatgctgaatgtggtgatgaaagcatgtttctaaaatgggaagcagatgcttaaagaggaaagactaatctgggattttgccccatttctctggtttttcactcctatatttaattctcacaatcgtgtcgtcacatagtgcaaaaaacaaaattcttgtaaagtccccaggagtttatgcttgggtgaaagttttagcctgagtattttcttcctctaaaaaaggtgggaaatgagacattgaggaattaacatataaatgtctgctatgggtttaagagaactggcgtatttggaatgcttcttacactaacactgtctcattgtaaaatataaaaccccttactctaactacatttttattcctctggtagtgtggtatccaggcaacatatcacttctgctatgtaattctaagaattctcatttctagagtacctgagccaaacaaatacacaacggaagctgcagctgtatcatcactagcaatttgctcatcattatttactacctttgaacctaaggtttcctgcctatgcttttgaaagcaaaaatcagtctcctttgcatgaaaaagagccttagatttttaaacatgttagttaccagaatgctaaaataccagttgattacccaaattattttggaaatctatccataatggaagtctacaacaaacacataaaacagattacactaagagctgagaaattcaaaggaactgaagattctgagagataaactgttcaagtcttagcaatgatactgcacttctctttgacaggttctgggcttaagttagaggccctactggttccaaaccatattccactgactttgcaagtaaaataaatttgattctgaaataggaaacaaaaaaaggagaaataaccgaatagtagaagaaaaactgtttgtaggaagacgatgcagatggaatgatgtggacattgagtaaccatgtcaataaaatatataaaccaaacttaaatttgtgaaataaggaagttggtacctttgttgttacagtgtataaaaacaatttcggaactgctgttgcaaaaagacatatatagttttgcttccttctggtgttaagctgtttatatttcagtttcagttttaacttctaagttgccttgtaattgggactgtgtttcagcatcacaaaaaccaaatatttattatggatgcatctgtatcagcaattaaaaaataaacaagtaaaagtgatactgta

SEQ ID NO: 123346 - DNA, 2936 bp, Homo sapiens
  Payload ID: 4220
  Gene Symbol: CXXC1
  Gene Name: CXXC finger protein 1
  Uniprot ID: Q9P0U4
  ENST ID: ENST00000285106
  CDS Start-End: 716-2686
tgaagtcggagacgacagaggaactggtttcctccgccccgcaaggcacacagcctgccgacgccccattaatacatgtggaaggggaaagagactgaatggaggaatgaatacaacttgatccaggtcgtgcttcggaagcggtcactttacctgtgaacctctctgcctgacaaacgggcaatgtacggaatcaaccaccaagatggcggcgcccgtgaagaatccgcaattaggtcgccgtcatatgtcgcctaggaacgtacggaattcgacccacgtacggaatcggattccaagatgacggcatctatgaggaagtcacgcagtaggtgcagccatgttgcctgtacgtcgaggccgtacaagcagccgccgtacggactctactgacaaggtggcggcgccctcgggaaagccacattagagcgcggccatgttcccggcgaacatatggattcggccaccatacggatacgataagcaagatggcggcgcctgaggggtcttgggggctctaggccggccacctactggtttgcagcggagacgacgcatggggcctgcgcaataggagtacgctgcctgggaggcgtgactagaagcggaagtagttgtgggcgcctttgcaaccgcctgggacgccgccgagtggtctgtgcaggttcgcgggtcgctggcgggggtcgtgagggagtgcgccgggagcggagatatggagggagatggttcagacccagagcctccagatgccggggaggacagcaagtccgagaatggggagaatgcgcccatctactgcatctgccgcaaaccggacatcaactgcttcatgatcgggtgtgacaactgcaatgagtggttccatggggactgcatccggatcactgagaagatggccaaggccatccgggagtggtactgtcgggagtgcagagagaaagaccccaagctagagattcgctatcggcacaagaagtcacgggagcgggatggcaatgagcgggacagcagtgagccccgggatgagggtggagggcgcaagaggcctgtccctgatccagacctgcagcgccgggcagggtcagggacaggggttggggccatgcttgctcggggctctgcttcgccccacaaatcctctccgcagcccttggtggccacacccagccagcatcaccagcagcagcagcagcagatcaaacggtcagcccgcatgtgtggtgagtgtgaggcatgtcggcgcactgaggactgtggtcactgtgatttctgtcgggacatgaagaagttcgggggccccaacaagatccggcagaagtgccggctgcgccagtgccagctgcgggcccgggaatcgtacaagtacttcccttcctcgctctcaccagtgacgccctcagagtccctgccaaggccccgccggccactgcccacccaacagcagccacagccatcacagaagttagggcgcatccgtgaagatgagggggcagtggcgtcatcaacagtcaaggagcctcctgaggctacagccacacctgagccactctcagatgaggacctacctctggatcctgacctgtatcaggacttctgtgcaggggcctttgatgaccatggcctgccctggatgagcgacacagaagagtccccattcctggaccccgcgctgcggaagagggcagtgaaagtgaagcatgtgaagcgtcgggagaagaagtctgagaagaagaaggaggagcgatacaagcggcatcggcagaagcagaagcacaaggataaatggaaacacccagagagggctgatgccaaggaccctgcgtcactgccccagtgcctggggcccggctgtgtgcgccccgcccagcccagctccaagtattgctcagatgactgtggcatgaagctggcagccaaccgcatctacgagatcctcccccagcgcatccagcagtggcagcagagcccttgcattgctgaagagcacggcaagaagctgctcgaacgcattcgccgagagcagcagagtgcccgcactcgccttcaggaaatggaacgccgattccatgagcttgaggccatcattctacgtgccaagcagcaggctgtgcgcgaggatgaggagagcaacgagggtgacagtgatgacacagacctgcagatcttctgtgtttcctgtgggcaccccatcaacccacgtgttgccttgcgccacatggagcgctgctacgccaagtatgagagccagacgtcctttgggtccatgtaccccacacgcattgaaggggccacacgactcttctgtgatgtgtataatcctcagagcaaaacatactgtaagcggctccaggtgctgtgccccgagcactcacgggaccccaaagtgccagctgacgaggtatgcgggtgcccccttgtacgtgatgtctttgagctcacgggtgacttctgccgcctgcccaagcgccagtgcaatcgccattactgctgggagaagctgcggcgtgcggaagtggacttggagcgcgtgcgtgtgtggtacaagctggacgagctgtttgagcaggagcgcaatgtgcgcacagccatgacaaaccgcgcgggattgctggccctgatgctgcaccagacgatccagcacgatcccctcactaccgacctgcgctccagtgccgaccgctgagcctcctggcccggaccccttacaccctgcattccagatgggggagccgcccggtgcccgtgtgtccgttcctccactcatctgtttctccggttctccctgtgcccatccaccggttgaccgcccatctgcctttatcagagggactgtccccgtcgacatgttcagtgcctggtggggctgcggagtccactcatccttgcctcctctccctgggttttgttaataaaattttgaagaaaccaaggaa

SEQ ID NO: 123347 - DNA, 2280 bp, Homo sapiens
  Payload ID: 4220
  Gene Symbol: CXXC1
  Gene Name: CXXC finger protein 1
  Uniprot ID: Q9P0U4
  ENST ID: ENST00000412036
  CDS Start-End: 48-2030
gcgggtcgctggcgggggtcgtgagggagtgcgccgggagcggagatatggagggagatggttcagacccagagcctccagatgccggggaggacagcaagtccgagaatggggagaatgcgcccatctactgcatctgccgcaaaccggacatcaactgcttcatgatcgggtgtgacaactgcaatgagtggttccatggggactgcatccggatcactgagaagatggccaaggccatccgggagtggtactgtcgggagtgcagagagaaagaccccaagctagagattcgctatcggcacaagaagtcacgggagcgggatggcaatgagcgggacagcagtgagccccgggatgagggtggagggcgcaagaggcctgtccctgatccagacctgcagcgccgggcagggtcagggacaggggttggggccatgcttgctcggggctctgcttcgccccacaaatcctctccgcagcccttggtggccacacccagccagcatcaccagcagcagcagcagcagatcaaacggtcagcccgcatgtgtggtgagtgtgaggcatgtcggcgcactgaggactgtggtcactgtgatttctgtcgggacatgaagaagttcgggggccccaacaagatccggcagaagtgccggctgcgccagtgccagctgcgggcccgggaatcgtacaagtacttcccttcctcgctctcaccagtgacgccctcagagtccctgccaaggccccgccggccactgcccacccaacagcagccacagccatcacagaagttagggcgcatccgtgaagatgagggggcagtggcgtcatcaacagtcaaggagcctcctgaggctacagccacacctgagccactctcagatgaggacctacctctggatcctgacctgtatcaggacttctgtgcaggggcctttgatgaccatggcctgccctggatgagcgacacagaagagtccccattcctggaccccgcgctgcggaagagggcagtgaaagtgaagcatgtgaagcgtcgggagaagaagtctgagaagaaggtgatggagaggaaggaggagcgatacaagcggcatcggcagaagcagaagcacaaggataaatggaaacacccagagagggctgatgccaaggaccctgcgtcactgccccagtgcctggggcccggctgtgtgcgccccgcccagcccagctccaagtattgctcagatgactgtggcatgaagctggcagccaaccgcatctacgagatcctcccccagcgcatccagcagtggcagcagagcccttgcattgctgaagagcacggcaagaagctgctcgaacgcattcgccgagagcagcagagtgcccgcactcgccttcaggaaatggaacgccgattccatgagcttgaggccatcattctacgtgccaagcagcaggctgtgcgcgaggatgaggagagcaacgagggtgacagtgatgacacagacctgcagatcttctgtgtttcctgtgggcaccccatcaacccacgtgttgccttgcgccacatggagcgctgctacgccaagtatgagagccagacgtcctttgggtccatgtaccccacacgcattgaaggggccacacgactcttctgtgatgtgtataatcctcagagcaaaacatactgtaagcggctccaggtgctgtgccccgagcactcacgggaccccaaagtgccagctgacgaggtatgcgggtgcccccttgtacgtgatgtctttgagctcacgggtgacttctgccgcctgcccaagcgccagtgcaatcgccattactgctgggagaagctgcggcgtgcggaagtggacttggagcgcgtgcgtgtgtggtacaagctggacgagctgtttgagcaggagcgcaatgtgcgcacagccatgacaaaccgcgcgggattgctggccctgatgctgcaccagacgatccagcacgatcccctcactaccgacctgcgctccagtgccgaccgctgagcctcctggcccggaccccttacaccctgcattccagatgggggagccgcccggtgcccgtgtgtccgttcctccactcatctgtttctccggttctccctgtgcccatccaccggttgaccgcccatctgcctttatcagagggactgtccccgtcgacatgttcagtgcctggtggggctgcggagtccactcatccttgcctcctctccctgggttttgttaataaaattttgaagaaaccaaggaa

SEQ ID NO: 123348 - DNA, 838 bp, Homo sapiens
  Payload ID: 4220
  Gene Symbol: CXXC1
  Gene Name: CXXC finger protein 1
  ENST ID: ENST00000586837
  CDS Start-End: 146-838
gggaggggttcggcggtggaggtcggtcggttggcaacagtggggtctgtcggccgactcaggggtctgtggtgagccataaccggagtctgtggactgaacggcgggagtctatgggcagaatgatgaaccatctgggagttctatggagggagatggttcagacccagagcctccagatgccggggaggacagcaagtccgagaatggggagaatgcgcccatctactgcatctgccgcaaaccggacatcaactgcttcatgatcgggtgtgacaactgcaatgagtggttccatggggactgcatccggatcactgagaagatggccaaggccatccgggagtggtactgtcgggagtgcagagagaaagaccccaagctagagattcgctatcggcacaagaagtcacgggagcgggatggcaatgagcgggacagcagtgagccccgggatgagggtggagggcgcaagaggcctgtccctgatccagacctgcagcgccgggcagggtcagggacaggggttggggccatgcttgctcggggctctgcttcgccccacaaatcctctccgcagcccttggtggccacacccagccagcatcaccagcagcagcagcagcagatcaaacggtcagcccgcatgtgtggtgagtgtgaggcatgtcggcgcactgaggactgtggtcactgtgatttctgtcgggacatgaagaagttcgggggccccaacaagatccggcagaagtgccggctgcgccagtgccagctgcgggcccgggaatcgtacaagtacttcccttcctcgctctcaccagtgacgccctcagagtcc

SEQ ID NO: 123349 - DNA, 845 bp, Homo sapiens
  Payload ID: 4220
  Gene Symbol: CXXC1
  Gene Name: CXXC finger protein 1
  ENST ID: ENST00000591474
  CDS Start-End: 96-845
gcgcctttgcaaccgcctgggacgccgccgagtggtctgtgcaggttcgcgggtcgctggcgggggtcgtgagggagtgcgccgggagcggagatatgcatcaccagcagcagcagcagcagatcaaacggtcagcccgcatgtgtggtgagtgtgaggcatgtcggcgcactgaggactgtggtcactgtgatttctgtcgggacatgaagaagttcgggggccccaacaagatccggcagaagtgccggctgcgccagtgccagctgcgggcccgggaatcgtacaagtacttcccttcctcgctctcaccagtgacgccctcagagtccctgccaaggccccgccggccactgcccacccaacagcagccacagccatcacagaagttagggcgcatccgtgaagatgagggggcagtggcgtcatcaacagtcaaggagcctcctgaggctacagccacacctgagccactctcagatgaggacctacctctggatcctgacctgtatcaggacttctgtgcaggggcctttgatgaccatggcctgccctggatgagcgacacagaagagtccccattcctggaccccgcgctgcggaagagggcagtgaaagtgaagcatgtgaagcgtcgggagaagaagtctgagaagaaggtgatggagaggaaggaggagcgatacaagcggcatcggcagaagcagaagcacaaggataaatggaaacacccagagagggctgatgccaaggaccctgcgtcactgccccagtgcctggggcccggctgtgtgcgccccgcccagcccagctccaagtattgctcagatgactgtggcatgaag

SEQ ID NO: 123350 - DNA, 2242 bp, Homo sapiens
  Payload ID: 4220
  Gene Symbol: CXXC1
  Gene Name: CXXC finger protein 1
  ENST ID: ENST00000589940
  CDS Start-End: 63-1904
ggtctgtgcaggttcgcgggtcgctggcgggggtcgtgagggagtgcgccgggagcggagatatggagggagatggttcagacccagagcctccagatgccggggaggacagcaagtccgagaatggggagaatgcgcccatctactgcatctgccgcaaaccggacatcaactgcttcatgatcgggtgtgacaactgcaatgagtggttccatggggactgcatccggatcactgagaagatggccaaggccatccgggagtggtactgtcgggagtgcagagagaaagaccccaagctagagattcgctatcggcacaagaagtcacgggagcgggatggcaatgagcgggacagcagtgagccccgggatgagggtggagggcgcaagaggcctgtccctgatccagacctgcagcgccgggcagggtcagggacaggggttggggccatgcttgctcggggctctgcttcgccccacaaatcctctccgcagcccttggtggccacacccagccagcatcaccagcagcagcagcagcagatcaaacggtcagcccgcatgtgtggtgagtgtgaggcatgtcggcgcactgaggactgtggtcactgtgatttctgtcgggacatgaagaagttcgggggccccaacaagatccggcagaagtgccggctgcgccagtgccagctgcgggcccgggaatcgtacaagtacttcccttcctcgctctcaccagtgacgccctcagagtccctgccaaggccccgccggccactgcccacccaacagcagccacagccatcacagaagttagggcgcatccgtgaagatgagggggcagtggcgtcatcaacagtcaaggagcctcctgaggctacagccacacctgagccactctcagatgaggacctacctctggatcctgacctgtatcaggacttctgtgcaggggcctttgatgaccatggcctgccctggatgagcgacacagaagagtccccattcctggaccccgcgctgcggaagagggcagtgaaagtgaagcatgtgaagcgtcgggagaagaagtctgagaagaagaaggaggagcgatacaagcggcatcggcagaagcagaagcacaaggataaatggaaacacccagagagggctgatgccaaggaccctgcgtcactgccccagtgcctggggcccggctgtgtgcgccccgcccagcccagctccaagtattgctcagatgactgtggcatgaagctggcagccaaccgcatctacgagatcctcccccagcgcatccagcagtggcagcagagcccttgcattgctgaagagcacggcaagaagctgctcgaacgcattcgccgagagcagcagagtgcccgcactcgccttcaggaaatggaacgccgattccatgagcttgaggccatcattctacgtgccaagcagcaggctgtgcgcgaggatgaggagagcaacgagggtgacagtgatgacacagacctgcagatcttctgtgtttcctgtgggcaccccatcaacccacgtgttgccttgcgccacatggagcgctgctacgccaagtatgagagccagacgtcctttgggtccatgtaccccacacgcattgaaggagcaaaacatactgtaagcggctccaggtgctgtgccccgagcactcacgggaccccaaagtgccagctgacgaggtatgcgggtgcccccttgtacgtgatgtctttgagctcacgggtgacttctgccgcctgcccaagcgccagtgcaatcgccattactgctgggagaagctgcggcgtgcggaagtggacttggagcgcgtgcgtgtgtggtacaagctggacgagctgtttgagcaggagcgcaatgtgcgcacagccatgacaaaccgcgcgggattgctggccctgatgctgcaccagacgatccagcacgatcccctcactaccgacctgcgctccagtgccgaccgctgagcctcctggcccggaccccttacaccctgcattccagatgggggagccgcccggtgcccgtgtgtccgttcctccactcatctgtttctccggttctccctgtgcccatccaccggttgaccgcccatctgcctttatcagagggactgtccccgtcgacatgttcagtgcctggtggggctgcggagtccactcatccttgcctcctctccctgggttttgttaataaaattttgaagaaaccaa

SEQ ID NO: 123351 - DNA, 849 bp, Homo sapiens
  Payload ID: 4220
  Gene Symbol: CXXC1
  Gene Name: CXXC finger protein 1
  ENST ID: ENST00000589548
  CDS Start-End: 92-849
ctttgcaaccgcctgggacgccgccgagtggtctgtgcaggttcgcgggtcgctggcgggggtcgtgagggagtgcgccgggagcggagatatggagggagatggttcagacccagagcctccagatgccggggaggacagcaagtccgagaatggggagaatgcgcccatctactgcatctgccgcaaaccggacatcaactgcttcatgatcgggtgtgacaactgcaatgagtggttccatggggactgcatccggatcactgagaagatggccaaggccatccgggagtggtactgtcgggagtgcagagagaaagaccccaagctagagattcgctatcggcacaagaagtcacgggagcgggatggcaatgagcgggacagcagtgagccccgggatgagggtggagggcgcaagaggcctgtccctgatccagacctgcagcgccgggcagggtcagggacaggggttggggccatgcttgctcggggctctgcttcgccccacaaatcctctccgcagcccttggtggccacacccagccagcatcaccagcagcagcagcagcagatcaaacggtcagcccgcatgtgtggtgagtgtgaggcatgtcggcgcactgaggactgtggtcactgtgatttctgtcgggacatgaagaagttcgggggccccaacaagatccggcagaagtgccggctgcgccagtgccagctgcgggcccggctctcaccagtgacgccctcagagtccctgccaaggccccgccggccactgcccacccaacagcagccacagccatcacagaagttagggcgcatccgtgaagatgagggggcagtggc

SEQ ID NO: 123352 - DNA, 5565 bp, Homo sapiens
  Payload ID: 4221
  Gene Symbol: CXXC4
  Gene Name: CXXC finger protein 4
  ENST ID: ENST00000394767
  CDS Start-End: 452-1555
gcacacagcgactggagacggacggagagcaacgcgctgggagaggagagaccaccgacaacagacccgcgctctcacacatacactcacactcgactctttcctctccccccacctcctcctccttccacccccaccactaacaccatctcctcctccttctctctgcaacaagaaaaaaaagccatttacagttgtaacagttggaggataatgcaaaggaagacgctgcctgggaattcaccgtctgtggaaatgagccccagagaggaataaagcagccctcaccttgctctccccacccgaacccactttccccacccgcctcggcccccaccccaacaccaccatcactcccttccctcccccccacctttcccccttttccacccaggtgtcggaccaggcggtccccacttccaccctgcaccccttcttccccccctgcaccatgaacaccaatgtctgcgtggagcccgggccgagcccggaggccccgggcttgcccaaggaaagccacttgcccgagggggctctgaacagccttgtggattacaactcggaaatggagcgctaccgctcctttgccacctccttctacaagaccaacgggggcgccttcccacaggcggccaagatcgcgcgcatcaccacccccatcttccccagcagcgccgccgccgccgcggccgccgcgcgcatcggcatgtccccctggaactgcgacaacgcggccaccgccgccgccgccaccgccatgctctggggcagcggcgggggcgggggcggcggcggggggggtggcggcggcggcggcggcggcggaggcgggggcgggggtggtgggggcggcaggaaatcctcctccgccgccgcctcctcctccgcctcctcctcctcggcgatcctccccgccggcggtggcggcggcggcggcggcggcggcagcaggaccagcatgcaccaccgaaacgactcccagaggctggggaaagctggctgcccgccagagccgtcgttgcaaatggcaaatactaatttcctctccaccttatcccctgaacactgcagacctttggcgggggaatgcatgaacaagctcaaatgcggcgctgctgaagcagagataatgaatctccccgagcgcgtggggactttttccgctatcccggctttagggggcatctcattacctccaggggtcatcgtcatgacagcccttcactcccccgcagcagcctcagcagccgtcacagacagtgcgtttcaaattgccaatctggcagactgcccgcagaatcattcctcctcctcctcgtcctcctcagggggagctggcggagccaacccagccaagaagaagaggaaaaggtgtggggtctgcgtgccctgcaagaggctcatcaactgtggcgtctgcagcagttgcaggaaccgcaaaacgggacaccagatctgcaaatttagaaaatgtgaagagctaaagaaaaaacctggcacttcactagagagaacacctgttcccagcgctgaagcattccgatggttcttttaaagcagtagtatatcttattttcaaggcatttggaaatgaagggcaaactaatgtcttgttttaagaaactgcttagtccaccactgaagaaaatatccagaaattattttcattttatgtatagggctttcttcaaaaaaaaaaaaaaagaggaaaagaaaagaaaaagacataaaaataatgtgagagcttggagaattggccagtctatttactttcaatacgctgattctttctttgatgtaatttagctatagtagtgaagttgttgtctattttgaaagtggctgtaaaaaataagtttgggtaaacccctgctgtaaaatcatgtatctttgcaaagtacatatctatacttcattttcaaatatatgtgtttcagtactgtaaactgtacagatagcagcttgtattttgtgtgtttagacacaaggagacaatcatgtctgagcatctatggagattaacagtttgtacacaacagtatggttctgcaagttaaatctggagcaataaattttagctttaactattttttgccagtggtttagaagcagcaacagcactggcaccattttgccatgcatctttccatagagacttgatgccaagttttacaagactaaaagattatgatgcatccaccaattaccttcagttttattgttataagaggggaagatgttatgaaagtttcaattaatcttttgagcactatattagagtagtggttatgcacttgcattgcttacaaacgagctgtacagaagggtatacctcccaaatacttagtgtagttgacttgtcttgggttgcactgtaaggcagagtactcagagtagttggaaaatgcagaatcagttgtataatttttttttataaaaacggtgttttttaggctaaagaataaagtatcatatcttaggaggggaaaatttataactgacattttttccccagcccaatatgggctgtatacgttttattgtttcttaatttttttcttattttttctgtaggaaaaaatcttaataaaaactaccccaatgttttaacttcatgtatgatattaaatgggtagttttaacacttgaatatgttgagggcttctgccttgaggcagggcttgatatatttttaatttacaaagaattaaacatattcataaaagtgaggcattttatctctttttattttcttttctcatagccacccagttggactagtggtcttcccctggtccttcagtaaaatgctccattgctgccatttccattgttgttacttgatgctttcattcctgagaaggcagggctacagtctctggaatttcataaatgcatgacatacccctccccccacaacctacacacaaaggatctaatgcttcatagaacctgtgctaccttttcatgttggagttggttttcttatcacagtcagggttcttaaggccgtcccatcaggacaaatatttaccttccattttatttctgtttgtcccaattataaagactattttcagtttcaggagtagaacagggtttagcaaaaatatgtagagtatcaaagttacctactgcaactttttgttctttgtccactagccaggtgatttaacccactaaatccattagcttgctgaaaaatgttagcaaagtaaatcacgagaagaaagataatttgagaagagaaatggtatggtacaatgaaagaagctgtaaagattaggaaagactagtaagtgaatatttttaaaaatttagttgtagatttcaatgggatacgataggacagaaaagattttttaaaaagcagaaagagtgtttcatggtgaaagtactgggggagggtggacaaagcatgcacacatgccaatttgaaaatcaagtgtgacttacctcacgtagagtatgaatacatggtccacagttatggtcaacaagcgttttcaagaaaaactcatgatgtgttacacccatccatatttagagatgagaattaaatgattacaagctaaaatgtgctgtatactgtattaattttgagatagctttctacttgatgtatatttctttgagggtttctatctagttagaatttcagcttctgctgtgggaccaatgagagctgtatgagtttttttttttttttccttttccattattttattttttgttttttgtttaccaatttgctaattaattacaagtaagtgaaaacttactttcacacttgaatgataagcttgccttgctctttggaaaatgatgattgttattacagaagtgaaacaaacttctattcaggctacagtaggcatacaataacctaaagatctcatagaagtatactgagagtctaaaatacattctagtagtgcatgtcttggtgtgcttttgtttgtttgctttctaaaagaactaatgaatctgtatattgtaaactgtggtgttttacatgtcaattcatttttttaatgaaagaaaatttgttgattactgaaatgagaaagtgtagcttttcattaattctcttatgttttttattcttgatattgttcttttataccacccactttttaatgtttttggttaaactccatttatataatgtaggatgcatataaagttctcattggtgatgttgaagaaagagatgactcttctggcctttctctagttttcttcctcatatgtccctgtactgagaacttctaaagcttatcattataaacctaaggcagtgatttgaaagtttacatttttcatgattttcaaataccaatgaaatgtaacttttaaatattcctcactgtgtgttttatattcactgtcaagaaaattcagaatgtagattgtgtggacagctatacacaacttaataattatatatcagataaactgaataaaaaactttgtaagagtggtctacgcacacaggatcttgtcctccctaggcgtggatagagagatgccataatctgccagcatttggggagatcatggtaaatacttgaggcgttgatacatagtgcagtgagccaatttccttttcagttgtcactcagcaccataacatcacgaagaacatcattaatgcaaacctctcactaagccttcagaccaaagtggctttctgatggactctgcctgtctgtctacaagtggagtcagattcaaagtagaaatgtatccatccttgggaaagaaaataggaagtcttcccccactgtaggagtatataaaaatgtctcctggttgcttaattcccaacactcaatttccttcttctaaacacatttataaggagcaagagatggtgcacttattatgaattaatattaagcaatcactaaaagaaaggaatattctcttcctttcaatcagaaaccctgatatgtaagttgtgcaattaatgctaaagcatataaagtctttaagctgataagtatctgtaatcaaataatgaaaaaaggaaagcagttaaatgaacacactattcagggtcaaatatgttcagcaaaaagccgtagcgggtctttgatcatggttagattcacagtgatatcaaacagttggttctcatgtaacagctaaatgtttcagtttttttttttttattaaatttggcatttcacactgagatctgtattcctagtgaataaaagacagctactatattaggagggattccattttcacaattgcaaaacagatatttcaggaacatgggccacaaaatgtactcctttcacagtgttctcctcttctgaactgtgcagttatctattaaattttctaatagatatttgtgtaaggtgtatgtatgcttgtgcaattatttaaaaaacggttttggaaaacagtgtatttattaaagaaaattacttatggggcatgtacaaaactgtaaaaaaaaaaaaaaagtaaaaaaaatcacattcaatttgcccagtaaagttgtttttgtgaaatttctgtgttgttgaataaaggactttagtactc

SEQ ID NO: 123353 - DNA, 2658 bp, Homo sapiens
  Payload ID: 4222
  Gene Symbol: CXXC5
  Gene Name: CXXC finger protein 5
  Uniprot ID: Q7LFL8
  ENST ID: ENST00000302517
  CDS Start-End: 715-1683
gttttgccggcagcccccgggcagcgttcatagctcctgcccgggcgggcgcgcggcggcggcggcagaggcggctgagcctgagcggggatgtagaggcggcggcagcagaggcggcactggcggcaagagcagacgcccgagccgagcgagaagagcggcagagccttatcccctgaagccgggccccgcgtcccagccctgcccagcccgcgcccagccatgcgcgccgcctgctgagtccgggcgccgcacgctgagccctccgcccgcgagccgcgctcagctcgggggtgattagttgctttttgttgttttttaatttgggccgcggggagggggaggaggggcaggtgctgcaggctcccccccctccccgcctcgggccagccgcggcggcgcgactcgggctccggacccgggcactgctggcggctggagcggagcgcaccgcggcggtggtgcccagagcggagcgcagctccctgccccgcccctccccctcggcctcgcggcgacggcggcggtggcggcttggacgactcggagagccgagtgaagacatttccacctggacacctgaccatgtgcctgccctgagcagcgaggcccaccaggcatctctgttgtgggcagcagggccaggtcctggtctgtggaccctcggcagttggcaggctccctctgcagtggggtctgggcctcggccccaccatgtcgagcctcggcggtggctcccaggatgccggcggcagtagcagcagcagcaccaatggcagcggtggcagtggcagcagtggcccaaaggcaggagcagcagacaagagtgcagtggtggctgccgccgcaccagcctcagtggcagatgacacaccaccccccgagcgtcggaacaagagcggtatcatcagtgagcccctcaacaagagcctgcgccgctcccgcccgctctcccactactcttcttttggcagcagtggtggtagtggcggtggcagcatgatgggcggagagtctgctgacaaggccactgcggctgcagccgctgcctccctgttggccaatgggcatgacctggcggcggccatggcggtggacaaaagcaaccctacctcaaagcacaaaagtggtgctgtggccagcctgctgagcaaggcagagcgggccacggagctggcagccgagggacagctgacgctgcagcagtttgcgcagtccacagagatgctgaagcgcgtggtgcaggagcatctcccgctgatgagcgaggcgggtgctggcctgcctgacatggaggctgtggcaggtgccgaagccctcaatggccagtccgacttcccctacctgggcgctttccccatcaacccaggcctcttcattatgaccccggcaggtgtgttcctggccgagagcgcgctgcacatggcgggcctggctgagtaccccatgcagggagagctggcctctgccatcagctccggcaagaagaagcggaaacgctgcggcatgtgcgcgccctgccggcggcgcatcaactgcgagcagtgcagcagttgtaggaatcgaaagactggccatcagatttgcaaattcagaaaatgtgaggaactcaaaaagaagccttccgctgctctggagaaggtgatgcttccgacgggagccgccttccggtggtttcagtgacggcggcggaacccaaagctgccctctccgtgcaatgtcactgctcgtgtggtctccagcaagggattcgggcgaagacaaacggatgcacccgtctttagaaccaaaaatattctctcacagatttcattcctgtttttatatatatattttttgttgtcgttttaacatctccacgtccctagcataaaaagaaaaagaaaaaaatttaaactgctttttcggaagaacaacaacaaaaaagaggtaaagacgaatctataaagtaccgagacttcctgggcaaagaatggacaatcagtttccttcctgtgtcgatgtcgatgttgtctgtgcaggagatgcagtttttgtgtagagaatgtaaattttctgtaaccttttgaaatctagttactaataagcactactgtaatttagcacagtttaactccaccctcatttaaacttcctttgattctttccgaccatgaaatagtgcatagtttgcctggagaatccactcacgttcataaagagaatgttgatggcgccgtgtagaagccgctctgtatccatccacgcgtgcagagctgccagcagggagctcacagaaggggagggagcaccaggccagctgagctgcacccacagtcccgagactgggatcccccaccccaacagtgattttggaaaaaaaaatgaaagttctgttcgtttatccattgcgatctggggagccccatctcgatatttccaatcctggctacttttcttagagaaaataagtcctttttttctggccttgctaatggcaacagaagaaagggcttctttgcgtggtcccctgctggtgggggtgggtccccagggggccccctgcggcctgggcccccctgcccacggccagcttcctgctgatgaacatgctgtttgtattgttttaggaaaccaggctgttttgtgaataaaacgaatgcatgtttgtgtcacgaa

SEQ ID NO: 123354 - DNA, 506 bp, Homo sapiens
  Payload ID: 4222
  Gene Symbol: CXXC5
  Gene Name: CXXC finger protein 5
  ENST ID: ENST00000503511
  CDS Start-End: 257-506
attccaggccctgggcatctccaagtgccccaggtgggggcactctcctggggtctgtgacagcttgcccccaaccacggagaggtgacaggcacgagtgaagacatttccacctggacacctgaccatgtgcctgccctgagcagcgaggcccaccaggcatctctgttgtgggcagcagggccaggtcctggtctgtggaccctcggcagttggcaggctccctctgcagtggggtctgggcctcggccccaccatgtcgagcctcggcggtggctcccaggatgccggcggcagtagcagcagcagcaccaatggcagcggtggcagtggcagcagtggcccaaaggcaggagcagcagacaagagtgcagtggtggctgccgccgcaccagcctcagtggcagatgacacaccaccccccgagcgtcggaacaagagcggtatcatcagtgagcccctcaacaagagcctgcgccgctcccgcccgctctcccactactctt

SEQ ID NO: 123355 - DNA, 442 bp, Homo sapiens
  Payload ID: 4222
  Gene Symbol: CXXC5
  Gene Name: CXXC finger protein 5
  ENST ID: ENST00000511591
  CDS Start-End: 419-442
acaggatctcactctgtcatccaggctggaatgcagtggcatgattataactcactgcatcctcaacctcctgggctcaagcagtcctcccacctcagcctcctgagtagctaggactacaggcatgtaccaccacacctggttaacttttgtattttttgcagagatagagtttcaccatgttgtccagggtggtctcaaaactcctgagctcaagcgatctgcctgcctctgcttcccaaagtgctgagattacagagtgaagacatttccacctggacacctgaccatgtgcctgccctgagcagcgaggcccaccaggcatctctgttgtgggcagcagggccaggtcctggtctgtggaccctcggcagttggcaggctccctctgcagtggggtctgggcctcggccccaccatgtcgagcctcggcggtggctcc

SEQ ID NO: 123356 - DNA, 568 bp, Homo sapiens
  Payload ID: 4222
  Gene Symbol: CXXC5
  Gene Name: CXXC finger protein 5
  ENST ID: ENST00000504944
  CDS Start-End: 262-568
gcgcacctgagctggggggcgcggccaaattctccctcccggtcctcgaagcttctggccccgctctagagggggcagaaagatagcagatttccccggagagtgaagacatttccacctggacacctgaccatgtgcctgccctgagcagcgaggcccaccaggcatctctgttgtgggcagcagggccaggtcctggtctgtggaccctcggcagttggcaggctccctctgcagtggggtctgggcctcggccccaccatgtcgagcctcggcggtggctcccaggatgccggcggcagtagcagcagcagcaccaatggcagcggtggcagtggcagcagtggcccaaaggcaggagcagcagacaagagtgcagtggtggctgccgccgcaccagcctcagtggcagatgacacaccaccccccgagcgtcggaacaagagcggtatcatcagtgagcccctcaacaagagcctgcgccgctcccgcccgctctcccactactcttcttttggcagcagtggtggtagtggcggtggcagcatgatgggcggagagtctgctg

SEQ ID NO: 123357 - DNA, 558 bp, Homo sapiens
  Payload ID: 4222
  Gene Symbol: CXXC5
  Gene Name: CXXC finger protein 5
  ENST ID: ENST00000512816
  CDS Start-End: 339-558
gatttttgccctgggaagagatgggaacagctgaaggagattggcctccgagttcccagccagcccccggaacttgggtagaacccccctacccctcatcctcgcagtagctgggtctctcccagggacgcccctagtcagccttggcctccctctccatgccacctccctttccaagagtgaagacatttccacctggacacctgaccatgtgcctgccctgagcagcgaggcccaccaggcatctctgttgtgggcagcagggccaggtcctggtctgtggaccctcggcagttggcaggctccctctgcagtggggtctgggcctcggccccaccatgtcgagcctcggcggtggctcccaggatgccggcggcagtagcagcagcagcaccaatggcagcggtggcagtggcagcagtggcccaaaggcaggagcagcagacaagagtgcagtggtggctgccgccgcaccagcctcagtggcagatgacacaccaccccccgagcgtcggaacaagagcggtatcatcagtgagcccctcaacaagagcctgc

SEQ ID NO: 123358 - DNA, 900 bp, Homo sapiens
  Payload ID: 4222
  Gene Symbol: CXXC5
  Gene Name: CXXC finger protein 5
  ENST ID: ENST00000502716
  CDS Start-End: 358-900
gcttagcattccaggccctgggcatctccaagtgccccaggtgggggcactctcctggggtctgtgacagcttgcccccaaccacggagaggtgacaggcacgagatagagtttcaccatgttgtccagggtggtctcaaaactcctgagctcaagcgatctgcctgcctctgcttcccaaagtgctgagattacagagtgaagacatttccacctggacacctgaccatgtgcctgccctgagcagcgaggcccaccaggcatctctgttgtgggcagcagggccaggtcctggtctgtggaccctcggcagttggcaggctccctctgcagtggggtctgggcctcggccccaccatgtcgagcctcggcggtggctcccaggatgccggcggcagtagcagcagcagcaccaatggcagcggtggcagtggcagcagtggcccaaaggcaggagcagcagacaagagtgcagtggtggctgccgccgcaccagcctcagtggcagatgacacaccaccccccgagcgtcggaacaagagcggtatcatcagtgagcccctcaacaagagcctgcgccgctcccgcccgctctcccactactcttcttttggcagcagtggtggtagtggcggtggcagcatgatgggcggagagtctgctgacaaggccactgcggctgcagccgctgcctccctgttggccaatgggcatgacctggcggcggccatggcggtggacaaaagcaaccctacctcaaagcacaaaagtggtgctgtggccagcctgctgagcaaggcagagcgggccacggagctggcagccgagggacagctgacgctgcagcagtttgcgcagtccacagagatgctgaagcgcgtggtgcaggagcatctcccg

SEQ ID NO: 123359 - DNA, 777 bp, Homo sapiens
  Payload ID: 4222
  Gene Symbol: CXXC5
  Gene Name: CXXC finger protein 5
  ENST ID: ENST00000504844
  CDS Start-End: 295-777
gggcactgctggcggctggagcggagcgcaccgcggcggtggtgcccagagcggagcgcagctccctgccccgcccctccccctcggcctcgcggcgacggcggcggtggcggcttggacgactcggagagccgagtgaagacatttccacctggacacctgaccatgtgcctgccctgagcagcgaggcccaccaggcatctctgttgtgggcagcagggccaggtcctggtctgtggaccctcggcagttggcaggctccctctgcagtggggtctgggcctcggccccaccatgtcgagcctcggcggtggctcccaggatgccggcggcagtagcagcagcagcaccaatggcagcggtggcagtggcagcagtggcccaaaggcaggagcagcagacaagagtgcagtggtggctgccgccgcaccagcctcagtggcagatgacacaccaccccccgagcgtcggaacaagagcggtatcatcagtgagcccctcaacaagagcctgcgccgctcccgcccgctctcccactactcttcttttggcagcagtggtggtagtggcggtggcagcatgatgggcggagagtctgctgacaaggccactgcggctgcagccgctgcctccctgttggccaatgggcatgacctggcggcggccatggcggtggacaaaagcaaccctacctcaaagcacaaaagtggtgctgtggccagcctgctgagcaaggcagagcgggccacggagctggcagccgagggacagctgacg

SEQ ID NO: 123360 - DNA, 581 bp, Homo sapiens
  Payload ID: 4222
  Gene Symbol: CXXC5
  Gene Name: CXXC finger protein 5
  ENST ID: ENST00000502336
  CDS Start-End: 340-581
cccccggggttcggtgcgcggccggggccggagttcgctgcaagtcggcggaaagtttggctgcgcgggttcccccgaagttcagagatagagtttcaccatgttgtccagggtggtctcaaaactcctgagctcaagcgatctgcctgcctctgcttcccaaagtgctgagattacagagtgaagacatttccacctggacacctgaccatgtgcctgccctgagcagcgaggcccaccaggcatctctgttgtgggcagcagggccaggtcctggtctgtggaccctcggcagttggcaggctccctctgcagtggggtctgggcctcggccccaccatgtcgagcctcggcggtggctcccaggatgccggcggcagtagcagcagcagcaccaatggcagcggtggcagtggcagcagtggcccaaaggcaggagcagcagacaagagtgcagtggtggctgccgccgcaccagcctcagtggcagatgacacaccaccccccgagcgtcggaacaagagcggtatcatcagtgagcccctcaacaagagcctgcgccgctcccgcccgctctccca

SEQ ID NO: 123361 - DNA, 503 bp, Homo sapiens
  Payload ID: 4222
  Gene Symbol: CXXC5
  Gene Name: CXXC finger protein 5
  ENST ID: ENST00000502295
  CDS Start-End: 298-503
actgcgttttcttcgcctcgcagaggaaggtcggccttgcacaaatccgcccccacgaatcccaaagaattggagaaaacttccactttgggattatatgcagttgggattatatgagcccggggcttgcaccatggagtgaagacatttccacctggacacctgaccatgtgcctgccctgagcagcgaggcccaccaggcatctctgttgtgggcagcagggccaggtcctggtctgtggaccctcggcagttggcaggctccctctgcagtggggtctgggcctcggccccaccatgtcgagcctcggcggtggctcccaggatgccggcggcagtagcagcagcagcaccaatggcagcggtggcagtggcagcagtggcccaaaggcaggagcagcagacaagagtgcagtggtggctgccgccgcaccagcctcagtggcagatgacacaccaccccccgagcgtcggaacaagagcggtatcatcagtgagcccct

SEQ ID NO: 123362 - DNA, 472 bp, Homo sapiens
  Payload ID: 4222
  Gene Symbol: CXXC5
  Gene Name: CXXC finger protein 5
  ENST ID: ENST00000507139
  CDS Start-End: 440-472
cccctccccgcctcgggccagccgcggcggcgcgactcgggctccggacccgggcactgctggcggctggagcggagcgcaccgcggcggtggtgcccagagcggagcgcagctccctgccccgcccctccccctcggcctcgcggcgacggcggcggtggcggcttggacgactcggagagccgagatagagtttcaccatgttgtccagggtggtctcaaaactcctgagctcaagcgatctgcctgcctctgcttcccaaagtgctgagattacagagtgaagacatttccacctggacacctgaccatgtgcctgccctgagcagcgaggcccaccaggcatctctgttgtgggcagcagggccaggtcctggtctgtggaccctcggcagttggcaggctccctctgcagtggggtctgggcctcggccccaccatgtcgagcctcggcggtggctcccaggatgcc

SEQ ID NO: 123363 - DNA, 1892 bp, Homo sapiens
  Payload ID: 4222
  Gene Symbol: CXXC5
  Gene Name: CXXC finger protein 5
  Uniprot ID: Q7LFL8
  ENST ID: ENST00000511048
  CDS Start-End: 238-1206
gttcggtgcgcggccggggccggagttcgctgcaagtcggcggaaagtttggctgcgcgggttcccccgaagttcagagtgaagacatttccacctggacacctgaccatgtgcctgccctgagcagcgaggcccaccaggcatctctgttgtgggcagcagggccaggtcctggtctgtggaccctcggcagttggcaggctccctctgcagtggggtctgggcctcggccccaccatgtcgagcctcggcggtggctcccaggatgccggcggcagtagcagcagcagcaccaatggcagcggtggcagtggcagcagtggcccaaaggcaggagcagcagacaagagtgcagtggtggctgccgccgcaccagcctcagtggcagatgacacaccaccccccgagcgtcggaacaagagcggtatcatcagtgagcccctcaacaagagcctgcgccgctcccgcccgctctcccactactcttcttttggcagcagtggtggtagtggcggtggcagcatgatgggcggagagtctgctgacaaggccactgcggctgcagccgctgcctccctgttggccaatgggcatgacctggcggcggccatggcggtggacaaaagcaaccctacctcaaagcacaaaagtggtgctgtggccagcctgctgagcaaggcagagcgggccacggagctggcagccgagggacagctgacgctgcagcagtttgcgcagtccacagagatgctgaagcgcgtggtgcaggagcatctcccgctgatgagcgaggcgggtgctggcctgcctgacatggaggctgtggcaggtgccgaagccctcaatggccagtccgacttcccctacctgggcgctttccccatcaacccaggcctcttcattatgaccccggcaggtgtgttcctggccgagagcgcgctgcacatggcgggcctggctgagtaccccatgcagggagagctggcctctgccatcagctccggcaagaagaagcggaaacgctgcggcatgtgcgcgccctgccggcggcgcatcaactgcgagcagtgcagcagttgtaggaatcgaaagactggccatcagatttgcaaattcagaaaatgtgaggaactcaaaaagaagccttccgctgctctggagaaggtgatgcttccgacgggagccgccttccggtggtttcagtgacggcggcggaacccaaagctgccctctccgtgcaatgtcactgctcgtgtggtctccagcaagggattcgggcgaagacaaacggatgcacccgtctttagaaccaaaaatattctctcacagatttcattcctgtttttatatatatattttttgttgtcgttttaacatctccacgtccctagcataaaaagaaaaagaaaaaaatttaaactgctttttcggaagaacaacaacaaaaaagaggtaaagacgaatctataaagtaccgagacttcctgggcaaagaatggacaatcagtttccttcctgtgtcgatgtcgatgttgtctgtgcaggagatgcagtttttgtgtagagaatgtaaattttctgtaaccttttgaaatctagttactaataagcactactgtaatttagcacagtttaactccaccctcatttaaacttcctttgattctttccgaccatgaaatagtgcatagtttgcctggagaatccactcacgttcataaagagaatgttgatggcgccgtgtagaagccgctctgtatccatccacgcgtgcagagctgccagcagggagctcacagaaggggagggagcaccaggccagctgagctgcacccacagtcccgagactgggatcccccaccccaacagtgattttggaaaaaaaaatgaaa

SEQ ID NO: 123364 - DNA, 542 bp, Homo sapiens
  Payload ID: 4222
  Gene Symbol: CXXC5
  Gene Name: CXXC finger protein 5
  ENST ID: ENST00000509238
  CDS Start-End: 248-542
aaagccttccccaggggccttgtggtgccctccaccctgtcctgagctgccgctgcgggggtggcagatgctgtttcatcggtcgagagtgaagacatttccacctggacacctgaccatgtgcctgccctgagcagcgaggcccaccaggcatctctgttgtgggcagcagggccaggtcctggtctgtggaccctcggcagttggcaggctccctctgcagtggggtctgggcctcggccccaccatgtcgagcctcggcggtggctcccaggatgccggcggcagtagcagcagcagcaccaatggcagcggtggcagtggcagcagtggcccaaaggcaggagcagcagacaagagtgcagtggtggctgccgccgcaccagcctcagtggcagatgacacaccaccccccgagcgtcggaacaagagcggtatcatcagtgagcccctcaacaagagcctgcgccgctcccgcccgctctcccactactcttcttttggcagcagtggtggtagtggcggtggcagcatgatgggcg

SEQ ID NO: 123365 - DNA, 878 bp, Homo sapiens
  Payload ID: 4222
  Gene Symbol: CXXC5
  Gene Name: CXXC finger protein 5
  ENST ID: ENST00000520967
  CDS Start-End: 466-878
cggggttcggtgcgcggccggggccggagttcgctgcaagtcggcggaaagtttggctgcgcgggttcccccgaagttcagggtcctcttgcctgcccagcttgggctgatggagacagatgtaattatggaattttgcttgggaaattaatttgaaaaagttaattaattggtggttccggaggtggcgggctccacgcccggccagtcttgctgacgtcagtgctgacccactggagacgtgcagcttccgggcaagctgggcagagggaccccggtgacctggctgggcagccctggaacagagtgaagacatttccacctggacacctgaccatgtgcctgccctgagcagcgaggcccaccaggcatctctgttgtgggcagcagggccaggtcctggtctgtggaccctcggcagttggcaggctccctctgcagtggggtctgggcctcggccccaccatgtcgagcctcggcggtggctcccaggatgccggcggcagtagcagcagcagcaccaatggcagcggtggcagtggcagcagtggcccaaaggcaggagcagcagacaagagtgcagtggtggctgccgccgcaccagcctcagtggcagatgacacaccaccccccgagcgtcggaacaagagcggtatcatcagtgagcccctcaacaagagcctgcgccgctcccgcccgctctcccactactcttcttttggcagcagtggtggtagtggcggtggcagcatgatgggcggagagtctgctgacaaggccactgcggctgcagccgctgcctccctgttggccaatgggcatgacctggcggcggccatggcggtggacaaaagcaaccctacctcaaagcacaaaag

SEQ ID NO: 123366 - DNA, 810 bp, Homo sapiens
  Payload ID: 4222
  Gene Symbol: CXXC5
  Gene Name: CXXC finger protein 5
  ENST ID: ENST00000511457
  CDS Start-End: 221-810
aggtgggggcactctcctggggtctgtgacagcttgcccccaaccacggagaggtgacagagtgaagacatttccacctggacacctgaccatgtgcctgccctgagcagcgaggcccaccaggcatctctgttgtgggcagcagggccaggtcctggtctgtggaccctcggcagttggcaggctccctctgcagtggggtctgggcctcggccccaccatgtcgagcctcggcggtggctcccaggatgccggcggcagtagcagcagcagcaccaatggcagcggtggcagtggcagcagtggcccaaaggcaggagcagcagacaagagtgcagtggtggctgccgccgcaccagcctcagtggcagatgacacaccaccccccgagcgtcggaacaagagcggtatcatcagtgagcccctcaacaagagcctgcgccgctcccgcccgctctcccactactcttcttttggcagcagtggtggtagtggcggtggcagcatgatgggcggagagtctgctgacaaggccactgcggctgcagccgctgcctccctgttggccaatgggcatgacctggcggcggccatggcggtggacaaaagcaaccctacctcaaagcacaaaagtggtgctgtggccagcctgctgagcaaggcagagcgggccacggagctggcagccgagggacagctgacgctgcagcagtttgcgcagtccacagagatgctgaagcgcgtggtgcaggagcatctcccgctgatgagcgaggcgggtgctggcctgcctgacatggaggctgtggc

SEQ ID NO: 123367 - DNA, 651 bp, Homo sapiens
  Payload ID: 4223
  Gene Symbol: CNBD1
  Gene Name: cyclic nucleotide binding domain containing 1
  ENST ID: ENST00000521593
  CDS Start-End: 1-485
ctggatgctgtaacatttatagaagtattataggatttgtgaaactacgatcaaataaagtgaaaagatctcaaaaacttgtttatatggggaaacttaaggagaaggagtcctttggtgagattagcgtccttcttcaagttcctttcacgtgcacaatcattaccaaaaaagaagttgagatggcaatcattgaagataaggacctatttgaattagacccagtgaccaagcaacttatgctccaaacagctaaaccaacttttggccatctgacagatgaggatgtcaaaaatgaatatttgaaaaaggaacaacaaaaagaatggaaagatttcaagattgcatcatggacaaaagaaataacagatttcatttgtctctatgaaaaacatcaagataattttaccttaccaaaaattgcacatttagagagaatcaccaaaagaattaagaataacagcatccttattcacttggaatgagcaagaaaattcactggtctagtaacaaaagaggatacagcaagaagacaaaaatctacaagctaggaagacagccctcaccagaatctgaccatgctggcaacttgatttcagacttcccagcctccagaacgagaaaaaaaaaaaaaaatctgttgtttaggtc

SEQ ID NO: 123368 - DNA, 1594 bp, Homo sapiens
  Payload ID: 4223
  Gene Symbol: CNBD1
  Gene Name: cyclic nucleotide binding domain containing 1
  Uniprot ID: Q8NA66
  ENST ID: ENST00000518476
  CDS Start-End: 52-1362
atttgcctctcaagcagcctctggtcatctatctgcctttgagccatcaagatgccgatgtcttctcttccagcagctattttgtctcacatgacagctattaacaatgtgcctcctcctccacttcacagtataccaaacttgaaaaagtctaagcacattaattatggccagttgaatgcattatgccacattagaggacaacacagccggagtatgagcaatatcttatcagctcacgatacatttatgaagcaatatcctaaagtattcctgcaccaaaaacccagacttcctaaacttttcaaacaggaggaacaaagggaactcaatgaaggcaaagaggaaagtcaacatcaacaacctgatgattctaacaatatagctgtccatgttcagagagcacatggtggccatattttatatagaccaaaaagagccacagagaaatttgaagaattcctagctatcttaaagaaattgcccattcacaggacgccatatgaacacaaaactgtgtggaagttcctgaaaacaattccagatttaacctttcagctaaatgataagcatctgaaaacacttagtaagactgtcttttccgaaacctggttgaaaggcagcacagtggttgcaaatgatggattttatgtaatactgaaaggcctagctcgacctcaaacaaacgtgtataaaaatctgattgaaggaagtgattcaccagactcgttcatatctcagagtttccacagcttcatttggagtgaagaattcaaaaactctacacttgctgagatgtacctaccttcatatgactcaatgcttagcaaatggagtacctttgggactctggaagttatgcctcagaatgaatcggaaacacagatgttctcggtggtgacagaagacgattgtgaaattcttaaaatcccagcaaagggatatgcaaagataaaggaggaaaaaataaaacttgaaaatatgcaaaagttgaaattaatccgtatgtgtccttattatgaggaatggcctactttatccatatatgagctaattgcactccttaaatggaaaaaatttcctccaggtcatgtgatagtggaaagtggaaatataatttcttttgtgggttatattaactctggatgctgtaacatttatagaagtattataggatttgtgaaactacgatcaaataaagtgaaaagatctcaaaaacttgtttatatggggaaacttaaggagaaggagtcctttggtgagattagcgtccttcttcaagttcctttcacgtgcacaatcattaccaaaaaagaagttgagatggcaatcattgaagataaggacctatttgtggcctagatctagaaacaacctcagtgaacattaattaagaaagtattgactaaataatggaataattgcattctggaatactatcaaactaccagcaatgaatttggtctattgtgactacatatcctggattccccaggaaagtcccactttcgaattgcctttcaaacacagtttttattagcagtctttcttggtttggatactaaaataaatatagttatcattgcttgattta

SEQ ID NO: 123369 - DNA, 659 bp, Homo sapiens
  Payload ID: 4223
  Gene Symbol: CNBD1
  Gene Name: cyclic nucleotide binding domain containing 1
  ENST ID: ENST00000523299
  CDS Start-End: 1-623
aaaatatgcaaaagttgaaattaatccgtatgtgtccttattatgaggaatggcctactttatccatatatgagctaattgcactccttaaatggaaaaaatttcctccaggtcatgtgatagtggaaagtggaaatataatttcttttgtgggttatattaactctggatgctgtaacatttatagaagtattataggatttgtgaaactacgatcaaataaagtgaaaagatctcaaaaacttgtttatatggggaaacttaaggagaaggagtcctttggtgagattagcgtccttcttcaagttcctttcacgtgcacaatcattaccaaaaaagaagttgagatggcaatcattgaagataaggacctatttgaattagacccagtgaccaagcaacttatgctccaaacagctaaaccaacttttggccatctgacagatgaggatgtcaaaaatgaatatttgaaaaaggaacaacaaaaagaatggaaagatttcaaggataagactgtgaaaaactccttgtattataaaggaattattccaggctttggaaaatgggaccattactgcaccagcattcctaggaacctcaaggacactctagtaaattattaaaagtaccagctcgtaagaagctggggatttcagcat

SEQ ID NO: 123370 - DNA, 876 bp, Homo sapiens
  Payload ID: 4223
  Gene Symbol: CNBD1
  Gene Name: cyclic nucleotide binding domain containing 1
  ENST ID: ENST00000620844
  CDS Start-End: 1-876
cccattcacaggacgccatatgaacacaaaactgtgtggaagttcctgaaaacaattccagatttaacctttcagctaaatgataagcatctgaaaacacttagtaagactgtcttttccgaaacctggttgaaaggcagcacagtggttgcaaatgatggattttatgtaatactgaaaggcctagctcgacctcaaacaaacgtgtataaaaatctgattgaaggaagtgattcaccagactcgttcatatctcagagtttccacagcttcatttggagtgaagaattcaaaaactctacacttgctgagatgtacctaccttcatatgactcaatgcttagcaaatggagtacctttgggactctggaagttatgcctcagaatgaatcggaaacacagatgttctcggtggtgacagaagacgattgtgaaattcttaaaatcccagcaaagggatatgcaaagataaaggaggaaaaaataaaacttgaaaatatgcaaaagttgaaattaatccgtatgtgtccttattatgaggaatggcctactttatccatatatgagctaattgcactccttaaatggaaaaaatttcctccaggtcatgtgatagtggaaagtggaaatataatttcttttgtgggttatattaactctggatgctgtaacatttatagaagtattataggatttgtgaaactacgatcaaataaagtgaaaagatctcaaaaacttgtttatatggggaaacttaaggagaaggagtcctttggtgagattagcgtccttcttcaagttcctttcacgtgcacaatcattaccaaaaaagaagttgagatggcaatcattgaagataaggacctatttgatgca

SEQ ID NO: 123371 - DNA, 1927 bp, Homo sapiens
  Payload ID: 4224
  Gene Symbol: CNBD2
  Gene Name: cyclic nucleotide binding domain containing 2
  Uniprot ID: Q96M20
  ENST ID: ENST00000349339
  CDS Start-End: 157-1875
agctgatggtatggtaggaggagtggagtggagctcttgccttgttactgaggaaatctatttgtttctagtattactggatttttggggaaaaatttgtagtcctccccttgaaaggcaaaggggctagttgtgccatttgcctgcacaggaaccatgaggagacatatggtaacttatgcctggcagctcctgaagaaggaactgggactgtaccagctcgccatggatatcatcataatgatccgagtgtgtaaaatgttccgccaaggcctcaggggattccgggaatatcaaatcattgagactgctcactggaagcaccctatcttctccttctgggataaaaagatgcaaagccgagtcacatttgataccatggacttcattgcagaggagggtcactttcctccaaaggccattcagatcatgcagaagaagccttcctggagaacagaggatgagatccaggccgtctgtaacatcttgcaggttctggatagctatcggaactacgcagagcccctgcagctgctcctggccaaagtcatgcgctttgaacggtttggtcgcaggcgtgtgatcatcaagaaggggcagaagggcaacagcttttatttcatctacctgggcacagttgcaataaccaaggacgaggatggcagcagtgccttcctagatccccacccgaaattgctgcacaagggtagctgttttggggaaatggacgttctgcatgcttcagtgaggaggtccaccatcgtctgtatggaagaaacggagttcctggttgttgaccgggaggacttctttgctaataagctggaccaggaagttcagaaggatgctcagtatcggtttgaattttttaggaagatggagctgtttgcatcatggtctgatgagaagctctggcagctggtagccatggcgaagatagagaggttctcgtatgggcagctgatctcaaaagattttggagagtcacccttcatcatgtttatcagcaagggcagctgtgaagtcctgcggctgttggaccttggggcctccccttcctaccgtagatggatctggcagcacctggagctgatagatggcagacctctgaagacccacctgagtgaatactctcctatggaaagatttaaggaattccagatcaaatcatatcctctgcaagactttagctccttgaaacttccacatctcaaaaaagcctgggggctacaggggacaagcttcagcaggaagatcagaacctcaggagacactctccccaagatgctgggcccgaagatccaatccaggcctgctcagtcgatcaaatgtgccatgatcaatatcaagcctggtgagctccccaaggaggctgcagtgggggcctacgtgaaggtgcacactgtggagcagggagaaattttggccttccttccagagggtgaatgcgacacacgacccttgatcctgatgagcctgggaaatgagttgatacggataaggaaggaaatattttatgaactgattgacaatgatgacgagatgataaaaaagttgttaaagctcaatattgcattccccagtgatgaagatatgtgccagaagttcctccagcagaacagctggaatatctttcggaaggacctgttgcagctgctcgtggagccttgccaaagtcaactgttcactccaaaccggcccaagaagagagagatctacaaccctaagtctgtggtcctggatttgtgcagcatcaacaagacgactaaacctcgttatcctatttttatggcaccccagaaatacctccccccattgaggattgtccaagccatcaaagcacctcggtacaaaatccgagaactcttggcttagtgtaagagcacaggggtccttatttaggacaaataaaggatggtggattggg

SEQ ID NO: 123372 - DNA, 1956 bp, Homo sapiens
  Payload ID: 4224
  Gene Symbol: CNBD2
  Gene Name: cyclic nucleotide binding domain containing 2
  Uniprot ID: Q96M20
  ENST ID: ENST00000373973
  CDS Start-End: 174-1904
agagcagggcttccagtagctgatggtatggtaggaggagtggagtggagctcttgccttgttactgaggaaatctatttgtttctagtattactggatttttggggaaaaatttgtagtcctccccttgaaaggcaaaggggctagttgtgccatttgcctgcacaggaaccatgaggagacatatggtaacttatgcctggcagctcctgaagaaggaactgggactgtaccagctcgccatggatatcatcataatgatccgagtgtgtaaaatgttccgccaaggcctcaggggattccgggaatatcaaatcattgagactgctcactggaagcaccctatcttctccttctgggataaaaagatgcaaagccgagtcacatttgataccatggacttcattgcagaggagggtcactttcctccaaaggccattcagatcatgcagaagaagccttcctggagaacagaggatgagatccaggccgtctgtaacatcttgcaggttctggatagctatcggaactacgcagagcccctgcagctgctcctggccaaagtcatgcgctttgaacggtttggtcgcaggcgtgtgatcatcaagaaggggcagaagggcaacagcttttatttcatctacctgggcacagttgcaataaccaaggacgaggatggcagcagtgccttcctagatccccacccgaaattgctgcacaagggtagctgttttggggaaatggacgttctgcatgcttcagtgaggaggtccaccatcgtctgtatggaagaaacggagttcctggttgttgaccgggaggacttctttgctaataagctggaccaggaagttcagaaggatgctcagtatcggtttgaattttttaggaagatggagctgtttgcatcatggtctgatgagaagctctggcagctggtagccatggcgaagatagagaggttctcgtatgggcagctgatctcaaaagattttggagagtcacccttcatcatgtttatcagcaagggcagctgtgaagtcctgcggctgttggaccttggggcctccccttcctaccgtagatggatctggcagcacctggagctgatagatggcagacctctgaagacccacctgagtgaatactctcctatggaaagatttaaggaattccagatcaaatcatatcctctgcaagactttagctccttgaaacttccacatctcaaaaaagcctgggggctacaggggacaagcttcagcaggaagatcagaacctcaggagacactctccccaagatgctgggcccgaagatccaatccaggcctgctcagtcgatcaaatgtgccatgatcaatatcaagcctggtgagctccccaaggaggctgcagtgggggcctacgtgaaggtgcacactgtggagcagggagaaattttgggtcttcaccaggccttccttccagagggtgaatgcgacacacgacccttgatcctgatgagcctgggaaatgagttgatacggataaggaaggaaatattttatgaactgattgacaatgatgacgagatgataaaaaagttgttaaagctcaatattgcattccccagtgatgaagatatgtgccagaagttcctccagcagaacagctggaatatctttcggaaggacctgttgcagctgctcgtggagccttgccaaagtcaactgttcactccaaaccggcccaagaagagagagatctacaaccctaagtctgtggtcctggatttgtgcagcatcaacaagacgactaaacctcgttatcctatttttatggcaccccagaaatacctccccccattgaggattgtccaagccatcaaagcacctcggtacaaaatccgagaactcttggcttagtgtaagagcacaggggtccttatttaggacaaataaaggatggtggattggg

SEQ ID NO: 123373 - DNA, 1722 bp, Homo sapiens
  Payload ID: 4224
  Gene Symbol: CNBD2
  Gene Name: cyclic nucleotide binding domain containing 2
  Uniprot ID: Q96M20
  ENST ID: ENST00000538900
  CDS Start-End: 141-1412
ggaggagtggagtggagctcttgccttgttactgaggaaatctatttgtttctagtattactggatttttggggaaaaatttgtagtcctccccttgaaaggcaaaggggctagttgtgccatttgcctgcacaggaaccatgaggagacatatggtaacttatgcctggcagctcctgaagaaggaactgggactgtaccagctcgccatggatatcatcataatgatccgagtgtgtaaaatgttccgccaaggcctcaggggattccgggaatatcaaatcattgagactgctcactggaagcaccctatcttctccttctgggataaaaagatgcaaagccgagtcacatttgataccatggacttcattgcagaggagggtcactttcctccaaaggccattcagatcatgcagaagaagccttcctggagaacagaggatgagatccaggccgtctgtaacatcttgcaggttctggatagctatcggaactacgcagagcccctgcagctgctcctggccaaagtcatgcgctttgaacggtttggtcgcaggcgtgtgatcatcaagaaggggcagaagggcaacagcttttatttcatctacctgggcacagttgcaataaccaaggacgaggatggcagcagtgccttcctagatccccacccgaaattgctgcacaagggtagctgttttggggaaatggacgttctgcatgcttcagtgaggaggtccaccatcgtctgtatggaagaaacggagttcctggttgttgaccgggaggacttctttgctaataagctggaccaggaagttcagaaggatgctcagtatcggtttgaattttttaggaagatggagctgtttgcatcatggtctgatgagaagctctggcagctggtagccatggcgaagatagagaggttctcgtatgggcagctgatctcaaaagattttggagagtcacccttcatcatgtttatcagcaagggcagctgtgaagtcctgcggctgttggaccttggggcctccccttcctaccgtagatggatctggcagcacctggagctgatagatggcagacctctgaagacccacctgagtgaatactctcctatggaaagatttaaggaattccagatcaaatcatatcctctgcaagactttagctccttgaaacttccacatctcaaaaaagcctgggggctacaggggacaagcttcagcaggaagatcagaacctcaggagacactctccccaagatgctgggcccgaagatccaatccaggcctgctcagtcgatcaaatgtgccatgatcaatatcaagcctggtgagctccccaaggaggctgcagtgggggcctacgtgaaggtgcacactgtggagcagggagaaattttgtgatgaagatatgtgccagaagttcctccagcagaacagctggaatatctttcggaaggacctgttgcagctgctcgtggagccttgccaaagtcaactgttcactccaaaccggcccaagaagagagagatctacaaccctaagtctgtggtcctggatttgtgcagcatcaacaagacgactaaacctcgttatcctatttttatggcaccccagaaatacctccccccattgaggattgtccaagccatcaaagcacctcggtacaaaatccgagaactcttggcttagtgtaagagcacaggggtcctt

SEQ ID NO: 123374 - DNA, 1426 bp, Homo sapiens
  Payload ID: 4224
  Gene Symbol: CNBD2
  Gene Name: cyclic nucleotide binding domain containing 2
  ENST ID: ENST00000463258
  CDS Start-End: 141-575
ggaggagtggagtggagctcttgccttgttactgaggaaatctatttgtttctagtattactggatttttggggaaaaatttgtagtcctccccttgaaaggcaaaggggctagttgtgccatttgcctgcacaggaaccatgaggagacatatggtaacttatgcctggcagctcctgaagaaggaactgggactgtaccagctcgccatggatatcatcataatgatccgagtgtgtaaaatgttccgccaaggcctcaggggattccgggaatatcaaatcattgagactgctcactggaagcaccctatcttctccttctgggataaaaagatgcaaagccgagtcacatttgataccatggacttcattgcagaggagggtcactttcctccaaaggccattcagatcatgcagaagaagccttcctggagaacagaggatgagatccaggccgtctgtaacatcttgcaggttctggatagctatcggaactacgcagagcccctgcagctgctcctggccaaagtcatgcgctttgaacggaaatggacgttctgcatgcttcagtgaggaggtccaccatcgtctgtatggaagaaacggagttcctggttgttgaccgggaggacttctttgctaataagctggaccaggaagttcagaaggatgctcagtatcggtttgaattttttagggcagctgtgaagtcctgcggctgttggaccttggggcctccccttcctaccgtagatggatctggcagcacctggagctgatagatggcagacctctgaagacccacctgagtgaatactctcctatggaaagatttaaggaattccagatcaaatcatatcctctgcaagactttagctccttgaaacttccacatctcaaaaaagcctgggggctacaggggacaagcttcagcaggaagatcagaacctcaggagacactctccccaagatgctgggcccgaagatccaatccaggcctgctcagtcgatcaaatgtgccatgatcaatatcaagcctggtgagctccccaaggaggctgcagtgggggcctacgtgaaggtgcacactgtggagcagggagaaattttgtgatgaagatatgtgccagaagttcctccagcagaacagctggaatatctttcggaaggacctgttgcagctgctcgtggagccttgccaaagtcaactgttcactccaaaccggcccaagaagagagagatctacaaccctaagtctgtggtcctggatttgtgcagcatcaacaagacgactaaacctcgttatcctatttttatggcaccccagaaatacctccccccattgaggattgtccaagccatcaaagcacctcggtacaaaatccgagaactcttggcttagtgtaagagcacaggggtcctt

SEQ ID NO: 123375 - DNA, 662 bp, Homo sapiens
  Payload ID: 4224
  Gene Symbol: CNBD2
  Gene Name: cyclic nucleotide binding domain containing 2
  ENST ID: ENST00000614708
  CDS Start-End: 1-77
tagacttcaagtcccggaccttatccgtgcgccgcttcggtttgcaggtgacctttgcgtgcgggcgccccttctgattgaccctgatgagctgtagctctgatggcccctccttcgggaatgattagggtgacggctggccggggctcgttcgagtggcgcccggccggtggtgacccgaacaggagagcgggacggcgaccattctctcgggaggggcccatctggagaaagtcctctcgcttggtcaaactaggagggcgatagcaccggccttactgcgacgatgacaaagtacaacacaccgtctggcgcgaaggagatgctcgagaaccctttgctgttgttatttttcgcgtgtcctccgaaaccaagggaaatgcggctctgtgggttctgttaacgtcagcatttaataagtgaactctaaatgcattgccccttatggtggccgctggcctcctgagttgactcagctcttgcaacgtagctagttgataaccctcgaaatatagcgaattgagatgtgctatattgtaaaatacgggacttagtacgaaaaaactgatgtaaaaattatctcaatactttttaatactgattacatgttggaatataatgttttgcatatattgggtcaaataaaaatgttattaatttca

SEQ ID NO: 123376 - DNA, 559 bp, Homo sapiens
  Payload ID: 4224
  Gene Symbol: CNBD2
  Gene Name: cyclic nucleotide binding domain containing 2
  ENST ID: ENST00000622112
  CDS Start-End: 17-559
agcgttctcgagtcgcatgaggcggctgctgccctcgcggtgcgggagggcgagctgcgcgtggcctgggctccttccgaatggtggcgcctctgagcgccagttcgaggaggagtcggaggaggagcctgaatgtttggagatagacttcaagtcccggaccttatccgtgcgccgcttcggtttgcagattgagaaaccaagatgtcagaagatgaaggattggtccaaaataagaaagctaggactgtaccagctcgccatggatatcatcataatgatccgagtgtgtaaaatgttccgccaaggcctcaggggattccgggaatatcaaatcattgagactgctcactggaagcaccctatcttctccttctgggataaaaagatgcaaagccgagtcacatttgataccatggacttcattgcagaggagggtcactttcctccaaaggccattcagatcatgcagaagaagccttcctggagaacagaggatgagatccaggccgtctgtaacatcttgcaggttctggatagctatcggaactacgcagag

SEQ ID NO: 123377 - DNA, 2531 bp, Homo sapiens
  Payload ID: 4224
  Gene Symbol: CNBD2
  Gene Name: cyclic nucleotide binding domain containing 2
  ENST ID: ENST00000489667
  CDS Start-End: 153-455
gatggtatggtaggaggagtggagtggagctcttgccttgttactgaggaaatctatttgtttctagtattactggatttttggggaaaaatttgtagtcctccccttgaaaggcaaaggggctagttgtgccatttgcctgcacaggaaccatgaggagacatatggtaacttatgcctggcagctcctgaagaaggaactgggactgtaccagctcgccatggatatcatcataatgatccgagtgtgtaaaatgttccgccaaggcctcaggggattccgggaatatcaaatcattgagactgctcactggaagcaccctatcttctccttctgggatgtaagcagttgggctcagcaggattatgagggctcaaagaagcccaataaattgcatcccacttcctggcctaagctcagaactgagaaagaagacaaaaggaaaagcagatgagagacccaatggtcacttttattaatggccatacttctgttggagagggtgacttacatcatcaaccaagaggtttacctaatactgaaccccagatttagacagccttacatgcctagccacaggcaacgctggaccaaggcaggctccactgcaacagcaggcctgctgccaaaactcatggcagggaaaggtggagcaaaatatgggctgagagggaaggagacaatcatgcctagtttttctctttccaaattcatcaaagagtttaagtcactcctcaatgtaaaaggagagaggccagtagtgttctactaatacacctccctccatgtggaaagaaaccttgggagtagagaggtggtctccatttcaatggtgatcaaaagagccagaagcaatccaggaatcacaataaccagggttttctaaatgcccacacgctctctctattcgcgtctctactttctttcctacacccctacttcggtgcaggggcattttcagggctttgttcactgcggtgaccatgtttcttttatttttttgagacggagtcttgctctgttgcccaggctggagtgcagtggcgcgtcttggctcactgcaagctccacctcccgggttcacaccattctcctgcctcagcctccctagtagctgggactacaggcacccgccaccacacccagctaattttttgtatttttagtagagacggggtttcaccttgttagccaggatggtcttgatctcttgacctcgtgatccacctgcctcggcctcccaaagtgctgggattacaggcgtgagccaccgtgcctggcctggtgaccaggtttctagatttcctagaaggtcccaatttaaaatattttatcccagtggtagatcatgtgcccttctttagctcagaaaagttggtcacccttctgctaacttgttctagttccccagaggtatcttcattgctactgggtgtgttgctcagggcttcaaagtttccccagcaatcacctggacaaatcctgcccatttttctgttgtttcaggaatgactagagccagtccccactcctctgcatctagtgattcactccaagaaatttccctaaagggcttctgacagatagtggccaaagaaagggggatacggggctggtgatgggggaaggaaaggcagccttaaactggtttctgaggggccagcaggtaatataactagtgtgtatgtagctgagtttaagatacagcaggccagctggagaggaaagatacacctcatctaaagacattcagatacaaatattatattttaagaccctgtgctggccaaaccaaacaaggctgcagccctgtggttgggctgagatgaaaaacgaatggagtagaagaactgtaaccaaaagactcaggttagctctcaggaaggacctcctgactctcagggtggcatgtaatggtgatgcaatgggccctggagatcagagggctttggttaccagaagacgtggcctgatgcatggggcagttggaagctaagatgcagagtcacttgttgtcaggggaatgtgaggctaagcctaaccacattggccagccagagtggcttgagcagagcagaagcctctcaagggcagcctataagggtcatagggttgtcaggcggagcactgggcggctggagtgcaggatcaggtggggagccctagactgcttcagtagatgtgtgaatctggatgtttctgagcactgcctctttccttcagtagtctccctgagaagcaccacatggctatgcaaaggataaacacgttgtgggggcgagacgggtctgagtctaaggaacaaatgacatgtggcttgaggccacactccagacacggaattgggtttgctgaaagccttgagttggggtctcagctagaccactgacttgctgtgtgatccttgggcaagttccttcaccatctcagtcctacatggagcttaataaaacctgctttgtcctgatgactaaatggagtaaggcagggaggatacactgtgcttggctcattaaagacatttaacaaa

SEQ ID NO: 123378 - DNA, 2627 bp, Homo sapiens
  Payload ID: 4225
  Gene Symbol: CNGA1
  Gene Name: cyclic nucleotide gated channel alpha 1
  Uniprot ID: P29973
  ENST ID: ENST00000358519
  CDS Start-End: 113-2185
agggcctggattttgacaatgtcaagatttaccgtatatccctgtttgtttggatacaccagtgacgtccacttctagaagacaaagttatattacttaaacaaccaaagatatgaaactatccatgaagaacaatattatcaatacacagcagtcttttgtaaccatgcccaatgtgattgtaccagatattgaaaaggaaatacgaaggatggaaaatggagcatgcagctccttttctgaggatgatgacagtgcctctacatctgaagaatcagagaatgaaaaccctcatgcaaggggttcctttagttataagtcactcagaaagggaggaccatcacagagggagcagtacctgcctggtgccattgcactttttaatgtgaacaacagcagcaataaggaccaggaaccagaagaaaaaaagaaaaagaaaaaagaaaagaagagcaagtcagatgataaaaacgaaaataaaaacgacccagagaagaaaaagaagaaaaaggacaaagagaagaaaaagaaagaggagaaaagcaaagataagaaagaagaggagaagaaagaagttgtggttattgatccctcgggaaacacatattacaactggctgttttgcatcacattacctgttatgtacaactggacaatggttattgccagagcatgttttgatgaacttcaatctgattacctagaatattggctcattttggattacgtatcagacatagtctatttaatcgatatgtttgtacgaacaaggacaggttacctagaacaaggactgctggtaaaggaagaacttaaactcataaataaatataaatccaacttgcaatttaaacttgatgttctgtcactgataccaactgatttgctgtattttaagttagggtggaactatccagaaattagattaaacaggttgttacggttctctcgtatgtttgagttcttccagagaacagaaacaaggacaaactatccaaacatcttcaggatttccaaccttgttatgtatatcgtcatcattatccactggaatgcatgtgtgttctactctatttctaaagctattggatttggaaatgatacatgggtctaccctgatattaatgatcctgaatttggccgtttggctagaaaatacgtatacagcctttactggtctacactgactttgactaccattggtgaaacaccccctcccgtgagggattctgagtatgtctttgtggtggttgatttcctaattggagtgttaatttttgctaccatcgttggtaacataggttctatgatttccaacatgaatgcagccagagcagaatttcaagcaagaattgatgctatcaagcaatatatgcattttcgaaatgtaagcaaagatatggaaaagagggttattaaatggtttgactacctgtggaccaacaaaaaaacagttgatgagaaagaagtcttaaagtatctacctgataaactaagagcagaaattgccatcaacgttcacttagacacattaaaaaaggtacgcatttttgctgattgtgaagctggtctgttggtggagttggtcttgaaattgcaaccccaagtctacagtcctggagattatatttgcaagaaaggggatatcggacgagagatgtacattatcaaggaaggcaaactcgctgtggtggcagatgatggagtcactcagtttgtggtattgagcgatggcagctacttcggtgagatcagcattcttaacattaaagggagcaaagctggcaatcgaagaacggccaatattaaaagtattggctactcagacctgttctgtctctcaaaagatgacctcatggaagctctaactgagtacccagatgccaaaactatgctggaagagaaagggaagcagattttaatgaaagatggtctactggatctaaacattgcaaatgctggcagtgatcctaaagatcttgaagagaaggttactcgaatggaggggtcagtagacctcctgcaaaccaggtttgcccgaatcttggctgagtatgagtccatgcagcagaaactgaaacaaagattaaccaaggttgagaaatttctgaaaccgcttattgacacagaattttcaagtattgagggacctggagcggaaagtgggcccatcgactctacatagaaccgaaaagctggtcattaacagggacatgcctcatgatccttttgatcctatgactgacatcaactaaaatttaaaagaagaggaagactcagttgggaaatttttccatgaggaaaatgtgctttggtgcaaggtacaaggcccacaccctctctgagagatactatgattaaaaaagctttatatcttgggatttttcacaactgataatgtgcaaagatataaactgattaacttgtcagtgtctgtattttctgattttttcacatacgctcattttatgtaatattcttcataaaaatgaataagtagccctcactttcatgccatttccattgttgagtgaagcgtatttgaagtaactgagaattaccatgtacatcatatttgggataacatttttaaaaattagactgcaataaagtaaaattaattatgc

SEQ ID NO: 123379 - DNA, 2867 bp, Homo sapiens
  Payload ID: 4225
  Gene Symbol: CNGA1
  Gene Name: cyclic nucleotide gated channel alpha 1
  Uniprot ID: P29973
  ENST ID: ENST00000402813
  CDS Start-End: 144-2423
aaaaatcagcatgtttattatttttaaaaaattagggcctggattttgacaatgtcaagatttaccgtatatccctgtttgtttggatacaccagtgacgtccacttctagaagacaaagttatattacttaaacaaccaaagatggagtctcgctcttcgcccaggctggagtgcagtggcgcgatctcggctcactgcagtcttcacctcccagattcaagcgatttccagctaatttttgtatttttagtagagatgggatttcaccatgttggccaagctggacttgaactcctgatctcaagtgatctgcccacctcagcctcccaaagtgctggtattacagatatgaaactatccatgaagaacaatattatcaatacacagcagtcttttgtaaccatgcccaatgtgattgtaccagatattgaaaaggaaatacgaaggatggaaaatggagcatgcagctccttttctgaggatgatgacagtgcctctacatctgaagaatcagagaatgaaaaccctcatgcaaggggttcctttagttataagtcactcagaaagggaggaccatcacagagggagcagtacctgcctggtgccattgcactttttaatgtgaacaacagcagcaataaggaccaggaaccagaagaaaaaaagaaaaagaaaaaagaaaagaagagcaagtcagatgataaaaacgaaaataaaaacgacccagagaagaaaaagaagaaaaaggacaaagagaagaaaaagaaagaggagaaaagcaaagataagaaagaagaggagaagaaagaagttgtggttattgatccctcgggaaacacatattacaactggctgttttgcatcacattacctgttatgtacaactggacaatggttattgccagagcatgttttgatgaacttcaatctgattacctagaatattggctcattttggattacgtatcagacatagtctatttaatcgatatgtttgtacgaacaaggacaggttacctagaacaaggactgctggtaaaggaagaacttaaactcataaataaatataaatccaacttgcaatttaaacttgatgttctgtcactgataccaactgatttgctgtattttaagttagggtggaactatccagaaattagattaaacaggttgttacggttctctcgtatgtttgagttcttccagagaacagaaacaaggacaaactatccaaacatcttcaggatttccaaccttgttatgtatatcgtcatcattatccactggaatgcatgtgtgttctactctatttctaaagctattggatttggaaatgatacatgggtctaccctgatattaatgatcctgaatttggccgtttggctagaaaatacgtatacagcctttactggtctacactgactttgactaccattggtgaaacaccccctcccgtgagggattctgagtatgtctttgtggtggttgatttcctaattggagtgttaatttttgctaccatcgttggtaacataggttctatgatttccaacatgaatgcagccagagcagaatttcaagcaagaattgatgctatcaagcaatatatgcattttcgaaatgtaagcaaagatatggaaaagagggttattaaatggtttgactacctgtggaccaacaaaaaaacagttgatgagaaagaagtcttaaagtatctacctgataaactaagagcagaaattgccatcaacgttcacttagacacattaaaaaaggtacgcatttttgctgattgtgaagctggtctgttggtggagttggtcttgaaattgcaaccccaagtctacagtcctggagattatatttgcaagaaaggggatatcggacgagagatgtacattatcaaggaaggcaaactcgctgtggtggcagatgatggagtcactcagtttgtggtattgagcgatggcagctacttcggtgagatcagcattcttaacattaaagggagcaaagctggcaatcgaagaacggccaatattaaaagtattggctactcagacctgttctgtctctcaaaagatgacctcatggaagctctaactgagtacccagatgccaaaactatgctggaagagaaagggaagcagattttaatgaaagatggtctactggatctaaacattgcaaatgctggcagtgatcctaaagatcttgaagagaaggttactcgaatggaggggtcagtagacctcctgcaaaccaggtttgcccgaatcttggctgagtatgagtccatgcagcagaaactgaaacaaagattaaccaaggttgagaaatttctgaaaccgcttattgacacagaattttcaagtattgagggacctggagcggaaagtgggcccatcgactctacatagaaccgaaaagctggtcattaacagggacatgcctcatgatccttttgatcctatgactgacatcaactaaaatttaaaagaagaggaagactcagttgggaaatttttccatgaggaaaatgtgctttggtgcaaggtacaaggcccacaccctctctgagagatactatgattaaaaaagctttatatcttgggatttttcacaactgataatgtgcaaagatataaactgattaacttgtcagtgtctgtattttctgattttttcacatacgctcattttatgtaatattcttcataaaaatgaataagtagccctcactttcatgccatttccattgttgagtgaagcgtatttgaagtaactgagaattaccatgtacatcatatttgggataacatttttaaaaattagactgcaataaagtaaaattaattatgcaa

SEQ ID NO: 123380 - DNA, 2746 bp, Homo sapiens
  Payload ID: 4225
  Gene Symbol: CNGA1
  Gene Name: cyclic nucleotide gated channel alpha 1
  Uniprot ID: P29973
  ENST ID: ENST00000420489
  CDS Start-End: 267-2339
tttttcctgcttcttgaatggtagagagcagtctatagccagagactcgtccctagctcgagctgagctttcgcttgccgtccaccactgcccaccactgtcgtttgctgccatcgcagacctgctgctgacttccatccctctggatccggcaagggcctggattttgacaatgtcaagatttaccgtatatccctgtttgtttggatacaccagtgacgtccacttctagaagacaaagttatattacttaaacaaccaaagatatgaaactatccatgaagaacaatattatcaatacacagcagtcttttgtaaccatgcccaatgtgattgtaccagatattgaaaaggaaatacgaaggatggaaaatggagcatgcagctccttttctgaggatgatgacagtgcctctacatctgaagaatcagagaatgaaaaccctcatgcaaggggttcctttagttataagtcactcagaaagggaggaccatcacagagggagcagtacctgcctggtgccattgcactttttaatgtgaacaacagcagcaataaggaccaggaaccagaagaaaaaaagaaaaagaaaaaagaaaagaagagcaagtcagatgataaaaacgaaaataaaaacgacccagagaagaaaaagaagaaaaaggacaaagagaagaaaaagaaagaggagaaaagcaaagataagaaagaagaggagaagaaagaagttgtggttattgatccctcgggaaacacatattacaactggctgttttgcatcacattacctgttatgtacaactggacaatggttattgccagagcatgttttgatgaacttcaatctgattacctagaatattggctcattttggattacgtatcagacatagtctatttaatcgatatgtttgtacgaacaaggacaggttacctagaacaaggactgctggtaaaggaagaacttaaactcataaataaatataaatccaacttgcaatttaaacttgatgttctgtcactgataccaactgatttgctgtattttaagttagggtggaactatccagaaattagattaaacaggttgttacggttctctcgtatgtttgagttcttccagagaacagaaacaaggacaaactatccaaacatcttcaggatttccaaccttgttatgtatatcgtcatcattatccactggaatgcatgtgtgttctactctatttctaaagctattggatttggaaatgatacatgggtctaccctgatattaatgatcctgaatttggccgtttggctagaaaatacgtatacagcctttactggtctacactgactttgactaccattggtgaaacaccccctcccgtgagggattctgagtatgtctttgtggtggttgatttcctaattggagtgttaatttttgctaccatcgttggtaacataggttctatgatttccaacatgaatgcagccagagcagaatttcaagcaagaattgatgctatcaagcaatatatgcattttcgaaatgtaagcaaagatatggaaaagagggttattaaatggtttgactacctgtggaccaacaaaaaaacagttgatgagaaagaagtcttaaagtatctacctgataaactaagagcagaaattgccatcaacgttcacttagacacattaaaaaaggtacgcatttttgctgattgtgaagctggtctgttggtggagttggtcttgaaattgcaaccccaagtctacagtcctggagattatatttgcaagaaaggggatatcggacgagagatgtacattatcaaggaaggcaaactcgctgtggtggcagatgatggagtcactcagtttgtggtattgagcgatggcagctacttcggtgagatcagcattcttaacattaaagggagcaaagctggcaatcgaagaacggccaatattaaaagtattggctactcagacctgttctgtctctcaaaagatgacctcatggaagctctaactgagtacccagatgccaaaactatgctggaagagaaagggaagcagattttaatgaaagatggtctactggatctaaacattgcaaatgctggcagtgatcctaaagatcttgaagagaaggttactcgaatggaggggtcagtagacctcctgcaaaccaggtttgcccgaatcttggctgagtatgagtccatgcagcagaaactgaaacaaagattaaccaaggttgagaaatttctgaaaccgcttattgacacagaattttcaagtattgagggacctggagcggaaagtgggcccatcgactctacatagaaccgaaaagctggtcattaacagggacatgcctcatgatccttttgatcctatgactgacatcaactaaaatttaaaagaagaggaagactcagttgggaaatttttccatgaggaaaatgtgctttggtgcaaggtacaaggcccacaccctctctgagagatactatgattaaaaaagctttatatcttgggatttttcacaactgataatgtgcaaagatataaactgattaacttgtcagtgtctgtattttctgattttttcacatacgctcattttatgtaatattcttcataaaaatgaataagtagccctcactttcatgccatttccattgttgagtgaagcgtatttgaagtaactgagaattaccatgtacatcatatttgggataacattttta

SEQ ID NO: 123381 - DNA, 405 bp, Homo sapiens
  Payload ID: 4225
  Gene Symbol: CNGA1
  Gene Name: cyclic nucleotide gated channel alpha 1
  ENST ID: ENST00000514520
  CDS Start-End: 107-405
tattagcagcatgaggacagactaatacatagggtgaaacttttgattatatatgtaaatatataaaaatagcctttccactaataagacttctttctcctcagatatgaaactatccatgaagaacaatattatcaatacacagcagtcttttgtaaccatgcccaatgtgattgtaccagatattgaaaaggaaatacgaaggatggaaaatggagcatgcagctccttttctgaggatgatgacagtgcctctacatctgaagaatcagagaatgaaaaccctcatgcaaggggttcctttagttataagtcactcagaaagggaggaccatcacagagggagcagtacctgcctggtgccattgcactttttaatgtgaacaacagcagcaataaggacca

SEQ ID NO: 123382 - DNA, 589 bp, Homo sapiens
  Payload ID: 4225
  Gene Symbol: CNGA1
  Gene Name: cyclic nucleotide gated channel alpha 1
  ENST ID: ENST00000513178
  CDS Start-End: 293-589
cgagccctgctgcccggggcttgttgcgaattctcagggcccccgcaggcctgggagcggcctgtgataactggtgtatctggcaggagtagcagctgccccttggcgcgactgctggagccgcgaactagagaaacacagacacgcctcatagagcaacagcgtctctcggagcgtggagcccgccaagctcgagctgagctttcgcttgccgtccaccactgcccaccactgtcgtttgctgccatcgcagacctgctgctgacttccatccctctggatccggcaagatatgaaactatccatgaagaacaatattatcaatacacagcagtcttttgtaaccatgcccaatgtgattgtaccagatattgaaaaggaaatacgaaggatggaaaatggagcatgcagctccttttctgaggatgatgacagtgcctctacatctgaagaatcagagaatgaaaaccctcatgcaaggggttcctttagttataagtcactcagaaagggaggaccatcacagagggagcagtacctgcctggtgccattgcactttttaatgtgaacaacagcagcaataaggac

SEQ ID NO: 123383 - DNA, 543 bp, Homo sapiens
  Payload ID: 4225
  Gene Symbol: CNGA1
  Gene Name: cyclic nucleotide gated channel alpha 1
  ENST ID: ENST00000504722
  CDS Start-End: 159-543
tttttcctgcttcttgaatggtagagagcagtctatagccagagactcgtccctagctcgagctgagctttcgcttgccgtccaccactgcccaccactgtcgtttgctgccatcgcagacctgctgctgacttccatccctctggatccggcaagatatgaaactatccatgaagaacaatattatcaatacacagcagtcttttgtaaccatgcccaatgtgattgtaccagatattgaaaaggaaatacgaaggatggaaaatggagcatgcagctccttttctgaggatgatgacagtgcctctacatctgaagaatcagagaatgaaaaccctcatgcaaggggttcctttagttataagtcactcagaaagggaggaccatcacagagggagcagtacctgcctggtgccattgcactttttaatgtgaacaacagcagcaataaggaccaggaaccagaagaaaaaaagaaaaagaaaaaagaaaagaagagcaagtcagatgataaaaacgaaaataaaaacgacccagagaaga

SEQ ID NO: 123384 - DNA, 2837 bp, Homo sapiens
  Payload ID: 4225
  Gene Symbol: CNGA1
  Gene Name: cyclic nucleotide gated channel alpha 1
  Uniprot ID: P29973
  ENST ID: ENST00000514170
  CDS Start-End: 321-2393
tggcaggagtagcagctgccccttggcgcgactgctggagccgcgaactagagaaacacagacacgcctcatagagcaacagcgtctctcggagcgtggagcccgccaagctcgagctgagctttcgcttgccgtccaccactgcccaccactgtcgtttgctgccatcgcagacctgctgctgacttccatccctctggatccggcaagggcctggattttgacaatgtcaagatttaccgtatatccctgtttgtttggatacaccagtgacgtccacttctagaagacaaagttatattacttaaacaaccaaagatatgaaactatccatgaagaacaatattatcaatacacagcagtcttttgtaaccatgcccaatgtgattgtaccagatattgaaaaggaaatacgaaggatggaaaatggagcatgcagctccttttctgaggatgatgacagtgcctctacatctgaagaatcagagaatgaaaaccctcatgcaaggggttcctttagttataagtcactcagaaagggaggaccatcacagagggagcagtacctgcctggtgccattgcactttttaatgtgaacaacagcagcaataaggaccaggaaccagaagaaaaaaagaaaaagaaaaaagaaaagaagagcaagtcagatgataaaaacgaaaataaaaacgacccagagaagaaaaagaagaaaaaggacaaagagaagaaaaagaaagaggagaaaagcaaagataagaaagaagaggagaagaaagaagttgtggttattgatccctcgggaaacacatattacaactggctgttttgcatcacattacctgttatgtacaactggacaatggttattgccagagcatgttttgatgaacttcaatctgattacctagaatattggctcattttggattacgtatcagacatagtctatttaatcgatatgtttgtacgaacaaggacaggttacctagaacaaggactgctggtaaaggaagaacttaaactcataaataaatataaatccaacttgcaatttaaacttgatgttctgtcactgataccaactgatttgctgtattttaagttagggtggaactatccagaaattagattaaacaggttgttacggttctctcgtatgtttgagttcttccagagaacagaaacaaggacaaactatccaaacatcttcaggatttccaaccttgttatgtatatcgtcatcattatccactggaatgcatgtgtgttctactctatttctaaagctattggatttggaaatgatacatgggtctaccctgatattaatgatcctgaatttggccgtttggctagaaaatacgtatacagcctttactggtctacactgactttgactaccattggtgaaacaccccctcccgtgagggattctgagtatgtctttgtggtggttgatttcctaattggagtgttaatttttgctaccatcgttggtaacataggttctatgatttccaacatgaatgcagccagagcagaatttcaagcaagaattgatgctatcaagcaatatatgcattttcgaaatgtaagcaaagatatggaaaagagggttattaaatggtttgactacctgtggaccaacaaaaaaacagttgatgagaaagaagtcttaaagtatctacctgataaactaagagcagaaattgccatcaacgttcacttagacacattaaaaaaggtacgcatttttgctgattgtgaagctggtctgttggtggagttggtcttgaaattgcaaccccaagtctacagtcctggagattatatttgcaagaaaggggatatcggacgagagatgtacattatcaaggaaggcaaactcgctgtggtggcagatgatggagtcactcagtttgtggtattgagcgatggcagctacttcggtgagatcagcattcttaacattaaagggagcaaagctggcaatcgaagaacggccaatattaaaagtattggctactcagacctgttctgtctctcaaaagatgacctcatggaagctctaactgagtacccagatgccaaaactatgctggaagagaaagggaagcagattttaatgaaagatggtctactggatctaaacattgcaaatgctggcagtgatcctaaagatcttgaagagaaggttactcgaatggaggggtcagtagacctcctgcaaaccaggtttgcccgaatcttggctgagtatgagtccatgcagcagaaactgaaacaaagattaaccaaggttgagaaatttctgaaaccgcttattgacacagaattttcaagtattgagggacctggagcggaaagtgggcccatcgactctacatagaaccgaaaagctggtcattaacagggacatgcctcatgatccttttgatcctatgactgacatcaactaaaatttaaaagaagaggaagactcagttgggaaatttttccatgaggaaaatgtgctttggtgcaaggtacaaggcccacaccctctctgagagatactatgattaaaaaagctttatatcttgggatttttcacaactgataatgtgcaaagatataaactgattaacttgtcagtgtctgtattttctgattttttcacatacgctcattttatgtaatattcttcataaaaatgaataagtagccctcactttcatgccatttccattgttgagtgaagcgtatttgaagtaactgagaattaccatgtacatcatatttgggataacatttttaaaaattagactgcaataaagtaaaattaattatgcaa

SEQ ID NO: 123385 - DNA, 2722 bp, Homo sapiens
  Payload ID: 4225
  Gene Symbol: CNGA1
  Gene Name: cyclic nucleotide gated channel alpha 1
  Uniprot ID: P29973
  ENST ID: ENST00000544810
  CDS Start-End: 1-2280
atggagtctcgctcttcgcccaggctggagtgcagtggcgcgatctcggctcactgcagtcttcacctcccagattcaagcgatttccagctaatttttgtatttttagtagagatgggatttcaccatgttggccaagctggacttgaactcctgatctcaagtgatctgcccacctcagcctcccaaagtgctggtattacagatatgaaactatccatgaagaacaatattatcaatacacagcagtcttttgtaaccatgcccaatgtgattgtaccagatattgaaaaggaaatacgaaggatggaaaatggagcatgcagctccttttctgaggatgatgacagtgcctctacatctgaagaatcagagaatgaaaaccctcatgcaaggggttcctttagttataagtcactcagaaagggaggaccatcacagagggagcagtacctgcctggtgccattgcactttttaatgtgaacaacagcagcaataaggaccaggaaccagaagaaaaaaagaaaaagaaaaaagaaaagaagagcaagtcagatgataaaaacgaaaataaaaacgacccagagaagaaaaagaagaaaaaggacaaagagaagaaaaagaaagaggagaaaagcaaagataagaaagaagaggagaagaaagaagttgtggttattgatccctcgggaaacacatattacaactggctgttttgcatcacattacctgttatgtacaactggacaatggttattgccagagcatgttttgatgaacttcaatctgattacctagaatattggctcattttggattacgtatcagacatagtctatttaatcgatatgtttgtacgaacaaggacaggttacctagaacaaggactgctggtaaaggaagaacttaaactcataaataaatataaatccaacttgcaatttaaacttgatgttctgtcactgataccaactgatttgctgtattttaagttagggtggaactatccagaaattagattaaacaggttgttacggttctctcgtatgtttgagttcttccagagaacagaaacaaggacaaactatccaaacatcttcaggatttccaaccttgttatgtatatcgtcatcattatccactggaatgcatgtgtgttctactctatttctaaagctattggatttggaaatgatacatgggtctaccctgatattaatgatcctgaatttggccgtttggctagaaaatacgtatacagcctttactggtctacactgactttgactaccattggtgaaacaccccctcccgtgagggattctgagtatgtctttgtggtggttgatttcctaattggagtgttaatttttgctaccatcgttggtaacataggttctatgatttccaacatgaatgcagccagagcagaatttcaagcaagaattgatgctatcaagcaatatatgcattttcgaaatgtaagcaaagatatggaaaagagggttattaaatggtttgactacctgtggaccaacaaaaaaacagttgatgagaaagaagtcttaaagtatctacctgataaactaagagcagaaattgccatcaacgttcacttagacacattaaaaaaggtacgcatttttgctgattgtgaagctggtctgttggtggagttggtcttgaaattgcaaccccaagtctacagtcctggagattatatttgcaagaaaggggatatcggacgagagatgtacattatcaaggaaggcaaactcgctgtggtggcagatgatggagtcactcagtttgtggtattgagcgatggcagctacttcggtgagatcagcattcttaacattaaagggagcaaagctggcaatcgaagaacggccaatattaaaagtattggctactcagacctgttctgtctctcaaaagatgacctcatggaagctctaactgagtacccagatgccaaaactatgctggaagagaaagggaagcagattttaatgaaagatggtctactggatctaaacattgcaaatgctggcagtgatcctaaagatcttgaagagaaggttactcgaatggaggggtcagtagacctcctgcaaaccaggtttgcccgaatcttggctgagtatgagtccatgcagcagaaactgaaacaaagattaaccaaggttgagaaatttctgaaaccgcttattgacacagaattttcaagtattgagggacctggagcggaaagtgggcccatcgactctacatagaaccgaaaagctggtcattaacagggacatgcctcatgatccttttgatcctatgactgacatcaactaaaatttaaaagaagaggaagactcagttgggaaatttttccatgaggaaaatgtgctttggtgcaaggtacaaggcccacaccctctctgagagatactatgattaaaaaagctttatatcttgggatttttcacaactgataatgtgcaaagatataaactgattaacttgtcagtgtctgtattttctgattttttcacatacgctcattttatgtaatattcttcataaaaatgaataagtagccctcactttcatgccatttccattgttgagtgaagcgtatttgaagtaactgagaattaccatgtacatcatatttgggataacatttttaaaaattagactgcaataaagtaaaattaattatgc

SEQ ID NO: 123386 - DNA, 2834 bp, Homo sapiens
  Payload ID: 4226
  Gene Symbol: CNGA2
  Gene Name: cyclic nucleotide gated channel alpha 2
  Uniprot ID: Q16280
  ENST ID: ENST00000329903
  CDS Start-End: 34-2028
ctggcagataagtgctctggttgtacatggaggatgaccgaaaaaaccaatggtgtgaagagctccccagccaataatcacaaccatcatgcacctcctgccatcaaggccaatggcaaagatgaccacaggacaagcagcaggccacactctgcagctgacgatgacacctcctcagaactgcagaggctggcagacgtggatgccccacagcagggaaggagtggcttccgcaggatagttcgcctggtggggatcatcagagaatgggccaacaagaatttccgagaggaggaacctaggcctgactcattcctcgagcgttttcgtgggcctgaactccagactgtgaccacacaggagggggatggcaaaggcgacaaggatggcgaggacaaaggcaccaagaagaaatttgaactatttgtcttggacccagctggggattggtactactgctggctatttgtcattgccatgcccgtcctttacaactggtgcctgctggtggccagagcctgcttcagtgacctacagaaaggctactacctggtgtggctggtgctggattatgtctcagatgtggtctacattgcggacctcttcatccgattgcgcacaggtttcctggagcaggggctgctggtcaaagataccaagaaactgcgagacaactacatccacaccctgcagttcaagctggatgtggcttccatcatccccactgacctgatctattttgctgtggacatccacagccctgaggtgcgcttcaaccgcctgctgcactttgcccgcatgtttgagttctttgaccggacagagacacgcaccaactaccctaacatcttccgcatcagcaaccttgtcctctacatcttggtcatcatccactggaatgcctgcatctattatgccatctccaaatccataggctttggggtcgacacctgggtttacccaaacatcactgaccctgagtatggctacctggctagggaatacatctattgcctttactggtccacactgactctcactaccattggggagacaccaccccctgtaaaggatgaggagtacctatttgtcatctttgacttcctgattggcgtcctcatctttgccaccatcgtgggaaatgtgggctccatgatctccaacatgaatgccacccgggcagagttccaggctaagatcgatgccgtgaaacactacatgcagttccgaaaggtcagcaaggggatggaagccaaggtcattaggtggtttgactacttgtggaccaataagaagacagtggatgagcgagaaattctcaagaatctgccagccaagctcagggctgagatagccatcaatgtccacttgtccacactcaagaaagtgcgcatcttccatgattgtgaggctggcctgctggtagagctggtactgaaactccgtcctcaggtcttcagtcctggggattacatttgccgcaaaggggacatcggcaaggagatgtacatcattaaggagggcaaactggcagtggtggctgatgatggtgtgactcagtatgctctgctgtcggctggaagctgctttggcgagatcagtatccttaacattaagggcagtaaaatgggcaatcgacgcacagctaatatccgcagcctgggctactcagatctcttctgcttgtccaaggatgatcttatggaagctgtgactgagtaccctgatgccaagaaagtcctagaagagaggggtcgggagatcctcatgaaggagggactgctggatgagaacgaagtggcaaccagcatggaggtcgacgtgcaggagaagctagggcagctggagaccaacatggaaaccttgtacactcgctttggccgcctgctggctgagtacacgggggcccagcagaagctcaagcagcgcatcacagttctggaaaccaagatgaaacagaacaatgaagatgactacctgtctgatgggatgaacagccctgagctggctgctgctgacgagccataagacctggggcccaactgcctctccagcattggccttggccttgatcccagaagctagaggagctatttagatctccggatttacatgcattaccctcatgttccctgaattctcccaaaagcctctctgaccctgggtttttggcctaaacatccaagattccgcctccaagtttagcccaagtttgtggagagtacagactgcgttggctgggcttccgagagcttcggcctgcctaagtctgaggaagggagaagggggcagctgtctgccaggagtctggctcttttgctcatagcgacccctcccttggttctggcccccgctttttctaacatgtcttctgaatgcttcctttttccctgcacacgcatgtacttcgagcaccgactatagacatttagatcaggtacccagtgtctgtctcccacgacaggccaagggatgtgatagtgttgttgggagggggtagaagggtgcccactcagggttattcctcccccatcagatgctccagctcctgctctgtagattgatctgtctgtctgctagccaggatgggatctctgcagtcttctgtggaccaaggagatagacccggcttctggtccattccagggcagggagtgaggagcaaggcaactggcatttgtccacctggagacagaggtagctggcagctctggccatccctcccctatgaagagcattcctaaagaggccctgaaaactgctggtggtggggagactcttcaagttaatatctgcattagaggcacctatgagttaaaaaattcctttgaact

SEQ ID NO: 123387 - DNA, 3470 bp, Homo sapiens
  Payload ID: 4227
  Gene Symbol: CNGA3
  Gene Name: cyclic nucleotide gated channel alpha 3
  Uniprot ID: Q16281
  ENST ID: ENST00000272602
  CDS Start-End: 40-2124
agcaatcatctggggggctaaatgtgacaaaccgagaagatggccaagatcaacacccaatactcccacccctccaggacccacctcaaggtaaagacctcagaccgagatctcaatcgcgctgaaaatggcctcagcagagcccactcgtcaagtgaggagacatcgtcagtgctgcagccggggatcgccatggagaccagaggactggctgactccgggcagggctccttcaccggccaggggatcgccaggctgtcgcgcctcatcttcttgctgcgcaggtgggctgccaggcatgtgcaccaccaggaccagggaccggactcttttcctgatcgtttccgtggagccgagcttaaggaggtgtccagccaagaaagcaatgcccaggcaaatgtgggcagccaggagccagcagacagagggagaagcgcctggcccctggccaaatgcaacactaacaccagcaacaacacggaggaggagaagaagacgaaaaagaaggatgcgatcgtggtggacccgtccagcaacctgtactaccgctggctgaccgccatcgccctgcctgtcttctataactggtatctgcttatttgcagggcctgtttcgatgagctgcagtccgagtacctgatgctgtggctggtcctggactactcggcagatgtcctgtatgtcttggatgtgcttgtacgagctcggacaggttttctcgagcaaggcttaatggtcagtgataccaacaggctgtggcagcattacaagacgaccacgcagttcaagctggatgtgttgtccctggtccccaccgacctggcttacttaaaggtgggcacaaactacccagaagtgaggttcaaccgcctactgaagttttcccggctctttgaattctttgaccgcacagagacaaggaccaactaccccaatatgttcaggattgggaacttggtcttgtacattctcatcatcatccactggaatgcctgcatctactttgccatttccaagttcattggttttgggacagactcctgggtctacccaaacatctcaatcccagagcatgggcgcctctccaggaagtacatttacagtctctactggtccaccttgacccttaccaccattggtgagaccccaccccccgtgaaagatgaggagtatctctttgtggtcgtagacttcttggtgggtgttctgatttttgccaccattgtgggcaatgtgggctccatgatctcgaatatgaatgcctcacgggcagagttccaggccaagattgattccatcaagcagtacatgcagttccgcaaggtcaccaaggacttggagacgcgggttatccggtggtttgactacctgtgggccaacaagaagacggtggatgagaaggaggtgctcaagagcctcccagacaagctgaaggctgagatcgccatcaacgtgcacctggacacgctgaagaaggttcgcatcttccaggactgtgaggcagggctgctggtggagctggtgctgaagctgcgacccactgtgttcagccctggggattatatctgcaagaagggagatattgggaaggagatgtacatcatcaacgagggcaagctggccgtggtggctgatgatggggtcacccagttcgtggtcctcagcgatggcagctacttcggggagatcagcattctgaacatcaaggggagcaagtcggggaaccgcaggacggccaacatccgcagcattggctactcagacctgttctgcctctcaaaggacgatctcatggaggccctcaccgagtaccccgaagccaagaaggccctggaggagaaaggacggcagatcctgatgaaagacaacctgatcgatgaggagctggccagggcgggcgcggaccccaaggaccttgaggagaaagtggagcagctggggtcctccctggacaccctgcagaccaggtttgcacgcctcctggctgagtacaacgccacccagatgaagatgaagcagcgtctcagccaactggaaagccaggtgaagggtggtggggacaagcccctggctgatggggaagttcccggggatgctacaaaaacagaggacaaacaacagtgaaaatgcagcatctgtctcctgcttcacagggtcgactgtcagggtgaccgtatgtggccgcagctgtgtggcatggaacttggtcagggttgaattccagctctactcaccctttgaaagctgtgtgactgcctgagagaacctgtttcttcacctaaaaaatgggactttttgtctcagtcccagtgaagtgccaggtttgattgtgaagtccgcatgaaacactgcaccaggcagggctttgcaaagtgcaaggtatccccagtccaagtatatgaaaacgtgcacacaggactctcattacttttttatggaatctgcaaggtgtttttaggctttttaatctgattttcttataaatgaaagattatttagtcacctttctcctgtccaacttcaccaccacctgataatgggtatataacaggaagctgaaggtacaacatagtgactaaaattcagacttacacaagacagtttgaggcatatttcttaatctggtatcacctcgtgtgttctttggggccctagaaaccctggcttttgggagtgctatggcaagtagaagttctgccggatggaaagaggctgccccatttgaggtcatttaaaatctgtgaagcaaatccagactccttgccgttcagccactgtgaaaccagaatctgcttcacagaaaaaagcatctcagttaggagaagagacatcccctccttctcacttgccaaagagattcaaagacagcccctatcctccattcttgagtcagggccctaggtgacctattctaactcaaggaggagagctatgtacagggagagcattttagattgaaggttggaatggtgtactaaaccaaaaaagctgacaactgagagttttagaagattagaccattaggaacgtatctttgcaaactgcccattcacccatgaagaggaagcctcaagatcccttggaattgcatcccaaggcaaagcttttggctcaccgaaagctcacagattgcagaaattagcttttttaaaaaacaaaccccagtaaatataatttcattaacattttataacagatttatatttttgagttccgtgattgcaaattatgacctcaaattccatccttcacttatgtaacatgttgcaaattacccaaagatgagtctttcttctttctttcctttttcctttcttcttcctttccttttttctttcttcttccttctttcttcctttttctctctcctcttttcctcctcaaaatgtatatattttaaaagccttaactgttagttatgcctgcattcatatttgcacaggaaaaataaagacctggatttaaaaata

SEQ ID NO: 123388 - DNA, 3841 bp, Homo sapiens
  Payload ID: 4227
  Gene Symbol: CNGA3
  Gene Name: cyclic nucleotide gated channel alpha 3
  Uniprot ID: Q16281
  ENST ID: ENST00000393504
  CDS Start-End: 418-2502
gcttactcatccagtgtggattacactaccagcaaaacatcccaggaaggagtccagggtggccgcccacagttaggagagaacccagaacggaacgacggacttgtttgctttcttgcccctgactctccccgtcctccctgggagggttggggatgtgaactaatgacttctgcctctttcggaccgcctttgaggctccagagcctcaccttactttcccacggagagggaggccacaggctccttcagcagtcgccgagcagagtcctgggccgggagcgcgggggagggagcgagcggaactgcgcctaggaggccgagggaggaggcgctccgcagaccctggcgcgccgcggagaagctcaaactttggcaggcaatcatctggggggctaaatgtgacaaaccgagaagatggccaagatcaacacccaatactcccacccctccaggacccacctcaaggtaaagacctcagaccgagatctcaatcgcgctgaaaatggcctcagcagagcccactcgtcaagtgaggagacatcgtcagtgctgcagccggggatcgccatggagaccagaggactggctgactccgggcagggctccttcaccggccaggggatcgccaggctgtcgcgcctcatcttcttgctgcgcaggtgggctgccaggcatgtgcaccaccaggaccagggaccggactcttttcctgatcgtttccgtggagccgagcttaaggaggtgtccagccaagaaagcaatgcccaggcaaatgtgggcagccaggagccagcagacagagggagaagcgcctggcccctggccaaatgcaacactaacaccagcaacaacacggaggaggagaagaagacgaaaaagaaggatgcgatcgtggtggacccgtccagcaacctgtactaccgctggctgaccgccatcgccctgcctgtcttctataactggtatctgcttatttgcagggcctgtttcgatgagctgcagtccgagtacctgatgctgtggctggtcctggactactcggcagatgtcctgtatgtcttggatgtgcttgtacgagctcggacaggttttctcgagcaaggcttaatggtcagtgataccaacaggctgtggcagcattacaagacgaccacgcagttcaagctggatgtgttgtccctggtccccaccgacctggcttacttaaaggtgggcacaaactacccagaagtgaggttcaaccgcctactgaagttttcccggctctttgaattctttgaccgcacagagacaaggaccaactaccccaatatgttcaggattgggaacttggtcttgtacattctcatcatcatccactggaatgcctgcatctactttgccatttccaagttcattggttttgggacagactcctgggtctacccaaacatctcaatcccagagcatgggcgcctctccaggaagtacatttacagtctctactggtccaccttgacccttaccaccattggtgagaccccaccccccgtgaaagatgaggagtatctctttgtggtcgtagacttcttggtgggtgttctgatttttgccaccattgtgggcaatgtgggctccatgatctcgaatatgaatgcctcacgggcagagttccaggccaagattgattccatcaagcagtacatgcagttccgcaaggtcaccaaggacttggagacgcgggttatccggtggtttgactacctgtgggccaacaagaagacggtggatgagaaggaggtgctcaagagcctcccagacaagctgaaggctgagatcgccatcaacgtgcacctggacacgctgaagaaggttcgcatcttccaggactgtgaggcagggctgctggtggagctggtgctgaagctgcgacccactgtgttcagccctggggattatatctgcaagaagggagatattgggaaggagatgtacatcatcaacgagggcaagctggccgtggtggctgatgatggggtcacccagttcgtggtcctcagcgatggcagctacttcggggagatcagcattctgaacatcaaggggagcaagtcggggaaccgcaggacggccaacatccgcagcattggctactcagacctgttctgcctctcaaaggacgatctcatggaggccctcaccgagtaccccgaagccaagaaggccctggaggagaaaggacggcagatcctgatgaaagacaacctgatcgatgaggagctggccagggcgggcgcggaccccaaggaccttgaggagaaagtggagcagctggggtcctccctggacaccctgcagaccaggtttgcacgcctcctggctgagtacaacgccacccagatgaagatgaagcagcgtctcagccaactggaaagccaggtgaagggtggtggggacaagcccctggctgatggggaagttcccggggatgctacaaaaacagaggacaaacaacagtgaaaatgcagcatctgtctcctgcttcacagggtcgactgtcagggtgaccgtatgtggccgcagctgtgtggcatggaacttggtcagggttgaattccagctctactcaccctttgaaagctgtgtgactgcctgagagaacctgtttcttcacctaaaaaatgggactttttgtctcagtcccagtgaagtgccaggtttgattgtgaagtccgcatgaaacactgcaccaggcagggctttgcaaagtgcaaggtatccccagtccaagtatatgaaaacgtgcacacaggactctcattacttttttatggaatctgcaaggtgtttttaggctttttaatctgattttcttataaatgaaagattatttagtcacctttctcctgtccaacttcaccaccacctgataatgggtatataacaggaagctgaaggtacaacatagtgactaaaattcagacttacacaagacagtttgaggcatatttcttaatctggtatcacctcgtgtgttctttggggccctagaaaccctggcttttgggagtgctatggcaagtagaagttctgccggatggaaagaggctgccccatttgaggtcatttaaaatctgtgaagcaaatccagactccttgccgttcagccactgtgaaaccagaatctgcttcacagaaaaaagcatctcagttaggagaagagacatcccctccttctcacttgccaaagagattcaaagacagcccctatcctccattcttgagtcagggccctaggtgacctattctaactcaaggaggagagctatgtacagggagagcattttagattgaaggttggaatggtgtactaaaccaaaaaagctgacaactgagagttttagaagattagaccattaggaacgtatctttgcaaactgcccattcacccatgaagaggaagcctcaagatcccttggaattgcatcccaaggcaaagcttttggctcaccgaaagctcacagattgcagaaattagcttttttaaaaaacaaaccccagtaaatataatttcattaacattttataacagatttatatttttgagttccgtgattgcaaattatgacctcaaattccatccttcacttatgtaacatgttgcaaattacccaaagatgagtctttcttctttctttcctttttcctttcttcttcctttccttttttctttcttcttccttctttcttcctttttctctctcctcttttcctcctcaaaatgtatatattttaaaagccttaactgttagttatgcctgcattcatatttgcacaggaaaaataaagacctggattt

SEQ ID NO: 123389 - DNA, 2615 bp, Homo sapiens
  Payload ID: 4227
  Gene Symbol: CNGA3
  Gene Name: cyclic nucleotide gated channel alpha 3
  Uniprot ID: Q16281
  ENST ID: ENST00000409937
  CDS Start-End: 142-2238
gaagatgaaattcagtaggcgagaagtgttggaaccaaaatcctcgttctggagtcattttatggaagcagctgctttggcttgaaatgagcccactcgtcaagtgaggagacatcgtcagtgctgcagccggggatcgccatggagaccagaggactggctgactccgggcagggctccttcaccggccaggggatcgccaggtttggaagaattcagaaaaaaagccaaccggagaaggtggtaagagcagccagccgtgggagacctttgattgggtggacacagtggtgtgctgaggatggtggtgatgagtctgaaatggctctggcagggtctcccgggtgctcgtctggaccccagggcaggctgtcgcgcctcatcttcttgctgcgcaggtgggctgccaggcatgtgcaccaccaggaccagggaccggactcttttcctgatcgtttccgtggagccgagcttaaggaggtgtccagccaagaaagcaatgcccaggcaaatgtgggcagccaggagccagcagacagagggagaagcgcctggcccctggccaaatgcaacactaacaccagcaacaacacggaggaggagaagaagacgaaaaagaaggatgcgatcgtggtggacccgtccagcaacctgtactaccgctggctgaccgccatcgccctgcctgtcttctataactggtatctgcttatttgcagggcctgtttcgatgagctgcagtccgagtacctgatgctgtggctggtcctggactactcggcagatgtcctgtatgtcttggatgtgcttgtacgagctcggacaggttttctcgagcaaggcttaatggtcagtgataccaacaggctgtggcagcattacaagacgaccacgcagttcaagctggatgtgttgtccctggtccccaccgacctggcttacttaaaggtgggcacaaactacccagaagtgaggttcaaccgcctactgaagttttcccggctctttgaattctttgaccgcacagagacaaggaccaactaccccaatatgttcaggattgggaacttggtcttgtacattctcatcatcatccactggaatgcctgcatctactttgccatttccaagttcattggttttgggacagactcctgggtctacccaaacatctcaatcccagagcatgggcgcctctccaggaagtacatttacagtctctactggtccaccttgacccttaccaccattggtgagaccccaccccccgtgaaagatgaggagtatctctttgtggtcgtagacttcttggtgggtgttctgatttttgccaccattgtgggcaatgtgggctccatgatctcgaatatgaatgcctcacgggcagagttccaggccaagattgattccatcaagcagtacatgcagttccgcaaggtcaccaaggacttggagacgcgggttatccggtggtttgactacctgtgggccaacaagaagacggtggatgagaaggaggtgctcaagagcctcccagacaagctgaaggctgagatcgccatcaacgtgcacctggacacgctgaagaaggttcgcatcttccaggactgtgaggcagggctgctggtggagctggtgctgaagctgcgacccactgtgttcagccctggggattatatctgcaagaagggagatattgggaaggagatgtacatcatcaacgagggcaagctggccgtggtggctgatgatggggtcacccagttcgtggtcctcagcgatggcagctacttcggggagatcagcattctgaacatcaaggggagcaagtcggggaaccgcaggacggccaacatccgcagcattggctactcagacctgttctgcctctcaaaggacgatctcatggaggccctcaccgagtaccccgaagccaagaaggccctggaggagaaaggacggcagatcctgatgaaagacaacctgatcgatgaggagctggccagggcgggcgcggaccccaaggaccttgaggagaaagtggagcagctggggtcctccctggacaccctgcagaccaggtttgcacgcctcctggctgagtacaacgccacccagatgaagatgaagcagcgtctcagccaactggaaagccaggtgaagggtggtggggacaagcccctggctgatggggaagttcccggggatgctacaaaaacagaggacaaacaacagtgaaaatgcagcatctgtctcctgcttcacagggtcgactgtcagggtgaccgtatgtggccgcagctgtgtggcatggaacttggtcagggttgaattccagctctactcaccctttgaaagctgtgtgactgcctgagagaacctgtttcttcacctaaaaaatgggactttttgtctcagtcccagtgaagtgccaggtttgattgtgaagtccgcatgaaacactgcaccaggcagggctttgcaaagtgcaaggtatccccagtccaagtatatgaaaacgtgcacacaggactctcattacttttttatggaatctgcaaggtgtttttaggctttttaatctgattttcttataaatgaaagattatttagtc

SEQ ID NO: 123390 - DNA, 2504 bp, Homo sapiens
  Payload ID: 4227
  Gene Symbol: CNGA3
  Gene Name: cyclic nucleotide gated channel alpha 3
  Uniprot ID: Q16281
  ENST ID: ENST00000436404
  CDS Start-End: 385-2415
aaaacatcccaggaaggagtccagggtggccgcccacagttaggagagaacccagaacggaacgacggacttgtttgctttcttgcccctgactctccccgtcctccctgggagggttggggatgtgaactaatgacttctgcctctttcggaccgcctttgaggctccagagcctcaccttactttcccacggagagggaggccacaggctccttcagcagtcgccgagcagagtcctgggccgggagcgcgggggagggagcgagcggaactgcgcctaggaggccgagggaggaggcgctccgcagaccctggcgcgccgcggagaagctcaaactttggcaggcaatcatctggggggctaaatgtgacaaaccgagaagatggccaagatcaacacccaatactcccacccctccaggacccacctcaaggtaaagacctcagaccgagatctcaatcgcgctgaaaatggcctcagcagagcccactcgtcaagtgaggagacatcgtcagtgctgcagccggggatcgccatggagaccagaggactggctgactccgggcagggctccttcaccggccaggggatcgccaggctgtcgcgcctcatcttcttgctgcgcaggtgggctgccaggcatgtgcaccaccaggaccagggaccggactcttttcctgatcgtttccgtggagccgagcttaaggaggtgtccagccaagaaagcaatgcccaggcaaatgtgggcagccaggagccagcagacagagggagaaggaagaagacgaaaaagaaggatgcgatcgtggtggacccgtccagcaacctgtactaccgctggctgaccgccatcgccctgcctgtcttctataactggtatctgcttatttgcagggcctgtttcgatgagctgcagtccgagtacctgatgctgtggctggtcctggactactcggcagatgtcctgtatgtcttggatgtgcttgtacgagctcggacaggttttctcgagcaaggcttaatggtcagtgataccaacaggctgtggcagcattacaagacgaccacgcagttcaagctggatgtgttgtccctggtccccaccgacctggcttacttaaaggtgggcacaaactacccagaagtgaggttcaaccgcctactgaagttttcccggctctttgaattctttgaccgcacagagacaaggaccaactaccccaatatgttcaggattgggaacttggtcttgtacattctcatcatcatccactggaatgcctgcatctactttgccatttccaagttcattggttttgggacagactcctgggtctacccaaacatctcaatcccagagcatgggcgcctctccaggaagtacatttacagtctctactggtccaccttgacccttaccaccattggtgagaccccaccccccgtgaaagatgaggagtatctctttgtggtcgtagacttcttggtgggtgttctgatttttgccaccattgtgggcaatgtgggctccatgatctcgaatatgaatgcctcacgggcagagttccaggccaagattgattccatcaagcagtacatgcagttccgcaaggtcaccaaggacttggagacgcgggttatccggtggtttgactacctgtgggccaacaagaagacggtggatgagaaggaggtgctcaagagcctcccagacaagctgaaggctgagatcgccatcaacgtgcacctggacacgctgaagaaggttcgcatcttccaggactgtgaggcagggctgctggtggagctggtgctgaagctgcgacccactgtgttcagccctggggattatatctgcaagaagggagatattgggaaggagatgtacatcatcaacgagggcaagctggccgtggtggctgatgatggggtcacccagttcgtggtcctcagcgatggcagctacttcggggagatcagcattctgaacatcaaggggagcaagtcggggaaccgcaggacggccaacatccgcagcattggctactcagacctgttctgcctctcaaaggacgatctcatggaggccctcaccgagtaccccgaagccaagaaggccctggaggagaaaggacggcagatcctgatgaaagacaacctgatcgatgaggagctggccagggcgggcgcggaccccaaggaccttgaggagaaagtggagcagctggggtcctccctggacaccctgcagaccaggtttgcacgcctcctggctgagtacaacgccacccagatgaagatgaagcagcgtctcagccaactggaaagccaggtgaagggtggtggggacaagcccctggctgatggggaagttcccggggatgctacaaaaacagaggacaaacaacagtgaaaatgcagcatctgtctcctgcttcacagggtcgactgtcagggtgaccgtatgtggccgcagctgtgtggcatggaacttggtcaggg

SEQ ID NO: 123391 - DNA, 1863 bp, Homo sapiens
  Payload ID: 4228
  Gene Symbol: CNGA4
  Gene Name: cyclic nucleotide gated channel alpha 4
  Uniprot ID: Q8IV77
  ENST ID: ENST00000379936
  CDS Start-End: 116-1843
agaagcccaacagcagcctccttcaggcagtcaggcactagtgcccaactccagaagtcccctacaggcagagagggtgtggacatctcacaccccagcaccagaccacagaaccatgagccaggacaccaaagtgaagacaacagagtccagtcccccagccccatccaaggccaggaagttgctgcctgtcctggacccatctggggattactactactggtggctgaacacaatggtcttcccagtcatgtataacctcatcatcctcgtgtgcagagcctgcttccccgacttgcagcacggttatctggtggcctggttggtgctggactacacgagtgacctgctatacctactagacatggtggtgcgcttccacacaggattcttggaacagggcatcctggtggtggacaagggtaggatctcgagtcgctacgttcgcacctggagtttcttcttggacctggcttccctgatgcccacagatgtggtctacgtgcggctgggcccgcacacacccaccctgaggctgaaccgctttctccgcgcgccccgcctcttcgaggccttcgaccgcacagagacccgcacagcttacccaaatgcctttcgcattgccaagctgatgctttacatttttgtcgtcatccattggaacagctgcctatactttgccctatcccggtacctgggcttcgggcgtgacgcatgggtgtacccggaccccgcgcagcctggctttgagcgcctgcggcgccagtacctctatagcttttacttctccacgctgatactgactacagtgggcgatacaccgccgccagccagggaagaagagtacctcttcatggtgggcgacttcctgctggccgtcatgggtttcgccaccatcatgggtagcatgagctctgtcatctacaacatgaacactgcagatgcggctttctacccagatcatgcactggtgaagaagtacatgaagctgcagcacgtcaaccgcaagctggagcggcgagttattgactggtatcagcacctgcagatcaacaagaagatgaccaacgaggtagccatcttacagcacttgcctgagcggctgcgggcagaagtggctgtgtctgtgcacctgtccactctgagccgggtgcagatctttcagaactgtgaggccagcctgctggaggagctggtgctgaagctgcagccccagacctactcaccaggtgaatatgtatgccgcaaaggagacattggccaagagatgtacatcatccgagagggtcaactggccgtggtggcagatgatggtatcacacagtatgctgtgctcggtgcagggctctactttggggagatcagcatcatcaacatcaaagggaacatgtctgggaaccgccgcacagccaacatcaagagcctaggttattcagacctattctgcctgagcaaggaggacctgcgggaggtgctgagcgagtatccacaagcacagaccatcatggaggagaaaggacgtgagatcctgctgaaaatgaacaagttggacgtgaatgctgaggcagctgagatcgccctgcaggaggccacagagtcccggctacgaggcctagaccagcagctggatgatctacagaccaagtttgctcgcctcctggctgagctggagtccagcgcacttaagattgcttaccgcattgaacggctggagtggcagactcgagagtggccaatgcccgaggacctggctgaggctgatgacgagggtgagcctgaggagggaacttccaaagatgaagagggcagggccagccaggagggacccccaggtccagagtgaccccatccccatccccagga

SEQ ID NO: 123392 - DNA, 936 bp, Homo sapiens
  Payload ID: 4228
  Gene Symbol: CNGA4
  Gene Name: cyclic nucleotide gated channel alpha 4
  ENST ID: ENST00000533426
  CDS Start-End: 152-829
gcttgtttcctggcaacggctaaacgcaagggcggggtcgccgacggctatccgagggaggagcaccgcctctcctcttggttccgtcccttcgaagttgctgcctgtcctggacccatctggggattactactactggtggctgaacacaatggtcttcccagtcatgtataacctcatcatcctcgtgtgcagagcctgcttccccgacttgcagcacggttatctggtggcctggttggtgctggactacacgagtgacctgctatacctactagacatggtggtgcgcttccacacagatcatgcactggtgaagaagtacatgaagctgcagcacgtcaaccgcaagctggagcggcgagttattgactggtatcagcacctgcagatcaacaagaagatgaccaacgaggtagccatcttacagcacttgcctgagcggctgcgggcagaagtggctgtgtctgtgcacctgtccactctgagccgggtgcagatctttcagaactgtgaggccagcctgctggaggagctggtgctgaagctgcagccccagacctactcaccaggtgaatatgtatgccgcaaaggagacattggccaagagatgtacatcatccgagagggtcaactggccgtggtggcagatgatggtatcacacagtatgctgtgctcggtgcagggctctactttggggagatcagcatcatcaacatcaaaggtgggtatcccagtatttgttccagggacaaggatgggtggggtaggggggaacagcagagcccagtgctgggaccagatagtacttcaggcctaaacttctgattgaggaaacctggcccttctctgagtcactagatggctcaggagaaaaacaacacatagaggatccattccctgagaagaagctgagccaaggccagtgaacaggg

SEQ ID NO: 123393 - DNA, 5641 bp, Homo sapiens
  Payload ID: 4229
  Gene Symbol: CNGB1
  Gene Name: cyclic nucleotide gated channel beta 1
  Uniprot ID: Q14028
  ENST ID: ENST00000251102
  CDS Start-End: 62-3817
ctacgagtggcagcaagaaggcaattcctggctggcggttggcatctaagcaggcatcaggatgttgggctgggtccagagggtgctgcctcagcccccagggacccctcggaagaccaagatgcaggaggaagaggaagtggaaccagagccagagatggaggcggaggtggaaccagaaccgaatcctgaggaggccgagacagagtccgagtccatgccccccgaagagtcattcaaggaggaggaagtggctgtggcagacccaagccctcaggagaccaaggaggctgcccttacttccaccatatccctccgggcccagggcgctgagatttctgaaatgaatagtcccagccgcagggtactgacctggctcatgaagggcgtagagaaggtgatcccgcagcctgttcacagcatcacggaggacccggctcagatcctggggcatggcagcactggggacacagggtgcacagatgaacccaatgaggcccttgaggcccaagacactaggcctgggctgcggctgcttctgtggctggagcagaatctggaaagagtgcttcctcagccccccaaatcctctgaggtctggagagatgagcctgcagttgctacaggtgctgcctcagacccagcgcctccaggacgcccccaggaaatggggcccaagctgcaggcccgggagaccccctccctgcccacacccatccccctgcagcccaaggaggaacccaaggaggcaccagctccagagccccagcccggctcccaggcccagacctcctccctgccaccaaccagggaccctgccaggctggtggcatgggtcctgcacaggctggagatggccttgccgcagccagtgctacatgggaaaataggggaacaggagcctgactcccctgggatatgtgatgtgcagaccatcagcatccttcctggaggacaagtggagcctgaccttgtcctagaggaggttgaaccgccctgggaggatgcccaccaggatgtcagtaccagcccacagggtacagaggtggttccagcttatgaagaagagaacaaagctgtggagaagatgcccagagagctgtcccggattgaagaggagaaagaagatgaggaggaggaagaggaagaggaggaggaggaggaagaggaggaggtgactgaggtgctgctggatagctgtgtggtgtcgcaggtgggcgtgggccagagtgaagaagacgggacccggccccagagcacttcagatcagaagctgtgggaggaagttggggaggaggccaagaaggaggctgaagagaaggccaaggaggaggccgaggaggtggctgaagaggaggctgaaaaggagccccaggactgggcggagaccaaggaggagcctgaggctgaggccgaggctgccagttcaggagtgcctgccacgaaacagcacccagaagtgcaggtggaagatactgatgctgatagctgccccctcatggcagaagagaatccaccctcaaccgtgttgccgccaccgtctcctgccaaatcagacacccttatagtcccaagctcagcctcggggacacacaggaagaagctgccctctgaggatgatgaggctgaagagctcaaggcgttgtcaccagcagagtccccagtggttgcctggtctgaccccaccaccccgaaggacactgatggccaggaccgtgcggcctccacggccagcacaaatagcgccatcatcaacgaccggctccaggagctggtgaagctcttcaaggagcggacagagaaagtgaaggagaaactcattgaccctgacgtcacctctgatgaggagagccccaagccctccccagccaagaaagccccagagccagctccagacacaaagcccgctgaagccgagccagtggaagaggagcactattgcgacatgctctgctgcaagttcaaacaccgcccctggaagaagtaccagtttccccagagcattgacccgctgaccaacctgatgtatgtcctatggctgttcttcgtggtgatggcctggaattggaactgttggctgattcccgtgcgctgggccttcccctaccagaccccggacaacatccaccactggctgctgatggattacctatgcgacctcatctacttcctggacatcaccgtgttccagacacgcctgcagtttgtcagaggcggggacatcattacggacaaaaaggacatgcgaaataactacctgaagtctcgccgcttcaagatggacctgctcagcctcctgcccttggattttctctatttgaaagtcggtgtgaaccccctcctccgcctgccccgctgtttaaagtacatggccttcttcgagtttaacagccgcctggaatccatcctcagcaaagcctacgtgtacagggtcatcaggaccacagcctaccttctctacagcctgcatttgaattcctgtctttattactgggcatcggcctatcagggcctcggctccactcactgggtttacgatggcgtgggaaacagttatattcgctgttactactttgctgtgaagaccctcatcaccatcggggggctgcctgaccccaagacactctttgaaattgtcttccagctgctgaattatttcacgggcgtctttgctttctctgtgatgatcggacagatgagagatgtggtaggggccgccaccgccggacagacctactaccgcagctgcatggacagcacggtgaagtacatgaatttctacaagatccccaagtccgtgcagaaccgcgtcaagacctggtacgagtacacctggcactcgcaaggcatgctggatgagtcagagctgatggtgcagcttccagacaagatgcggctggacctcgccatcgacgtgaactacaacatcgttagcaaagtcgcactctttcagggctgtgaccggcagatgatctttgacatgctgaagaggcttcgctctgttgtctacctgcccaacgactatgtgtgcaagaagggggagatcggccgtgagatgtacatcatccaggcagggcaagtgcaggtcttgggcggccctgatgggaaatctgtgctggtgacgctgaaagctggatctgtgtttggagaaataagcttgctggctgttgggggcgggaaccggcgcacggccaacgtggtggcgcacgggtttaccaacctcttcatcctggataagaaggacctgaatgagattttggtgcattatcctgagtctcagaagttactccggaagaaagccaggcgcatgctgagaagcaacaataagcccaaggaggagaagagcgtgctgatccttccaccccgggcgggcaccccaaagctcttcaacgctgccctcgctatgacaggaaagatgggtggcaagggggcaaaaggcggcaaacttgctcacctccgggcccggctcaaagaactggccgcgctggaggcggctgcaaagcagcaagagttggtggaacaggccaagagctcgcaagacgtcaagggagaggaaggctccgccgccccagaccagcacacgcacccaaaggaggccgccaccgacccacccgcgccccggacgccccccgagcccccggggtctccaccgagctctccaccgcctgcctcccttgggaggccggagggagaggaggaggggccggccgagcccgaagagcactcggtgaggatctgcatgagcccgggcccggagccgggagagcagatcctgtcggtgaagatgccggaggaaagggaggagaaggcggagtaaggtggggtgaggcggatcccgcgcgcagttccagcaggtgtgtccccagcgcccgctgcgcccctgcgccccagcgccccaccttcccccacggctcaagagaagatgcttttccgtagtcgtgacctcagtggctgcagctctgaccgtcccgccagcacgccagccccgactcagctcctcgcggggctgggcctgagctcgacaagttgcatcaagtgttcgagtccctgagctctcactatcatttgagagccctaccttttcctgactgttcctctttttaagaacaaaatgattttccacttttaaagttcatgggtgagggataaaatgaggctccaatacatgggaagctttgctgaaaaagtaaagtgttattgaatgtgtggggtttcccctcaggaatttgtctaacacatttcaaggatagaaaatacttcactgccgggcatggtggctcatgcctataatcccagtgctttgggaagccgaagcaggaggatcactggaggccaagagttggagagcagactgggcaacatagcgagacctcatctcaaacaaaaacaaaaacaaacaaaaaaacaatagccaggcgtgatggtgtgcacctgtagtcccagctactggagaggttgaggcaggaggatggcttgagcccaggagtttctggctgcagtgagctggacacagtgagaccctgtctcaaaaaaactaaaagatagccctgcacagtggttcacatctgcaatcccagcagtttgggaagctgagatgggaggattgtttgagaccaggagttcaagaccagcctgggcaacatattgagaccccatctctacaaaacagcagcagaaacaaaagcaaacaacaacaacgtacacaaacaaaaaaacaaagaaaggagggcagcccgagctgttcagctgagaattgccatggttctgagctgagcttgggacgcggttttcctttgcgggcaatcacagtagggggctagatgcccattaaggtagttagtgcttatcttccccagactctattcaattccaatgcaatgccattatctcagaacagatagaagggaaatggacttactggccaggagctgctagcgtttctgcctctgccaggaggaacagcccggtaggagcatcctctgcctgtcatcctgagaaaccccattcgccagcagggatcagtccgttactcacttttgacactctcgctgtagagatggtggcagcaacttcaattaatcctagaaaatgaaatctcccagctgatgacagcacttacattccctaaagctttccagatcgtgtcatgttgcttttatgattcagacaaaaaaaaaaaaagaaaaaagaaaaaaaaagaaaaaagggtcattcagggaatgaatatttatcaagaggattttatttgcataccaaatggctcttgggggagtgagtgattaaaaacaaaatctagtattctagtattaggccatttgtttccacctgcaacagtgaacataaaggacctggaattccaataggtcctgcccattttatataaaattacaggaaaatgtgagctgctcagaggcctttgaaggtttgcaaatgtctgtatgtatttgtccatccactaaaaacaacattcatttccactgtggaaaaatgaaagaatgtgggagtccccaggctggtctaagcatttccaaaccccagagtcagaaacagatttgtctagttgatggcttgtcacgtgatccgggtaatcatcacattgaatatagtgatgattgaccttattattttaccctattttttt

SEQ ID NO: 123394 - DNA, 1633 bp, Homo sapiens
  Payload ID: 4229
  Gene Symbol: CNGB1
  Gene Name: cyclic nucleotide gated channel beta 1
  Uniprot ID: Q14028
  ENST ID: ENST00000311183
  CDS Start-End: 66-965
ccagctacgagtggcagcaagaaggcaattcctggctggcggttggcatctaagcaggcatcaggatgttgggctgggtccagagggtgctgcctcagcccccagggacccctcggaagaccaagatgcaggaggaagaggaagtggaaccagagccagagatggaggcggaggtggaaccagaaccgaatcctgaggaggccgagacagagtccgagtccatgccccccgaagagtcattcaaggaggaggaagtggctgtggcagacccaagccctcaggagaccaaggaggctgcccttacttccaccatatccctccgggcccagggcgctgagatttctgaaatgaatagtcccagccgcagggtactgacctggctcatgaagggcgtagagaaggtgatcccgcagcctgttcacagcatcacggaggacccggctcagatcctggggcatggcagcactggggacacagggtgcacagatgaacccaatgaggcccttgaggcccaagacactaggcctgggctgcggctgcttctgtggctggagcagaatctggaaagagtgcttcctcagccccccaaatcctctgaggtctggagagatgagcctgcagttgctacaggtgctgcctcagacccagcgcctccaggacgcccccaggaaatggggcccaagctgcaggcccgggagaccccctccctgcccacacccatccccctgcagcccaaggaggaacccaaggaggcaccagctccagagccccagcccggctcccaggcccagacctcctccctgccaccaaccagggaccctgccaggctggtggcatgggtcctgcacaggctggagatggccttgccgcagccagtgctacatgggaaaataggggaacaggagcctgactcccctgggatatgtgatgtgcagaccagggtgatgggagctggaggtctctgaaataagggagaagggaatctgggagagctcagatggacacatggatggaaggaaagaaggatgccctgaagagaagaccttcccgggggaggtggccactgacaccccaccctatttgaacagcgaacccctccctctccacacactcccaggcaggacaaggggagccagagtcacctgcaccagccccagagcctcccagaccagaacaaggggaaggccagccatgggcagcctgcaagatttaggctagacagcaggacttacccccagagggctgtggaaaaggcccatagccgggcgtggtggctcacgcctgtaatcccagcactttgggaggctgaggcaggaggattgcttgagccccgaagttcgagaccaccgtgggcaacacagtgagaccctgtctctaaaaaaccttttttaaattaataaattaaaaagccccatggatggaggactcagtattgagcatctctttgagaggacgcgtgcacagcccccagtgtggtacctggcaccgtcagcacctcgacaggatacagtttttcccagaagaggttctccctaggcctggccacactctctccttccaaggcttggggacaccaatgagcagcaacaaatgttttcattaacattaaaagagtgtaaatgagcacatcaaa

SEQ ID NO: 123395 - DNA, 4364 bp, Homo sapiens
  Payload ID: 4229
  Gene Symbol: CNGB1
  Gene Name: cyclic nucleotide gated channel beta 1
  Uniprot ID: Q14028
  ENST ID: ENST00000564448
  CDS Start-End: 62-3799
ctacgagtggcagcaagaaggcaattcctggctggcggttggcatctaagcaggcatcaggatgttgggctgggtccagagggtgctgcctcagcccccagggacccctcggaagaccaagatgcaggaggaagaggaagtggaaccagagccagagatggaggcggaggtggaaccagaaccgaatcctgaggaggccgagacagagtccgagtccatgccccccgaagagtcattcaaggaggaggaagtggctgtggcagacccaagccctcaggagaccaaggaggctgcccttacttccaccatatccctccgggcccagggcgctgagatttctgaaatgaatagtcccagccgcagggtactgacctggctcatgaagggcgtagagaaggtgatcccgcagcctgttcacagcatcacggaggacccggctcagatcctggggcatggcagcactggggacacagggtgcacagatgaacccaatgaggcccttgaggcccaagacactaggcctgggctgcggctgcttctgtggctggagcagaatctggaaagagtgcttcctcagccccccaaatcctctgaggtctggagagatgagcctgcagttgctacagcgcctccaggacgcccccaggaaatggggcccaagctgcaggcccgggagaccccctccctgcccacacccatccccctgcagcccaaggaggaacccaaggaggcaccagctccagagccccagcccggctcccaggcccagacctcctccctgccaccaaccagggaccctgccaggctggtggcatgggtcctgcacaggctggagatggccttgccgcagccagtgctacatgggaaaataggggaacaggagcctgactcccctgggatatgtgatgtgcagaccatcagcatccttcctggaggacaagtggagcctgaccttgtcctagaggaggttgaaccgccctgggaggatgcccaccaggatgtcagtaccagcccacagggtacagaggtggttccagcttatgaagaagagaacaaagctgtggagaagatgcccagagagctgtcccggattgaagaggagaaagaagatgaggaggaggaagaggaagaggaggaggaggaggaagaggaggaggtgactgaggtgctgctggatagctgtgtggtgtcgcaggtgggcgtgggccagagtgaagaagacgggacccggccccagagcacttcagatcagaagctgtgggaggaagttggggaggaggccaagaaggaggctgaagagaaggccaaggaggaggccgaggaggtggctgaagaggaggctgaaaaggagccccaggactgggcggagaccaaggaggagcctgaggctgaggccgaggctgccagttcaggagtgcctgccacgaaacagcacccagaagtgcaggtggaagatactgatgctgatagctgccccctcatggcagaagagaatccaccctcaaccgtgttgccgccaccgtctcctgccaaatcagacacccttatagtcccaagctcagcctcggggacacacaggaagaagctgccctctgaggatgatgaggctgaagagctcaaggcgttgtcaccagcagagtccccagtggttgcctggtctgaccccaccaccccgaaggacactgatggccaggaccgtgcggcctccacggccagcacaaatagcgccatcatcaacgaccggctccaggagctggtgaagctcttcaaggagcggacagagaaagtgaaggagaaactcattgaccctgacgtcacctctgatgaggagagccccaagccctccccagccaagaaagccccagagccagctccagacacaaagcccgctgaagccgagccagtggaagaggagcactattgcgacatgctctgctgcaagttcaaacaccgcccctggaagaagtaccagtttccccagagcattgacccgctgaccaacctgatgtatgtcctatggctgttcttcgtggtgatggcctggaattggaactgttggctgattcccgtgcgctgggccttcccctaccagaccccggacaacatccaccactggctgctgatggattacctatgcgacctcatctacttcctggacatcaccgtgttccagacacgcctgcagtttgtcagaggcggggacatcattacggacaaaaaggacatgcgaaataactacctgaagtctcgccgcttcaagatggacctgctcagcctcctgcccttggattttctctatttgaaagtcggtgtgaaccccctcctccgcctgccccgctgtttaaagtacatggccttcttcgagtttaacagccgcctggaatccatcctcagcaaagcctacgtgtacagggtcatcaggaccacagcctaccttctctacagcctgcatttgaattcctgtctttattactgggcatcggcctatcagggcctcggctccactcactgggtttacgatggcgtgggaaacagttatattcgctgttactactttgctgtgaagaccctcatcaccatcggggggctgcctgaccccaagacactctttgaaattgtcttccagctgctgaattatttcacgggcgtctttgctttctctgtgatgatcggacagatgagagatgtggtaggggccgccaccgccggacagacctactaccgcagctgcatggacagcacggtgaagtacatgaatttctacaagatccccaagtccgtgcagaaccgcgtcaagacctggtacgagtacacctggcactcgcaaggcatgctggatgagtcagagctgatggtgcagcttccagacaagatgcggctggacctcgccatcgacgtgaactacaacatcgttagcaaagtcgcactctttcagggctgtgaccggcagatgatctttgacatgctgaagaggcttcgctctgttgtctacctgcccaacgactatgtgtgcaagaagggggagatcggccgtgagatgtacatcatccaggcagggcaagtgcaggtcttgggcggccctgatgggaaatctgtgctggtgacgctgaaagctggatctgtgtttggagaaataagcttgctggctgttgggggcgggaaccggcgcacggccaacgtggtggcgcacgggtttaccaacctcttcatcctggataagaaggacctgaatgagattttggtgcattatcctgagtctcagaagttactccggaagaaagccaggcgcatgctgagaagcaacaataagcccaaggaggagaagagcgtgctgatccttccaccccgggcgggcaccccaaagctcttcaacgctgccctcgctatgacaggaaagatgggtggcaagggggcaaaaggcggcaaacttgctcacctccgggcccggctcaaagaactggccgcgctggaggcggctgcaaagcagcaagagttggtggaacaggccaagagctcgcaagacgtcaagggagaggaaggctccgccgccccagaccagcacacgcacccaaaggaggccgccaccgacccacccgcgccccggacgccccccgagcccccggggtctccaccgagctctccaccgcctgcctcccttgggaggccggagggagaggaggaggggccggccgagcccgaagagcactcggtgaggatctgcatgagcccgggcccggagccgggagagcagatcctgtcggtgaagatgccggaggaaagggaggagaaggcggagtaaggtggggtgaggcggatcccgcgcgcagttccagcaggtgtgtccccagcgcccgctgcgcccctgcgccccagcgccccaccttcccccacggctcaagagaagatgcttttccgtagtcgtgacctcagtggctgcagctctgaccgtcccgccagcacgccagccccgactcagctcctcgcggggctgggcctgagctcgacaagttgcatcaagtgttcgagtccctgagctctcactatcatttgagagccctaccttttcctgactgttcctctttttaagaacaaaatgattttccacttttaaagttcatgggtgagggataaaatgaggctccaatacatgggaagctttgctgaaaaagtaaagtgttattgaatgtgtggggtttcccctcaggaatttgtctaacacatttcaaggatagaaaatacttcactgccgggcatggtggctcatgcctataatcccagtgctttgggaagccgaagcaggaggatcactggaggccaagagttggagagcagactgggcaacatagcgagacctcatctcaaac

SEQ ID NO: 123396 - DNA, 709 bp, Homo sapiens
  Payload ID: 4229
  Gene Symbol: CNGB1
  Gene Name: cyclic nucleotide gated channel beta 1
  ENST ID: ENST00000562761
  CDS Start-End: 67-709
aagtggcgggagctactgtgagtgctccagggagggctaaggactctgtctcctacaggcatcaggatgttgggctgggtccagagggtgctgcctcagcccccagggacccctcggaagaccaagatgcaggaggaagaggaagtggaaccagagccagagatggaggcggaggtggaaccagaaccgaatcctgaggaggccgagacagagtccgagtccatgccccccgaagagtcattcaaggaggaggaagtggctgtggcagacccaagccctcaggagaccaaggaggctgcccttacttccaccatatccctccgggcccagggcgctgagatttctgaaatgaatagtcccagccgcagggtactgacctggctcatgaagggcgtagagaaggtgatcccgcagcctgttcacagcatcacggaggacccggctcagatcctggggcatggcagcactggggacacagggtgcacagatgaacccaatgaggcccttgaggcccaagacactaggcctgggctgcggctgcttctgtggctggagcagaatctggaaagagtgcttcctcagccccccaaatcctctgaggtctggagagatgagcctgcagttgctacaggtgctgcctcagacccagcgcctccaggacgcccccaggaaatggggcccaagctgcaggcccgggagaccccctccc

SEQ ID NO: 123397 - DNA, 378 bp, Homo sapiens
  Payload ID: 4229
  Gene Symbol: CNGB1
  Gene Name: cyclic nucleotide gated channel beta 1
  ENST ID: ENST00000565942
  CDS Start-End: 1-378
caacgactatgtgtgcaagaagggggagatcggccgtgagatgtacatcatccaggcagggcaagtgcaggtcttgggcggccctgatgggaaatctgtgctggtgacgctgaaagctggatctgtgtttggagaaataagcttgctggctgttgggggcgggaaccggcgcacggccaacgtggtggcgcacgggtttaccaacctcttcatcctggataagaaggacctgaatgagattttggtgcattatcctgagtctcagaagttactccggaagaaagccaggccaagagctcgcaagacgtcaagggagaggaaggctccgccgccccagaccagcacacgcacccaaaggaggccgccaccgacccaccc

SEQ ID NO: 123398 - DNA, 4347 bp, Homo sapiens
  Payload ID: 4230
  Gene Symbol: CNGB3
  Gene Name: cyclic nucleotide gated channel beta 3
  Uniprot ID: Q9NQW8
  ENST ID: ENST00000320005
  CDS Start-End: 49-2478
aaggcacagtcataaatacagagggttttcagaaccacctcagagaagatgtttaaatcgctgacaaaagtcaacaaggtgaagcctataggagagaacaatgagaatgaacaaagttctcgtcggaatgaagaaggctctcacccaagtaatcagtctcagcaaaccacagcacaggaagaaaacaaaggtgaagagaaatctctcaaaaccaagtcaactccagtcacgtctgaagagccacacaccaacatacaagacaaactctccaagaaaaattcctctggagatctgaccacaaaccctgaccctcaaaatgcagcagaaccaactggaacagtgccagagcagaaggaaatggaccccgggaaagaaggtccaaacagcccacaaaacaaaccgcctgcagctcctgttataaatgagtatgccgatgcccagctacacaacctggtgaaaagaatgcgtcaaagaacagccctctacaagaaaaagttggtagagggagatctctcctcacccgaagccagcccacaaactgcaaagcccacggctgtaccaccagtaaaagaaagcgatgataagccaacagaacattactacaggctgttgtggttcaaagtcaaaaagatgcctttaacagagtacttaaagcgaattaaacttccaaacagcatagattcatacacagatcgactctatctcctgtggctcttgcttgtcactcttgcctataactggaactgctgttttataccactgcgcctcgtcttcccatatcaaaccgcagacaacatacactactggcttattgcggacatcatatgtgatatcatctacctttatgatatgctatttatccagcccagactccagtttgtaagaggaggagacataatagtggattcaaatgagctaaggaaacactacaggacttctacaaaatttcagttggatgtcgcatcaataataccatttgatatttgctacctcttctttgggtttaatccaatgtttagagcaaataggatgttaaagtacacttcattttttgaatttaatcatcacctagagtctataatggacaaagcatatatctacagagttattcgaacaactggatacttgctgtttattctgcacattaatgcctgtgtttattactgggcttcaaactatgaaggaattggcactactagatgggtgtatgatggggaaggaaacgagtatctgagatgttattattgggcagttcgaactttaattaccattggtggccttccagaaccacaaactttatttgaaattgtttttcaactcttgaattttttttctggagtttttgtgttctccagtttaattggtcagatgagagatgtgattggagcagctacagccaatcagaactacttccgcgcctgcatggatgacaccattgcctacatgaacaattactccattcctaaacttgtgcaaaagcgagttcggacttggtatgaatatacatgggactctcaaagaatgctagatgagtctgatttgcttaagaccctaccaactacggtccagttagccctcgccattgatgtgaacttcagcatcatcagcaaagtcgacttgttcaagggttgtgatacacagatgatttatgacatgttgctaagattgaaatccgttctctatttgcctggtgactttgtctgcaaaaagggagaaattggcaaggaaatgtatatcatcaagcatggagaagtccaagttcttggaggccctgatggtactaaagttctggttactctgaaagctgggtcggtgtttggagaaatcagccttctagcagcaggaggaggaaaccgtcgaactgccaatgtggtggcccacgggtttgccaatcttttaactctagacaaaaagaccctccaagaaattctagtgcattatccagattctgaaaggatcctcatgaagaaagccagagtgcttttaaagcagaaggctaagaccgcagaagcaacccctccaagaaaagatcttgccctcctcttcccaccgaaagaagagacacccaaactgtttaaaactctcctaggaggcacaggaaaagcaagtcttgcaagactactcaaattgaagcgagagcaagcagctcagaagaaagaaaattctgaaggaggagaggaagaaggaaaagaaaatgaagataaacaaaaagaaaatgaagataaacaaaaagaaaatgaagataaaggaaaagaaaatgaagataaagataaaggaagagagccagaagagaagccactggacagacctgaatgtacagcaagtcctattgcagtggaggaagaaccccactcagttagaaggacagttttacccagagggacttctcgtcaatcactcattatcagcatggctccttctgctgagggcggagaagaggttcttactattgaagtcaaagaaaaggctaagcaataaatgtttgattatctttagatgtgatatagctagttcccaaagtgattgtacctaggattgtaacttaaattaacgaggggaaacgacatgctgggacccttgagaaacgaaaggcaaatccctagcttagtttctaggacttatctgagagtgtgatttcatgcagtggtaataagaagattattaaaagccatccctattctccgttttcattaactttatgcaattgctatatcttctaattgtatgtagtaagtttccttttcctttggttctttcctgatgatgtctcttccttccagttttattagcttgctcttggctgtgatgtgattcactaaccttttctcttaatttttattgtgtttaatttcttctttggcactctaaagcctggctaattgttctaggtttatgaatttcacctcttacatgtaaagggtataagattttaatgtaataggtcaaaaatcagattattttcattcaaatgaggatgatgagtcactgtaatatcaaaaaatccccagcagctgggactgaagggaagcagagatcatgaagctttctgaatgagaagtctgatttttggaacagtcccctgaagaccaatgttggtcggcagaattagcaaactggcaaaatcacattgcaggaacatattggaaaaattgtaccctttactaaagaaataaacttcaatattttctcttctaaccaacttaaaagacaccaatctacctaactcatctggctcaagggacttggactggaggatacaggctaaagtgacacttatcagaatcttcctcaagcacttgctggaaaagatatcagattggaacttcttgtttaaaattaagctttagtaaaacaaagtgatgaggttaggaaggcagactctacacatgtcagattgacatatccccacaatttccggaacctacatgtatagctgtttacaaaatctccaagttaattaagggcactttaggaagttgtcctcatgaattagctagcattagcataattaccgacgttgcatgctgtgaggaggctacaaaggccaggctggtgtcggaagtaataatacatatagaattccattctaataaatgccattagtgtataacatcaagttctgtgtaatgaggctatttccaagtctccaaagatggtcactgtaacagcactttgctgagagggttttaacaaatcatattagccaaaaagcctacaacatagatgcatttagcaaaccatgtacaaatcaatcactataataaactgcatcatttgatagagtcaccgtttttgcatgtagtgttagagtatcacaaaatataacaagttttactaaaggatggttggttttttcaggatttaagggaatatggacaaattgttaaatagtatttatttgataaatgggagtttgtatgcagaaagagtgaattgcgtataaaaagggtgatttaaaaacccagaaacaaaaggtagaatagggctgaagcatctgataataggaaaagaaaaggacaaaagtcctcaacttgtgagcaatatgctttccctttacaccctgtaatttattcaaatgatattaaaatacaagaccattgcaatttatgcttttcgcctggcagttattttcccccccaagctatcctgtttcagataatatcaatttatttccaatccatcagactaaaatctaagaaaattcaagaactcttttattgttgatttggtgccaccaaattctttttctttttaaatctttctaattatcctttctttttcaatcccattgctaacacccagaacatattttctgttcaatgcaaataaacattcactttttaccta

SEQ ID NO: 123399 - DNA, 500 bp, Homo sapiens
  Payload ID: 4230
  Gene Symbol: CNGB3
  Gene Name: cyclic nucleotide gated channel beta 3
  ENST ID: ENST00000517327
  CDS Start-End: 1-336
gcccacgggtttgccaatcttttaactctagacaaaaagaccctccaagaaattctagtgcattatccagattctgaaaggatcctcatgaagaaagccagagtgcttttaaagcagaaggctaagaccgcagaagcaacccctccaagaaaagatcttgccctcctcttcccaccgaaagaagagacacccaaactgtttaaaactctcctaggaggcacaggaaaagcaagtcttgcaagactactcaaattgaagcgagagcaagcagctcagggtcagttcttacctgtgtccttcactgctgggatattcttaggtcacctgagactctgaactggaataattgactctcttgctcctttcctctgccgtaggagcagcacatcccagataaggctgttccttcagcctgagtcccaatataagaaacatggagagaactccagcctagctgcatgtaaaatgagcaagaaataaactgttgtcattaaagccac

SEQ ID NO: 123400 - DNA, 1879 bp, Homo sapiens
  Payload ID: 4231
  Gene Symbol: CCNA1
  Gene Name: cyclin A1
  Uniprot ID: P78396
  ENST ID: ENST00000255465
  CDS Start-End: 265-1662
ccgcccttccgtgccctgcccttccctgcccttccccgccctgccccgcccggcccggcccggccctgcccaaccctgccccgccctgccccgcccagccggccacctcttaaccgcgatcctccagtgcacttgccagttgttccggacacatagaaagataacgacgggaagagcggggcccgctttggggtccaggcaggttttggggcctcctgtctggtgggaggaggccgcagcgcagcaccctgctcgtcacttgggatggagaccggctttcccgcaatcatgtaccctggatcttttattgggggctggggagaagagtatctcagctgggaaggaccggggctcccagatttcgtcttccagcagcagcccgtggagtctgaagcaatgcactgcagcaaccccaagagtggagttgtgctggctacagtggcccgaggtcccgatgcttgtcagatactcaccagagccccgctgggccaggatcccccgcagaggacagtgctagggctgctaactgcaaatgggcagtacaggaggacctgtggccaggggatcacaagaatcaggtgttattctggatcagaaaatgccttccctccagctggaaagaaagcactccctgactgtggggtccaagagccccccaagcaagggtttgacatctacatggatgaactagagcagggggacagagacagctgctcggtcagagaggggatggcatttgaggatgtgtatgaagtagacaccggcacactcaagtcagacctgcacttcctgctggatttcaacacagtttcccctatgctggtagattcatctctcctctcccagtctgaagatatatccagtcttggcacagatgtgataaatgtgactgaatatgctgaagaaatttatcagtaccttagggaagctgaaataaggcacagacccaaagcacactacatgaagaagcagccagacatcacggaaggcatgcgcacgattctggtggactggctggtggaggttggggaagaatataaacttcgagcagagaccctgtatctggctgtcaacttcctggacaggttcctttcatgtatgtctgttctgagagggaaactgcagctcgtaggaacagcagctatgcttttggcttcgaaatatgaagagatatatcctcctgaagtagacgagtttgtctatatcaccgatgatacatacacaaaacgacaactgttaaaaatggaacacttgcttctgaaagttctagcttttgatctgacagtaccaaccaccaaccagtttctccttcagtacttgaggcgacaaggagtgtgcgtcaggactgagaacctggctaagtacgtagcagagctgagtctacttgaagcagatccattcttgaaatatcttccttcactgatagctgcagcagctttttgcctggcaaactatactgtgaacaagcacttttggccagaaacccttgctgcatttacagggtattcattaagtgaaattgtgccttgcctgagtgagcttcataaagcgtaccttgatataccccatcgacctcagcaagcaattagggagaagtacaaggcttcaaagtacctgtgtgtgtccctcatggagccacctgcagttcttcttctacaataagtttctgaatggaagcacttccagaacttcacctccatatcagaagtgccaataatcgtcataggcttctgcacgttggatcaactaatgttgtttacaatatagatgacattttaaaaatgtaaatgaatttagtttcccttagactttagtagtttgtaatatagtccaacattttttaaacaataaactgcttgtcttatgaccatgtgttaga

SEQ ID NO: 123401 - DNA, 1758 bp, Homo sapiens
  Payload ID: 4231
  Gene Symbol: CCNA1
  Gene Name: cyclin A1
  Uniprot ID: P78396
  ENST ID: ENST00000440264
  CDS Start-End: 289-1554
gagacgttagagggggttgttagcggctgttgggagaacgggtcacggaaacagtcccttccaaagccggggccatcgtggggtgggcgagtccgccctcccaggccgggggcgcggaccagaggggacgtgtgcagacggccgcggtcagccccacctcgcccgggcggagacgcacagctggagctggagggccgtcgcccgttgggccctcaggggcctgaacgcccaggggtcgcggcgagtccacccggagcgagtcagcagcagcccgtggagtctgaagcaatgcactgcagcaaccccaagagtggagttgtgctggctacagtggcccgaggtcccgatgcttgtcagatactcaccagagccccgctgggccaggatcccccgcagaggacagtgctagggctgctaactgcaaatgggcagtacaggaggacctgtggccaggggatcacaagaatcaggtgttattctggatcagaaaatgccttccctccagctggaaagaaagcactccctgactgtggggtccaagagccccccaagcaagggtttgacatctacatggatgaactagagcagggggacagagacagctgctcggtcagagaggggatggcatttgaggatgtgtatgaagtagacaccggcacactcaagtcagacctgcacttcctgctggatttcaacacagtttcccctatgctggtagattcatctctcctctcccagtctgaagatatatccagtcttggcacagatgtgataaatgtgactgaatatgctgaagaaatttatcagtaccttagggaagctgaaataaggcacagacccaaagcacactacatgaagaagcagccagacatcacggaaggcatgcgcacgattctggtggactggctggtggaggttggggaagaatataaacttcgagcagagaccctgtatctggctgtcaacttcctggacaggttcctttcatgtatgtctgttctgagagggaaactgcagctcgtaggaacagcagctatgcttttggcttcgaaatatgaagagatatatcctcctgaagtagacgagtttgtctatatcaccgatgatacatacacaaaacgacaactgttaaaaatggaacacttgcttctgaaagttctagcttttgatctgacagtaccaaccaccaaccagtttctccttcagtacttgaggcgacaaggagtgtgcgtcaggactgagaacctggctaagtacgtagcagagctgagtctacttgaagcagatccattcttgaaatatcttccttcactgatagctgcagcagctttttgcctggcaaactatactgtgaacaagcacttttggccagaaacccttgctgcatttacagggtattcattaagtgaaattgtgccttgcctgagtgagcttcataaagcgtaccttgatataccccatcgacctcagcaagcaattagggagaagtacaaggcttcaaagtacctgtgtgtgtccctcatggagccacctgcagttcttcttctacaataagtttctgaatggaagcacttccagaacttcacctccatatcagaagtgccaataatcgtcataggcttctgcacgttggatcaactaatgttgtttacaatatagatgacattttaaaaatgtaaatgaatttagtttcccttagactttagtagtttgtaatatagtccaacattttttaaacaataaactgcttgtcttatg

SEQ ID NO: 123402 - DNA, 1699 bp, Homo sapiens
  Payload ID: 4231
  Gene Symbol: CCNA1
  Gene Name: cyclin A1
  Uniprot ID: P78396
  ENST ID: ENST00000625767
  CDS Start-End: 100-1494
gacgggaagagcggggcccgctttggggtccaggcaggttttggggcctcctgtctggtgggaggaggccgcagcgcagcaccctgctcgtcacttgggatggagaccggctttcccgcaatcatgtaccctggatcttttattgggggctggggagaagagtatctcagctgggaaggaccggggctcccagatttcgtcttccagcagcccgtggagtctgaagcaatgcactgcagcaaccccaagagtggagttgtgctggctacagtggcccgaggtcccgatgcttgtcagatactcaccagagccccgctgggccaggatcccccgcagaggacagtgctagggctgctaactgcaaatgggcagtacaggaggacctgtggccaggggatcacaagaatcaggtgttattctggatcagaaaatgccttccctccagctggaaagaaagcactccctgactgtggggtccaagagccccccaagcaagggtttgacatctacatggatgaactagagcagggggacagagacagctgctcggtcagagaggggatggcatttgaggatgtgtatgaagtagacaccggcacactcaagtcagacctgcacttcctgctggatttcaacacagtttcccctatgctggtagattcatctctcctctcccagtctgaagatatatccagtcttggcacagatgtgataaatgtgactgaatatgctgaagaaatttatcagtaccttagggaagctgaaataaggcacagacccaaagcacactacatgaagaagcagccagacatcacggaaggcatgcgcacgattctggtggactggctggtggaggttggggaagaatataaacttcgagcagagaccctgtatctggctgtcaacttcctggacaggttcctttcatgtatgtctgttctgagagggaaactgcagctcgtaggaacagcagctatgcttttggcttcgaaatatgaagagatatatcctcctgaagtagacgagtttgtctatatcaccgatgatacatacacaaaacgacaactgttaaaaatggaacacttgcttctgaaagttctagcttttgatctgacagtaccaaccaccaaccagtttctccttcagtacttgaggcgacaaggagtgtgcgtcaggactgagaacctggctaagtacgtagcagagctgagtctacttgaagcagatccattcttgaaatatcttccttcactgatagctgcagcagctttttgcctggcaaactatactgtgaacaagcacttttggccagaaacccttgctgcatttacagggtattcattaagtgaaattgtgccttgcctgagtgagcttcataaagcgtaccttgatataccccatcgacctcagcaagcaattagggagaagtacaaggcttcaaagtacctgtgtgtgtccctcatggagccacctgcagttcttcttctacaataagtttctgaatggaagcacttccagaacttcacctccatatcagaagtgccaataatcgtcataggcttctgcacgttggatcaactaatgttgtttacaatatagatgacattttaaaaatgtaaatgaatttagtttcccttagactttagtagtttgtaatatagtccaacattttttaaacaataaactgcttgtcttatga

SEQ ID NO: 123403 - DNA, 1751 bp, Homo sapiens
  Payload ID: 4231
  Gene Symbol: CCNA1
  Gene Name: cyclin A1
  Uniprot ID: P78396
  ENST ID: ENST00000630422
  CDS Start-End: 282-1547
acaatcttggctttcccgggccggcttcacgcagttgcgcaggagcccgcgggggaagacctctcgtggggacctcgagcacgacgtgcgaccctaaatccccacatctcctctgccgcctcgcaggccacatgcaccgggagccgggcggggcaggcgcggcccgcaaggacccccgcgatggagacgcaacactgccgcgactgcacttggggcagccccgccgcgtcccagccgcctcccggcaggaagcgtagcagcagcccgtggagtctgaagcaatgcactgcagcaaccccaagagtggagttgtgctggctacagtggcccgaggtcccgatgcttgtcagatactcaccagagccccgctgggccaggatcccccgcagaggacagtgctagggctgctaactgcaaatgggcagtacaggaggacctgtggccaggggatcacaagaatcaggtgttattctggatcagaaaatgccttccctccagctggaaagaaagcactccctgactgtggggtccaagagccccccaagcaagggtttgacatctacatggatgaactagagcagggggacagagacagctgctcggtcagagaggggatggcatttgaggatgtgtatgaagtagacaccggcacactcaagtcagacctgcacttcctgctggatttcaacacagtttcccctatgctggtagattcatctctcctctcccagtctgaagatatatccagtcttggcacagatgtgataaatgtgactgaatatgctgaagaaatttatcagtaccttagggaagctgaaataaggcacagacccaaagcacactacatgaagaagcagccagacatcacggaaggcatgcgcacgattctggtggactggctggtggaggttggggaagaatataaacttcgagcagagaccctgtatctggctgtcaacttcctggacaggttcctttcatgtatgtctgttctgagagggaaactgcagctcgtaggaacagcagctatgcttttggcttcgaaatatgaagagatatatcctcctgaagtagacgagtttgtctatatcaccgatgatacatacacaaaacgacaactgttaaaaatggaacacttgcttctgaaagttctagcttttgatctgacagtaccaaccaccaaccagtttctccttcagtacttgaggcgacaaggagtgtgcgtcaggactgagaacctggctaagtacgtagcagagctgagtctacttgaagcagatccattcttgaaatatcttccttcactgatagctgcagcagctttttgcctggcaaactatactgtgaacaagcacttttggccagaaacccttgctgcatttacagggtattcattaagtgaaattgtgccttgcctgagtgagcttcataaagcgtaccttgatataccccatcgacctcagcaagcaattagggagaagtacaaggcttcaaagtacctgtgtgtgtccctcatggagccacctgcagttcttcttctacaataagtttctgaatggaagcacttccagaacttcacctccatatcagaagtgccaataatcgtcataggcttctgcacgttggatcaactaatgttgtttacaatatagatgacattttaaaaatgtaaatgaatttagtttcccttagactttagtagtttgtaatatagtccaacattttttaaacaataaactgcttgtcttatg

SEQ ID NO: 123404 - DNA, 2797 bp, Homo sapiens
  Payload ID: 4232
  Gene Symbol: CCNA2
  Gene Name: cyclin A2
  Uniprot ID: P20248
  ENST ID: ENST00000274026
  CDS Start-End: 305-1603
catttcaatagtcgcgggatacttgaactgcaagaacagccgccgctccggcgggctgctcgctgcatctctgggcgtctttggctcgccacgctgggcagtgcctgcctgcgcctttcgcaacctcctcggccctgcgtggtctcgagctgggtgagcgagcgggcgggctggtaggctggcctgggctgcgaccggcggctacgactattctttggccgggtcggtgcgagtggtcggctgggcagagtgcacgctgcttggcgccgcaggctgatcccgccgtccactcccgggagcagtgatgttgggcaactctgcgccggggcctgcgacccgcgaggcgggctcggcgctgctagcattgcagcagacggcgctccaagaggaccaggagaatatcaacccggaaaaggcagcgcccgtccaacaaccgcggacccgggccgcgctggcggtactgaagtccgggaacccgcggggtctagcgcagcagcagaggccgaagacgagacgggttgcaccccttaaggatcttcctgtaaatgatgagcatgtcaccgttcctccttggaaagcaaacagtaaacagcctgcgttcaccattcatgtggatgaagcagaaaaagaagctcagaagaagccagctgaatctcaaaaaatagagcgtgaagatgccctggcttttaattcagccattagtttacctggacccagaaaaccattggtccctcttgattatccaatggatggtagttttgagtcaccacatactatggacatgtcaattatattagaagatgaaaagccagtgagtgttaatgaagtaccagactaccatgaggatattcacacataccttagggaaatggaggttaaatgtaaacctaaagtgggttacatgaagaaacagccagacatcactaacagtatgagagctatcctcgtggactggttagttgaagtaggagaagaatataaactacagaatgagaccctgcatttggctgtgaactacattgataggttcctgtcttccatgtcagtgctgagaggaaaacttcagcttgtgggcactgctgctatgctgttagcctcaaagtttgaagaaatataccccccagaagtagcagagtttgtgtacattacagatgatacctacaccaagaaacaagttctgagaatggagcatctagttttgaaagtccttacttttgacttagctgctccaacagtaaatcagtttcttacccaatactttctgcatcagcagcctgcaaactgcaaagttgaaagtttagcaatgtttttgggagaattaagtttgatagatgctgacccatacctcaagtatttgccatcagttattgctggagctgcctttcatttagcactctacacagtcacgggacaaagctggcctgaatcattaatacgaaagactggatataccctggaaagtcttaagccttgtctcatggaccttcaccagacctacctcaaagcaccacagcatgcacaacagtcaataagagaaaagtacaaaaattcaaagtatcatggtgtttctctcctcaacccaccagagacactaaatctgtaacaatgaaagactgcctttgttttctaagatgtaaatcactcaaagtatatggtgtacagtttttaacttaggttttaattttacaatcatttctgaatacagaagttgtggccaagtacaaattatggtatctattactttttaaatggttttaatttgtatatcttttgtatatgtatctgtcttagatatttggctaattttaagtggttttgttaaagtattaatgatgccagctgtcaggataataaattgatttggaaaactttgcaagtcaaatttaacttcttcaggattttgcttagtaaagaagtttacttggtttactatataatgggaagtgaaaagccttcctctaaaattaaagtaggtttaggaaaacagaccctcaaattctgacattcattttcctaagcaactggatcaatttgctgacttgggcataatctaatctaagcatatctgaatacagtattcagagatagatacagtagagattccccagactttttcgctctttgtaaaacctgtttgtttaggttttgcgaggtaaactcaacagaggttgggagtggaagagggtgggaagcttatatgcaaattaacagacgagaaatgctccagaaggtttattattttaaagcacattaaaaacaaaaaactatttttaaaatcctgctagattttataatggatttgtgaataaaaaatacccagggttctcagaatggaataaatatcccttttaatagttatatatacagatatacaactgttagctttaattggcagctctcttcttttttcttcttttcactggctttttacttggtgctttttcttgttttgcactggtggtctgtgttctgtgaataaagcaaagtaagaatttactaagagtatgttaagttttggattattgaaataagaggcatttcttagttttccagtaggatctaaaatgtgtcagctatgagtaagactggcatccaagaagtttatattatagatttaggtcctaatttttataaatcacaaggtaaaaaaatcacagaacagatggatctctaatgaaaaagggatgtctttttgtttatagtcatgtggcaagatgagagtaaaaccagagagcaaacctctataagtgttgagtatatgtatacatttgaaataaaccagaaatttgttacctta

SEQ ID NO: 123405 - DNA, 2797 bp, Homo sapiens
  Payload ID: 4232
  Gene Symbol: CCNA2
  Gene Name: cyclin A2
  Uniprot ID: P20248
  ENST ID: ENST00000618014
  CDS Start-End: 306-1604
ccatttcaatagtcgcgggatacttgaactgcaagaacagccgccgctccggcgggctgctcgctgcatctctgggcgtctttggctcgccacgctgggcagtgcctgcctgcgcctttcgcaacctcctcggccctgcgtggtctcgagctgggtgagcgagcgggcgggctggtaggctggcctgggctgcgaccggcggctacgactattctttggccgggtcggtgcgagtggtcggctgggcagagtgcacgctgcttggcgccgcaggctgatcccgccgtccactcccgggagcagtgatgttgggcaactctgcgccggggcctgcgacccgcgaggcgggctcggcgctgctagcattgcagcagacggcgctccaagaggaccaggagaatatcaacccggaaaaggcagcgcccgtccaacaaccgcggacccgggccgcgctggcggtactgaagtccgggaacccgcggggtctagcgcagcagcagaggccgaagacgagacgggttgcaccccttaaggatcttcctgtaaatgatgagcatgtcaccgttcctccttggaaagcaaacagtaaacagcctgcgttcaccattcatgtggatgaagcagaaaaagaagctcagaagaagccagctgaatctcaaaaaatagagcgtgaagatgccctggcttttaattcagccattagtttacctggacccagaaaaccattggtccctcttgattatccaatggatggtagttttgagtcaccacatactatggacatgtcaattatattagaagatgaaaagccagtgagtgttaatgaagtaccagactaccatgaggatattcacacataccttagggaaatggaggttaaatgtaaacctaaagtgggttacatgaagaaacagccagacatcactaacagtatgagagctatcctcgtggactggttagttgaagtaggagaagaatataaactacagaatgagaccctgcatttggctgtgaactacattgataggttcctgtcttccatgtcagtgctgagaggaaaacttcagcttgtgggcactgctgctatgctgttagcctcaaagtttgaagaaatataccccccagaagtagcagagtttgtgtacattacagatgatacctacaccaagaaacaagttctgagaatggagcatctagttttgaaagtccttacttttgacttagctgctccaacagtaaatcagtttcttacccaatactttctgcatcagcagcctgcaaactgcaaagttgaaagtttagcaatgtttttgggagaattaagtttgatagatgctgacccatacctcaagtatttgccatcagttattgctggagctgcctttcatttagcactctacacagtcacgggacaaagctggcctgaatcattaatacgaaagactggatataccctggaaagtcttaagccttgtctcatggaccttcaccagacctacctcaaagcaccacagcatgcacaacagtcaataagagaaaagtacaaaaattcaaagtatcatggtgtttctctcctcaacccaccagagacactaaatctgtaacaatgaaagactgcctttgttttctaagatgtaaatcactcaaagtatatggtgtacagtttttaacttaggttttaattttacaatcatttctgaatacagaagttgtggccaagtacaaattatggtatctattactttttaaatggttttaatttgtatatcttttgtatatgtatctgtcttagatatttggctaattttaagtggttttgttaaagtattaatgatgccagctgtcaggataataaattgatttggaaaactttgcaagtcaaatttaacttcttcaggattttgcttagtaaagaagtttacttggtttactatataatgggaagtgaaaagccttcctctaaaattaaagtaggtttaggaaaacagaccctcaaattctgacattcattttcctaagcaactggatcaatttgctgacttgggcataatctaatctaagcatatctgaatacagtattcagagatagatacagtagagattccccagactttttcgctctttgtaaaacctgtttgtttaggttttgcgaggtaaactcaacagaggttgggagtggaagagggtgggaagcttatatgcaaattaacagacgagaaatgctccagaaggtttattattttaaagcacattaaaaacaaaaaactatttttaaaatcctgctagattttataatggatttgtgaataaaaaatacccagggttctcagaatggaataaatatcccttttaatagttatatatacagatatacaactgttagctttaattggcagctctcttcttttttcttcttttcactggctttttacttggtgctttttcttgttttgcactggtggtctgtgttctgtgaataaagcaaagtaagaatttactaagagtatgttaagttttggattattgaaataagaggcatttcttagttttccagtaggatctaaaatgtgtcagctatgagtaagactggcatccaagaagtttatattatagatttaggtcctaatttttataaatcacaaggtaaaaaaatcacagaacagatggatctctaatgaaaaagggatgtctttttgtttatagtcatgtggcaagatgagagtaaaaccagagagcaaacctctataagtgttgagtatatgtatacatttgaaataaaccagaaatttgttacctt

SEQ ID NO: 123406 - DNA, 5959 bp, Homo sapiens
  Payload ID: 4233
  Gene Symbol: CNNM1
  Gene Name: cyclin and CBS domain divalent metal cation transport mediator 1
  Uniprot ID: Q9NRU3
  ENST ID: ENST00000356713
  CDS Start-End: 290-3145
acttttggagtaggaggccatgctgcaaacccagacttttcaggctgcatctcagatataccgaagtgtgtacccgctacgcacagtgcggtgatgcctggccacctccagcctccagcggggacctcctgcccaggtggagtctgaatgcccaccgccaccagcccacgcgcgcagtgggcgtacacgtggtgacctgcctgcggctgggttcccagctccggctcctcctccctccagctctcgctcggcttcctgcagtatcacgtgcagctgcgctgggtgcaggatggcggcggccgcggcggcggcagcagcggtgggtgtcaggctccgggactgctgcagccgaggcgctgtgctcctgctcttcttttccctgtctcctcggcccccggccgccgccgcctggctgctgggcctgcggcccgaggacactgctggaggccgcgtgtccctggaggggggcaccctgcgcgccgccgaaggcaccagcttcctcctgcgtgtctatttccagccaggaccgccggccaccgccgcaccggtgccctcaccgaccctcaactcgggggagaatggcaccggcgactgggctccgcggctcgtgttcatcgaggagcccccgggcggtggcggcgtggcccccagcgcggtccccactcgccccccgggaccgcagcgctgcagggagcagagcgactgggcatcggacgtggaagtcctggggcccttgcgtcccgggggcgtggcaggctcggccctggtccaggtgcgagtgcgggagctgcgcaagggcgaagcggagcggggcggcgcgggcggtggcgggaagctcttttcactctgcgcctgggatgggcgcgcgtggcaccaccacggcgccgccggcggcttcctgctgcgcgttcgcccgcggttgtacggcccaggcggggacctgctgccccctgcgtggctgcgggcgctcggggcgctcctgctgctagccttgtcggccctgttcagcggcctgcgcctgagcctgctgtcgctggacccggtggagttacgggtgctgcggaacagcggctcggccgccgagcaggagcaggcgcgccgcgtgcaggccgttcgcggcagggggacccatctgctctgcaccctactcctgggccaagccggagccaacgcggccctggctggctggctgtacacctcgctgccgccgggcttcgggggcaccggggaagactacagcgaagaggggatccacttcccgtggctgccggcgctcgtgtgcaccggcgcggtattcctgggcgccgaaatctgcccctactcagtgtgttcgcggcacgggctggccatcgcctcgcacagcgtgtgcctgacccggcttctgatggcagccgccttccccgtgtgctacccgctgggccgcctgctggactgggcgctgcgccaggagataagcaccttctacacgcgggagaagttgctggagacgttgcgggccgcagacccctacagtgacctggtgaaggaggagctcaacatcatacagggtgccctggagctgcgcaccaaagttgtggaggaggtgctgacccccctgggagactgcttcatgctgcgctcagacgcggtgctcgacttcgccactgtctccgagatcctgcgcagcggctacactcgcatcccagtgtacgagggtgaccagcggcacaacattgtggacattttatttgtcaaggacttggccttcgtggaccccgacgactgcaccccgctcctcactgtcacccgcttctacaaccggcccctgcattgtgttttcaatgacacccgactggacacggttctggaggagtttaagaagggaaaatctcacctggccattgtccagcgggtgaataatgagggagaaggggaccctttctatgaggtgatgggcattgtcacgctggaggatatcatagaggagattatcaagtcggagatcctggatgaaactgatctctacactgacaatcggaaaaagcagagggtcccgcaacgggagcggaagcggcatgacttctccttgtttaagctttcggacacggagatgcgggtgaagatctcaccacagcttctgctagccacacaccgcttcatggccacagaagtggagccctttaagtctctgtacctttcggagaagatcctgctccggctcctgaaacatcccaacgtgatccaggagctgaagtttgatgagaagaacaagaaggccccggaacactacctctaccagcgcaaccgccctgtggactactttgtgctgcttctacagggtaaagtggaggtggaggttggtaaggaaggccttcgctttgaaaatggagcctttacttactatggcgtcccagccatcatgaccactgcttgctcagataatgacgtgcggaaggttggaagtctggctggatcttctgtctttctaaaccggtccccttctcgctgcagtgggttgaatcgctctgagtctccaaaccgagagcgcagtgactttgggggcagcaacacccagctgtacagcagcagcaacaacctctacatgcctgactactcagtccacatcctcagcgatgtgcagtttgtgaagatcacacggcagcaatatcagaacgcactcactgcctgccacatggacagctcacctcagtcccctgacatggaggccttcacagacggggactccactaaggcccccacaacccggggcacaccccagacccctaaggatgaccccgccatcacgctcctcaacaacaggaacagcctgccgtgcagccgctcagacgggctgagaagccccagcgaggtagtgtacctgaggatggaggagctggccttcacccaggaagaaatgactgacttcgaggagcacagcacacagcagctcacgctgtctcctgcagccgttcccacgagagcagcatcagatagtgaatgttgtaacatcaacctggatacagagaccagcccctgcagtagcgattttgaggaaaacgtgggcaagaagctgctgagaaccttgagtggccaaaaaaggaagaggtcaccagaaggagagagaacctctgaggacaactccaatttaacacctctgatcacatgacagggcaaagccagcattcactgggtgtgtgaaattccagagctttgggggagaatccaccctcccatcatctgcttcccccaaggcctcccacaggtgacagaatgttctgccttcccttccatctcttcacccctagctgtcagtttggcagattttccctcgttacctccagttcgactcagaaccttgacatggccataacagaaggaggtgcctctgatagaacatgctagaaatggtcttttccacagcatagtctgggactggaaaagagatgtctgactgcaagctgacaatgccactctgggacccctgatgctcttctttgttctttgggtcccctgatgccataggagacctatcgtcttggaacttgccattctttcctccagaacaaaatgttaactttctaacacatttcatgcatagcttggctcagaaggtgccattggcagacaggcacatgggaggctggagtaggaggtctgaagattagttcaggggatggaccaagaatttcccccagagctttaaagaagtgggactcagccatgttggcgcgtgattgacattacagcacagaaaactgttagtgactggtttcctgttagataagggttccagcagcctggggcagtatgtctcagctggaatggaaagaatgtgagatggaacctcaagtcactgtttttaccagggacacatctgttttggctcccaatcagcagtcttcaatcgatcaataattctgctctggaagagaaggaacagggagcagagagacccaactgggagccagagatggaacttcaggtcttaagtgcaaatcaaagcaaaaaacaaacaaaacttacatggaaaaactgtaagtgctgaaagcaagtttagccatgacaaaccaaagagtgcccaggtcagccaagaaagatacataatctcatgggacttcagtgggagttacacaggaatgttgaagaatcattcttctttttcatgcatttgtccttctcccacccccttactacaccctagcagatcagctgagtgtactttattccaagaacttactggatctctggtttttctcctgaagttggggcaggtgcaattccaagcataaccaccagatggcagagtgaccgcgcatacctgcttccaagaataaaacagttctgaaaagcaaccgcaaagccgggcgcggtggctcacacctgtaatcccaacagtttggaagaccgaggcgggtggatcacttgaagtcaggagtttgagaccagcctggccaacatggtgaaaccccatctctcctgggcatgtagtcccagctactcgggaggctgaggcaggagaatcgcttgaacctgggaggcagaggttgcagtgagctgagatcacaccactgcacttcatcctaggcaacagagcgagactctgtctccccccgcaaaaaaaaaaaagaaagaaagaaagagaaaagaaaagaaaagcaaccacagccagccttagggaaaacttggaagtaagtgaaatttgtcttcagaataactatctccctttctgatctgtctcctactctttagatgttctcagtcaagtactcactgaactcattgatcgagtgctgtctgctaaatctccaaaccattcccaaacctttccccgtagtataccatccagcttccctccccttcctccaaaaccctccctcccacctccccacacccattgagtcattcacaggcaggagggagactgatcattcctctgggttatctgcatctcaaaagaaaatgcttacccacaggaactgttaactcaggggttcttaacttggggtccatcaccccagggggtccatagttggacttcagagggtctatgaaacccctaaaactgtcagtatttaatgtatttattcttgtatgttttttccagagcattaaagctttcataaggttctcaaaggtctcagacctacaaagagttaaaacaaacagacaaacaaaaaaaaacactactattttaaatagtggaactttcagcccagcgtttctgcaatgcagagtgaagtggatactgggcagttcgagacaggtttttaatcataagtggtcttttcaaatgtccatcaattgatggggaaggctggcacccaccaagaagtggaagtcctcagaaattctcggcacaccctagagtattgtacaaccaacacccccacataactttgtcccctcttccccaacaacccagagcaggtgttgcagacaggagggccacagcgtgtggaagtaaagactttggagctagagaagccttttccagcaatgattattgacttcaccacaccccttgcctggcctggcctgaggctcagcagtgcatgacttctcgtagataacttcacagtcatccagtcccaacacctgctcttgcctggtaggaacaggcgaagtgtcagccctcaatgttgggtacttagacccaaaccaataaatggtgagttttgaacaagaactaccatcatgcaggcttcttgcccagctgaccactggccccggggtgcctgcctggctggtcttcatcacctgaggccaccaggctcaagccactgctgttgcattacacccatccctttgcaaaatccctatggagcctgtcaccactcccctccctatatacccccaccccacaaagattttcttcaggttaaaaaaaaagtttaaaaaaaagattttaaaataaagcatttatgaaggcttaataaattgtaaataatttttaaataaaatgaaaatgcctttcctggaa

SEQ ID NO: 123407 - DNA, 2059 bp, Homo sapiens
  Payload ID: 4234
  Gene Symbol: CNNM2
  Gene Name: cyclin and CBS domain divalent metal cation transport mediator 2
  Uniprot ID: Q9H8M5
  ENST ID: ENST00000369875
  CDS Start-End: 165-1823
gcctcggggttcctcagctggctgaggtggagtcagtgtcagtcagggaggcgaactgctgagcactggccgcggacgctccgttgcagtctcgcccaggggccggtacctgcgctcgcgccgccgggttgaaaggatgaagccgcagctggagcagccaccctatgattggctgtggcgcttgtgaacccaaagtaaagatggcgggcgggcaggcagccgccgcactgcccacttggaagatggcggcgcgccgcagcctcagcgctcgcggccgggggatcctgcaggcggctgcggggcggctgctgccgctgctcctgctgagctgctgctgcggtgcgggcggctgcgcagcggtgggcgagaatgaggagacggtgatcatcgggctgcgactggaggacacgaacgacgtgtcgttcatggaagggggggcgctgcgggtgagcgaacggacccgggtcaagctgcgggtgtacgggcagaacatcaataacgagacgtggtcccgcatcgccttcaccgagcacgagcggcggcgccacagcccgggggagcgcgggctggggggccccgcgccgccagagccggacagcggcccccagcgatgcggcatccgcacctcagacatcatcatcttgccccacatcattctcaaccgccgcacctcgggcatcatcgagatcgagatcaaaccgctacgcaagatggagaagagcaagtcctattacctgtgcacgtcgctctccacgcccgccctgggcgccggcggctcggggtccacgggtggcgccgtcgggggcaagggtggctcgggggtggccgggctcccgccgcccccgtgggccgagaccacctggatttaccacgacggcgaggacaccaagatgatcgtaggcgaagagaagaagttcctgctgcccttctggctgcaggtgatcttcatttcgctgctgctgtgcctgtcgggcatgttcagcggcctcaacctggggctcatggccctggacccgatggagctgcgcatcgtgcagaactgcggcacggagaaggagaagaattacgccaagcgcatcgagccggtgcgcaggcagggcaactacctgctgtgctcactgctgctgggcaacgtgctggtcaacaccacgctcaccatcctgctcgacgacatcgccggctcgggcctcgtggccgtggtagtctccaccatcggtatcgtcatcttcggagagatcgtgccccaggccatctgctcccggcatggcctggctgtgggggccaacaccatcttcctcaccaagtttttcatgatgatgaccttccccgcttcctacccggtcagcaagctgctggactgcgtcctgggccaggagataggcaccgtctataaccgggaaaaactgctggagatgctccgggtcaccgatccctacaacgacctcgttaaggaggagctgaacatcatccaaggggcgctggagctccgcaccaagacggtggaggacgtgatgaccccactccgggactgcttcatgatcaccggcgaagccatcctggacttcaacaccatgtctgagatcatggagagcggctacacccgcattccagtgtttgaaggggagcgctccaatatcgtggacctgctgtttgtcaaagacttggccttcgtggatcccgatgactgtacccccctgaaaaccatcaccaaattttataaccaccccttgcactttgttttcaatgacaccaagttggacgctatgctggaagaatttaagaaagaacacacaaacaagaaacccaaatcataccaacactgaaaagaagagacaataagaagcattctttctttcaacatcacagacattggcaactctaggatgtctatacagagggataaaaaggggtggcagttggctgggcgtggtggctcatgcctgtaatcccggcactttgggaggcccagggaggtggatcacttgaggtcaggagttccagactgacagtctggccaccatggtgaaaccccgtttctaataaaaatacagaaaaatta

SEQ ID NO: 123408 - DNA, 15857 bp, Homo sapiens
  Payload ID: 4234
  Gene Symbol: CNNM2
  Gene Name: cyclin and CBS domain divalent metal cation transport mediator 2
  Uniprot ID: Q9H8M5
  ENST ID: ENST00000369878
  CDS Start-End: 189-2816
tccctccctctttccctcccgcgagcctcggggttcctcagctggctgaggtggagtcagtgtcagtcagggaggcgaactgctgagcactggccgcggacgctccgttgcagtctcgcccaggggccggtacctgcgctcgcgccgccgggttgaaaggatgaagccgcagctggagcagccaccctatgattggctgtggcgcttgtgaacccaaagtaaagatggcgggcgggcaggcagccgccgcactgcccacttggaagatggcggcgcgccgcagcctcagcgctcgcggccgggggatcctgcaggcggctgcggggcggctgctgccgctgctcctgctgagctgctgctgcggtgcgggcggctgcgcagcggtgggcgagaatgaggagacggtgatcatcgggctgcgactggaggacacgaacgacgtgtcgttcatggaagggggggcgctgcgggtgagcgaacggacccgggtcaagctgcgggtgtacgggcagaacatcaataacgagacgtggtcccgcatcgccttcaccgagcacgagcggcggcgccacagcccgggggagcgcgggctggggggccccgcgccgccagagccggacagcggcccccagcgatgcggcatccgcacctcagacatcatcatcttgccccacatcattctcaaccgccgcacctcgggcatcatcgagatcgagatcaaaccgctacgcaagatggagaagagcaagtcctattacctgtgcacgtcgctctccacgcccgccctgggcgccggcggctcggggtccacgggtggcgccgtcgggggcaagggtggctcgggggtggccgggctcccgccgcccccgtgggccgagaccacctggatttaccacgacggcgaggacaccaagatgatcgtaggcgaagagaagaagttcctgctgcccttctggctgcaggtgatcttcatttcgctgctgctgtgcctgtcgggcatgttcagcggcctcaacctggggctcatggccctggacccgatggagctgcgcatcgtgcagaactgcggcacggagaaggagaagaattacgccaagcgcatcgagccggtgcgcaggcagggcaactacctgctgtgctcactgctgctgggcaacgtgctggtcaacaccacgctcaccatcctgctcgacgacatcgccggctcgggcctcgtggccgtggtagtctccaccatcggtatcgtcatcttcggagagatcgtgccccaggccatctgctcccggcatggcctggctgtgggggccaacaccatcttcctcaccaagtttttcatgatgatgaccttccccgcttcctacccggtcagcaagctgctggactgcgtcctgggccaggagataggcaccgtctataaccgggaaaaactgctggagatgctccgggtcaccgatccctacaacgacctcgttaaggaggagctgaacatcatccaaggggcgctggagctccgcaccaagacggtggaggacgtgatgaccccactccgggactgcttcatgatcaccggcgaagccatcctggacttcaacaccatgtctgagatcatggagagcggctacacccgcattccagtgtttgaaggggagcgctccaatatcgtggacctgctgtttgtcaaagacttggccttcgtggatcccgatgactgtacccccctgaaaaccatcaccaaattttataaccaccccttgcactttgttttcaatgacaccaagttggacgctatgctggaagaatttaagaaaggtaaatctcacctggctatcgtgcagcgggtaaacaatgagggagaaggggatccattttatgaagttctgggaatcgtcaccttagaagatgtgattgaagaaatcatcaaatctgagattcttgatgaaacagatttatacactgacaacagaacgaaaaagaaagtggctcaccgggaacgaaagcaagatttttctgcctttaagcagacagacagtgagatgaaggttaaaatatcaccacagctcctcctggccatgcaccgtttcctagcaacagaagtagaagcatttagcccatcccagatgtcagagaagatccttctaaggctgctaaagcaccccaatgtcatccaggaactgaaatatgatgagaagaacaagaaagcccccgaatactacctctaccagcgcaacaagccagtagactacttcgttctcattctgcaggggaaagtggaagttgaagctgggaaagaaggtatgaagtttgaagcgagcgccttctcatactatggcgtgatggccctgacagcctctccagttcctttgtccctgtctcgtacctttgttgtcagcagaacagagttgttagcagcaggttctccaggtgaaaataagtcccctcctcgcccatgtggcttgaatcactcagactctctcagtcgaagcgaccggattgacgccgtcacaccaacactggggagcagcaataaccagctcaattcttcgctcctccaagtctacatccccgattactcggtgcgagccctttcggatctgcagtttgttaagatctcaagacagcaataccaaaatgccttgatggcatcccggatggacaaaaccccccagtcttcagacagtgaaaacactaaaatcgaattgactcttacggagctgcatgacgggttgccagacgagacagccaacctgctcaacgaacagaactgtgtgacgcacagtaaggccaaccacagcctgcacaacgaaggcgccatctaggccgcgctggctgcacccgcccaggcccgcacccgcccagtcccgagggcccggccctgtctgcccatgacttcactggtgtgagcttgtccgccatgctgtaccctgcaacatcctgagaccaaagaccttgtgcccttcccaggagccgcggaggaggacagtgagggaggaatggaaacgagagatgtgaagttggcagccggggcatggcgttcaagattttggagatgaactgattccgcccaaatagaatcatgtttattttttcagctctcccttttatcattattcacactcctctgccctcgatttgcatgaagttgaaaattgttgcgatttattttttcaagagatcatgtttttaaagtgtcttttgcagagttttaagttgttctgtctgaactctgctgtgatcccatgatgtgaccctgatgggctggacttgcccctccggtagccttccttggccctcccagcgaggggcacccttcctctgtgccccagtgggcatcaccgtcgatctcgctggctgaatgaagaagaccgtgttactgcagaacctgccaagtctgtcatcactgtggggtgtagcctgcctcagagggacctgcaatcacctctctgagctcagtggtattttgagaatttaatgtttaactgtacccctttccctcaggaagatttaacatttgcttgggaatgtgattttgctcccaccctaaggaatttttatcaccaaaatgaatgttaatgaatttaaaacccatggtttatcattggcaagaggcaagttgacttcatcctgtcattccagcctggggtctgccagccagccctcctccccgacccagcgcctaagctcacagagtgtcgtcgcccacctccctggtccttgctcttgttaacccaagatgctgctacacagatgccaaatggaaatcttccacagggctttttcagtaaacacgtgatgtggagtgcaagctcctccccttcccactagaacatactttaacagaaaacgagtcggaccttctagctgcactctgtactgtgtgccgagaaggcatttctagacccgtgtttttaaaggagggaactttggggattgccagcccctgctcctcctcccagggagccaactgtccctcctcccctgtccctgggcccatggggcccggcagtggctgtgtcccctgcctgagggctctgtgcctcctgcctcagatgcggcctgtgccagagaggctgcctgtacagccagggtcagtttggccccaaacagggattcagaaaccaaatgtgtgttgtggccattttatgtgtgtctccgtcttattttaataccaaattcatcatgtagtgaaattatgtcaggaggtatatgagtgactgaattcttaactatagcttatctgtgttttgttagcccgagggatatgtgcaggttgttggcgctattcatgcactgaaatgaaatcatactgaccagtgtacacacaagattatcagtgcccgccgcatccatcactaggaaaggagagagcgttttctgtttaggctcactgcgcaaagggaggccttggctaagtggcagttttcttctccctactccaggtaggaagtctgttcagccacggctgggctgtgtgcggggcagggagcgtggctgaggagcagacagcagcgggccgggctggctgcctggtgagcagtttggtgcctcgggtgttgtgcatgcccggctcagtatttcctctgggatgccagtcctggagtgtcttcctcagaaggtgccgtgtcccttagtggggggaagtactgatctcacttggtgtagagggtcacagggaccccccgagggtgctgagtggcctgctactggcacgcaacctgcccccgtgggatgaagccccaccgcgtagcttgaccttagaggggaccccactctaagcatccttttttttaaacagagccatctagatacaaaagtcagtttcttaagatgcctctcactgagcacaacaccagtgtgatgagtgtataaagatgaggggtccttgcaacaaagcaaagcgtagcccatgctggaagagggcatctatccccctcttcgggtctgcgcagtgctggccttccctgagctgtggggagccaagcctgcctagcccagcttctctggcctcaggaactctgccctgtcaacctatctgggctcacgtctgcttctccacacacagtctctcggggatgccttgctactgggagagcctctggaatcagagctagtgtgttggtgcccttttcagagctctgctgttcctttataaatcctaaagaactgagtctggggagaggagaggggatgccagctgctgcctctgacttcagggagaagcagacttcttaatactgtcttacgtgctcggtgtgatggcttcttgcaaattattctcttataaaagagctcggcaggagtggcatcagtgaggctcccaaaggatgaaattttagccgccaagttcgtattcattttctgttattctttaccttctgttagtcacactattttataacattagggaatctaaaataattcctgtcaggtccctgaaggaatgaaggctaacatctcctttggggagagcttaggacccttcaaacaacactcatgtctgagcggccagattcctcctccaggccccattttccctcaggaaaccaacctctcagatggttggaggagaaacactgggctgttgcttctttggggcagcaggagaatgactttggcttggaaggcctctgccattcatctctacaaagccagtggggtccggcagagaaagaccgtggaatagctgcggtctcgatgtggctgctctttggcacctccgctggactgccctcccgcggcggtgaccttttcaagtgtggaagggagtgggtcgagtggaccagatgcagacccctgagttctggatactgatgggaggcctcaccctcctttacggggcctctctgggtgggacagagcctcacctgctcctgagcagccactggtgccccacggttcctctgaaactaaatccctagcatccagatagtcctgggacactctgcctgctctgtaaatgaggagggcttttctcctgctgtttggaggttccgtcccttcactgcttgtcccatatgcgtcaggcaaattcaaaatcatacatttaaactcttaggaaaacaaaatcttaagacttacacagatatcggggtgctaatcaactggcttaaatcttgattcttacataatttgaacttgaaaggttacattgaactctgttctttcctccctcctcacctcactccctgcagggagttcaatgccatgttgaagtggttggcatccccaagtgggagggagtggggcatcttaccatcttctaatgtgacttcaaggaacagtgcaaatgttgaatgcagagcttcacactaatacggaacagtaactgtgagtatatttacctgtgctgtcgtcagcactgtacactaaaggaccagcttttccaagcctaggaaaataatggtagatacaaatagaaatacattttccctaggaaatagagcaataggaatttgagctaagcaggtaccatgaacttctgccctcaaattctctctttgggttgaggagcagacctgtataggccctggctgatcaagtctgtgtcctgcctagtaaaaacacacaaccacctctgtcatctgaaggccagccggggatctgtagccatcctcgccttgcctaggcccaggaaggtgaggtctcctgggcaaccagagttgcccctgtggttccccaggggtgatcctaggcagatgactcacccgggctggcacaggaaggtgctcaccttgttctctggggctccaagcaagagcaggccagggagggctggctttgcacgctatgtagcatgacccaagctccctggtggcatgggaaaaactcccctctgcttttgagcccagatatgggcttttctttgcaaagggttgaggagaaatacaagactgagctggtaggttagggtccagaaggcctctgaggtgccattgcttacttccttactgaggaaactggctcttgtcctgggccatgtagttccattctgggctctaggctagtggtgcttctgtccatcaagggtatctgggtgagttgtaggttaacccagaatttagtagggatataggggtttgaataggaaagtgatctggggattcagaaatttttctgatgtatcaatgagcaacttctcagtggatttttatacctcagggtcatttgcaaatctttatcttttcctatttcttaggtgttcaagttggttaataggagagagacgttcagagacttctaagttgaggttcatttgcctccgtttgaggggtgagtggtgcaccaatagcttgctgctgttacttagcaaggctgtgacaagtaggccttcctcctctagcacttgcaagctttctgtctgcgatcacggtttacttgcccatttcccttttgctaccttctttcctatctggagattcatattctagagtccctggtcaaccctacggatgcgaagaagagatggcagttcacagcaactgcatagagtagggagcagctttcctcccaccatcctaggctggggaccttctttgcttctcacaccactgtggttggctcagctcaagtaagcacgttctctctgtatgctagagctactgacatcatctctactagaattgttttaaatatcttttgatgggaaataccaggttgaacttcaagcatcatggaaacaaaggttctagctgcaagagagtaaagttctaggtgtttgtatgccaaggtttatatgtacacagatccaacacatactgtaagaaagacttgagtacacaaggttttcaggttttaatgcccattgggaccgtgaacaaatgagaagaatgggagcattgtcttgcctcgcttggaaggacgccttccggcatctgatccacatggattcacttttaggatgcagttctttgggggccagatttggctgcagattcaccctgaagagaactatccaatgggcctggtggggcttgggtgcctgccttttttgttggaggctcagacttctagagcagagcaaagttgggaagaatgaggtcttaggattctcattccccagagagccccagcctcgcttctgatcattactccccaagtctgaatctactgtgaaggtgaagttatcaattttttcttgtttgagtcctttaaacccacaaatgtatatgctttattttatattatttattatgtacatatgcctgttagtacttcgtctgtgactaggacaaggtctgtcttgaagcttcctcatccatggatcctagggttctgctgtcctttaaggcgggtgagagggtagtgttgttttttataaacaggttgctgcttttatgttggccctagcatccccagcccctttagttgggcccacctgtattccttatgaccagtgttttggatgaggatggaggcaggtctcctaccttgtgggcagggcctctcaagtacctccatgaaatatttccaaggtggtttcttggtgacaggctctcttcccctatgtagggtacagtacagctgtgagtccacggcctccctcctcccaaggcaggtcacttgcctggccccacagtgataatggtttcttccacttaccttagattgcataatccatctttctggataatggaagctgcctgcctatctgggctcttaatatgccttttcttggttttgaggcccagtgccaacattgccttggccctcaagtaagaccctgctttgtgtctgactttgatcctcctcagcctttattcactgtatcatagtgtacaggtcatgcatttgagcagtgaagttttctgaacacagtattcagagctgtgtacataaacctaaataagcacaaatgacatgtataggattgagctgattgtcttaatgaatgcattttataattcaaatgatgtagatgtacagtctctcctatttattttgtaccaatttatttgtaaattttgtgattgttttacaaggtttttgtttatttctattctatttagataaatgatgttctgttcaccctgctagcagatgtgtgttccctcttccctttcatctgtgcaacaccaaccatgccattgtattcagcttggctgaaccaactgccctacccacttgcctggctttgctggtgggaaagctgggactggatctcagcatgacaacatagaagagcatcttctttggacagtgtaaagtcttaagagaagtgggtactagttctgtgcctccaagtcacagcctggtacagccaatcctagggggaaggtgtccttctttgcaaggattataatctgttctccatcagttactctctacataagaacattcggagtatccagtcaaattgccccagacattggctgctcagtcactaataacaacacacagtgccgctgggctaagccggcatttcctaggtaagaccaaaggtctcattcaggcctctcaattggctcttgaaaacaaggatggctttataggtcctcctctgctatgctaagcctgggaggaaggtcggagcaggcatggatagtcactttcaagtggaaaacatccggcctgagtgtggcgaggcgtgtgcaggtgggtcttcaggattcagtggatatcctgcattccccagtaatcggtgtgtatgatacacgttcttttccatcactactttgtcttctgttccttcttaccctcatcactcacatgagaccagtccctgaagaacttacggtggagcttcagggaccctctgtgatccattcctaaaccacatctttttggaatcccttttctctccacttttagtctctattttacattccaaagaggatcgtgctctgaaaatttagcctcttgactggtccatttatagtctccactgaatttatttaaccgtggcatttgcagtcttttacttacacttgttctgtggatggagacatttcagggaagaactgctgacagaattggctttcagacactgcctgacctaactaccgctcccatctccccaggtatcgcccaactacctgaaagtagaatgaggtgtatcttagcccagtgaaatgctgtcttcgaaccctgcttgctttcattagaagcagggcagaaagtggcagcagagctagggaaagaaatcatggtagcacattcactcccagcctcctgccttggtttgtttttcctgttttactcacttggtctagatgagcccttagctcaaatcaggaaatgctccaaggaaaatggaggcaatttttcctgctgtcaagatgagatttgcctaaaactcccccctgcatcctcagagtgcgcacacatccgctcatttctaagctttatcgtgatgcacccggggtttctatttcacaaaaattgtgctccctagagccgtttttcaactcggcacttctgaggaaacaaatattgatcagagggtcttgtagagaaagtggttaaaaactgacctttttatagcctggagttgatttctggaaacttattttatactttttgaaggtaatttaaaagagatgattctttattaaagccaaaaagttgaattctattaggtggataataaactcttttgctttctttgtatggtggttttgtcattttccctccaagggcctcatatctgtgctcttattttcaagcagtcccaggacaaagggatggttctagggcccttttctctgactttctgctggcatgccatctcccctagtggattactgaggactgaggatgcacgtttctaagggagaattagttgcccgacttctgaagtgcttttcctgtcagggtattagtgactgtgcagtgttcaaacaggaggccaacacatgataggaaattttagatggggccagttttcctactgcagttctactaagtcattgacttgaggtcagtgggtccaaaaagtgacttgtttaaagatacccacacactcaagtcaaagataactctggtgagaacactctctcaaagactggacactgagtaaacatttttcagtgtggggaaggtttgcttggcaaatcttctttccaagtatctcaagaacttgtgagacgtggaaggactattgctgcctttcgtgggaaaaatgtgtgctcagctgcttgggctccagtttgtgtgggaaggtttatctcaggccttgtctactcccctcgccagacatggctttgggaagagctccatgggagaccagaacatctggggacatagttgtacctagttattttgtgtgaagaaacaaagggacgagattcaaaattcatcattgtgttttaaatttaaattggaaaacatagattcctcatccttaaacagagtcagcaagtttgagatgaaatgtttgtgttcaatggggagtacttttttgtgttaaagctctacagagaaacttctgtatatattttatttttgagatcacatacctttgttggaatgaatcagactgttgtggccttgggatgaagacattgtgtgtgaggacagggaaaaatggttgagaaatccaggttaaagaatagaaaagctttttactcattctataaatgaacatgctgcctgtttaaaggacttgctttctgctgtttctagatacctagcagcgcgagaactgtgtgacgtgctgcgttcttgttacgggaggtgcgtgacggggcagcgggggtttctggaagtcacctgtttctgctttctggttgcctgtgcctgtggtcatccctgctccttagcagtagtgcatgtttttcttctatctgcagggttgctctggtagctccatggtagagatttcactctcagggcctcccaaaagttgtgtatcatttgaaattgttctatttgaggaaaaacttttaagaaaagctggattccctgatcaccactaaagatcatcatgagaaacataagtatttgagccctaaactactaagcccagtgaggaattggagcgttaactgtatggcaatagctagatcatagttaccatttttcccaccatcaaagacagattaaatagtttccataacatggaatgtgggtaaggttcctaccctaatacagacttaaatatgtagttgtctcaggctattcgtggtgaataagcagagtatttattttaaaatgaccaggcagccttggaaaaattgctgggctttaaagttgttgacaaagtatttcttaaataaatacatctgatttagaaatacctaaacatggacaaaatacttctaaatctgacatgcaactgcatgtggctttttaaagtggtttcttaacaatgctaatgtgacttaaggatttgtagttctattaaaaacgacttctaaaagtatcttagggtagcttgaagggtttgcgttattattttaggtctcagcagaggtatgcttatggcaagagaaaaatcttaggtctaaatagaaccctaaactttcttggctgtgaccaacttttctgaagtacaccatcagagttttcactgactatctatctttgcagagatgaatgaatgtactgggcaattcctctgcccaaggaaacccagcagggcctgggtctgctgtaccactgaccaactgctggggaggctaggggacctgtcagtacatgctgtaaggttgggagttcagtctagcaaccaagaaggggttgcctggtgttctacaatgcctatagtgttttcaaaatgcctgggaaaaaattctcaaaagaagtggcagaatggtcttctcacggtataaaactccgcaggattttttttttttttttttttttttttttttttaaggaaaaaagtataccttttaagttcagcttccttaactactggcaacagagagaaaactcataatttgttttaaaaagcccagttacagctgccctgcctacccatggaccattgacttcccagcacactcttaagaataatatacagagaggcaccattttgctctgggtcttatggaatcctagagctcttgaatacgttttggtggtcctacggagagctgtaactagcagtggagttgttgcttattccagctgtgtgcttttcactttccgatctttggacccagagaatcatttgccatggaatcatctggctagtaagacactcttatatggatgcaatacaaaaagtggtaaattaaagcaaagcaatcatgtggtccttactctaaaagagacaatatgtaaatgtactattataataaggtagctctgcagatgtaataagctactcataaattatttgggtttaagaaaacttaagactatgttaaactggacaacatctccatcttgagtgagagtaattagtaactaggatgaccacacattctcctaacacgggcaacagtctagtctaattgttattgcatttctgacctgattcttttaaaggggcatatattcccaatatataccatttagaatgtatgtatgtttcttggatgacttaatctgaagccatataagtccaaagtagtgagacagacagtatatccttgactaagttatcaggctgtgttctctgcttataaaataattttttaaaaagcctcacttcacagtcctgttccaaaaatctttctgtgaaaaaattgaggcctatgtaacaccatgaatataatcatgttagaacataatcagttcttgaatatttatttcctttaagagaatatcaaactgatgtcaccaaatctaaacccacttgaagaccaatagctattacagttgtactacagaataggtcaaagtcaccgttagaaatattacactttattgaattctggagcagctaatctaccctcccctattgaccaatgacaagaatggaagaaaatatacaatggttaaagaaagagtctataaccactgtttgtttaaaatgttgaaacaactttcactgtactggtgaaacagttttaataccctaacatacacagtaatgattcattcttgtttaaaacaagaggtgatttcgacttgggattgggatttttattttttgagatggagttttgttcttgttgcccaggctggagtgcaatggcacaatcctggctcactgcaacctccgcctcctgggttcaagcaattctcctgcctcagcctcctgagtagatgatgggattacaggcatgcaccaccacgcccaggtaattttgtatttttagtagagatggggtttctccatgttggtaaggctggtctcgaactcccgacctcaggtgatccgcctgtctcggcctcccaaagtgctgggattacaggcgtgagccgccgtgcctggccttgacttgagattctgaagtgaatttattcacactgattgtgccctctactttagtaaggttctggcttacagagccctcttcccatcctctgatgttcaattttaatatacagcaatcaactcttagaggacaaagaaatctggaattgggtagcatgagccacagctatatagcccacactaatgcatgttctgtagtataagaaggcagttcttccctttcttttctgggggcttgttcctttgtccacttgcagctaaattctttctatagatttatcacagataagaaggaggttgtttttggataacaaataagcatttgtgctattaaacaaacaaaaggtaataaggatactgtcttttccctcaaaatagaatcctgccctaaagcaacgcaagtagagcatacttctgtgcaaagccagtgatagagaagcagccttgccagagtcactgaggatgaattaaaggcttataaaagaaaacttgaccttaacagagactacatttgatcatggaaataatacatttctccactgatatacaataccatgtaatgcactggaaaagttggaccttggagtaatagcacaatttgtaacattacagatcacctcttcccactctttgttccactctgagactctttccttttcctcgtgtatccagatacactgacatacggatgattttaaaagtgtcacaagccacagtggagccatatacatgcagttcagcctgattttacccttattttcttctaatacagactccattacaattttggaccatctgcagagagtacagatacacaaaaccaaaacaagtatctatgataataaaatcttcagaaacttttcagacgtacctttcatggagccccctccctcccccgagtagaaccctaacagggacctcgtttgttcctgtgagtcctgccaggacttgtttaatgggtgcttggggttttggttttcctccttattcttcctcctcctcctcctcttcatcatcatcttcgtcatggcagtgtgtaatttcctggggggccagtgggaagaggttgggaggtttaatctcactaattgaccgtgtcagctggtgccgcttgtagtcagtgtctttgaaatccactgatgtgcggttccgggtggcaagaggagactccatctcattgatatctacgtgtgtgtgctccaccgttgattcatgaggcatctagacagaaaaaagctagaggctcagaaagcaggcagagcaaagtagctactccccaaatcctaacccctctcctctgttaggtggccatgcaattacatctataatggaccacaggacaagtcaatatagacttatcttcatagaactacttatagttgcctgtcttcctctctccctgcccctcaaaatggtgcccatattgtctactgcagctggaaattggaaaagatggagaggggagtttactttctattttacagcaaaaacaagatagtcctgaaacagatcagaataaaggaatgtaaaaacc

SEQ ID NO: 123409 - DNA, 3857 bp, Homo sapiens
  Payload ID: 4234
  Gene Symbol: CNNM2
  Gene Name: cyclin and CBS domain divalent metal cation transport mediator 2
  Uniprot ID: Q9H8M5
  ENST ID: ENST00000433628
  CDS Start-End: 125-2686
agtcagggaggcgaactgctgagcactggccgcggacgctccgttgcagtctcgcccaggggccggtacctgcgctcgcgccgccgggttgaaaggatgaagccgcagctggagcagccaccctatgattggctgtggcgcttgtgaacccaaagtaaagatggcgggcgggcaggcagccgccgcactgcccacttggaagatggcggcgcgccgcagcctcagcgctcgcggccgggggatcctgcaggcggctgcggggcggctgctgccgctgctcctgctgagctgctgctgcggtgcgggcggctgcgcagcggtgggcgagaatgaggagacggtgatcatcgggctgcgactggaggacacgaacgacgtgtcgttcatggaagggggggcgctgcgggtgagcgaacggacccgggtcaagctgcgggtgtacgggcagaacatcaataacgagacgtggtcccgcatcgccttcaccgagcacgagcggcggcgccacagcccgggggagcgcgggctggggggccccgcgccgccagagccggacagcggcccccagcgatgcggcatccgcacctcagacatcatcatcttgccccacatcattctcaaccgccgcacctcgggcatcatcgagatcgagatcaaaccgctacgcaagatggagaagagcaagtcctattacctgtgcacgtcgctctccacgcccgccctgggcgccggcggctcggggtccacgggtggcgccgtcgggggcaagggtggctcgggggtggccgggctcccgccgcccccgtgggccgagaccacctggatttaccacgacggcgaggacaccaagatgatcgtaggcgaagagaagaagttcctgctgcccttctggctgcaggtgatcttcatttcgctgctgctgtgcctgtcgggcatgttcagcggcctcaacctggggctcatggccctggacccgatggagctgcgcatcgtgcagaactgcggcacggagaaggagaagaattacgccaagcgcatcgagccggtgcgcaggcagggcaactacctgctgtgctcactgctgctgggcaacgtgctggtcaacaccacgctcaccatcctgctcgacgacatcgccggctcgggcctcgtggccgtggtagtctccaccatcggtatcgtcatcttcggagagatcgtgccccaggccatctgctcccggcatggcctggctgtgggggccaacaccatcttcctcaccaagtttttcatgatgatgaccttccccgcttcctacccggtcagcaagctgctggactgcgtcctgggccaggagataggcaccgtctataaccgggaaaaactgctggagatgctccgggtcaccgatccctacaacgacctcgttaaggaggagctgaacatcatccaaggggcgctggagctccgcaccaagacggtggaggacgtgatgaccccactccgggactgcttcatgatcaccggcgaagccatcctggacttcaacaccatgtctgagatcatggagagcggctacacccgcattccagtgtttgaaggggagcgctccaatatcgtggacctgctgtttgtcaaagacttggccttcgtggatcccgatgactgtacccccctgaaaaccatcaccaaattttataaccaccccttgcactttgttttcaatgacaccaagttggacgctatgctggaagaatttaagaaaggtaaatctcacctggctatcgtgcagcgggtaaacaatgagggagaaggggatccattttatgaagttctgggaatcgtcaccttagaagatgtgattgaagaaatcatcaaatctgagattcttgatgaaacagatttatacactgacaacagaacgaaaaagaaagtggctcaccgggaacgaaagcaagatttttctgcctttaagcagacagacagtgagatgaaggttaaaatatcaccacagctcctcctggccatgcaccgtttcctagcaacagaagtagaagcatttagcccatcccagatgtcagagaagatccttctaaggctgctaaagcaccccaatgtcatccaggaactgaaatatgatgagaagaacaagaaagcccccgaatactacctctaccagcgcaacaagccagtagactacttcgttctcattctgcaggggaaagtggaagttgaagctgggaaagaaggtatgaagtttgaagcgagcgccttctcatactatggcgtgatggccctgacagcctctccaggtgaaaataagtcccctcctcgcccatgtggcttgaatcactcagactctctcagtcgaagcgaccggattgacgccgtcacaccaacactggggagcagcaataaccagctcaattcttcgctcctccaagtctacatccccgattactcggtgcgagccctttcggatctgcagtttgttaagatctcaagacagcaataccaaaatgccttgatggcatcccggatggacaaaaccccccagtcttcagacagtgaaaacactaaaatcgaattgactcttacggagctgcatgacgggttgccagacgagacagccaacctgctcaacgaacagaactgtgtgacgcacagtaaggccaaccacagcctgcacaacgaaggcgccatctaggccgcgctggctgcacccgcccaggcccgcacccgcccagtcccgagggcccggccctgtctgcccatgacttcactggtgtgagcttgtccgccatgctgtaccctgcaacatcctgagaccaaagaccttgtgcccttcccaggagccgcggaggaggacagtgagggaggaatggaaacgagagatgtgaagttggcagccggggcatggcgttcaagattttggagatgaactgattccgcccaaatagaatcatgtttattttttcagctctcccttttatcattattcacactcctctgccctcgatttgcatgaagttgaaaattgttgcgatttattttttcaagagatcatgtttttaaagtgtcttttgcagagttttaagttgttctgtctgaactctgctgtgatcccatgatgtgaccctgatgggctggacttgcccctccggtagccttccttggccctcccagcgaggggcacccttcctctgtgccccagtgggcatcaccgtcgatctcgctggctgaatgaagaagaccgtgttactgcagaacctgccaagtctgtcatcactgtggggtgtagcctgcctcagagggacctgcaatcacctctctgagctcagtggtattttgagaatttaatgtttaactgtacccctttccctcaggaagatttaacatttgcttgggaatgtgattttgctcccaccctaaggaatttttatcaccaaaatgaatgttaatgaatttaaaacccatggtttatcattggcaagaggcaagttgacttcatcctgtcattccagcctggggtctgccagccagccctcctccccgacccagcgcctaagctcacagagtgtcgtcgcccacctccctggtccttgctcttgttaacccaagatgctgctacacagatgccaaatggaaatcttccacagggctttttcagtaaacacgtgatgtggagtgcaagctcctccccttcccactagaacatactttaacagaaaacgagtcggaccttctagctgcactctgtactgtgtgccgagaaggcatttctagacccgtgtttttaaaggagggaactttggggattgccagcccctgctcctcctcccagggagccaactgtccctcctcccctgtccctgggc

SEQ ID NO: 123410 - DNA, 3447 bp, Homo sapiens
  Payload ID: 4235
  Gene Symbol: CNNM3
  Gene Name: cyclin and CBS domain divalent metal cation transport mediator 3
  Uniprot ID: Q8NE01
  ENST ID: ENST00000305510
  CDS Start-End: 29-2152
gcgagaggccgagagggggcagcaggcgatggcggcggcggtagctgcggcgggtcggttaggctggttgttcgccgcgctctgcctgggcaacgccgcgggggaggccgcgccgggcccgcgagtgctgggcttctgcctggaggaggatggagcggcgggcgcgggttgggtacgcggaggggcggcgcgggacacgccggacgccaccttcctcctgcgcctcttcggcccgggcttcgccaacagctcttggtcctgggtggccccggagggggcgggctgccgggaggaggcggcctcccccgcgggcgagtggcgcgcgctgctgcgcttgcgcctgcgggccgaggccgtgcgcccgcactcggcgctgctggcggtgcgcgtggagccgggtggcggggcggctgaggaggcggcgccgccctgggctctgggcctgggggcggccgggctgctggcgctggcagcgctggcgcgaggcctgcagctgagcgcgctggcgctggcgcctgccgaggtgcaggtgctgcgcgagagcggctcggaggcggagcgtgcggcggcgcggcgtttggagcccgcgcggcgctgggccggctgcgccttgggcgcgctgctgctgctggccagcctggcgcaggcggcgctggcggtgctgctgtaccgcgcggccggccagcgtgcggtgcccgccgtgttgggcagcgcggggctcgtgttcctggtgggagaggtggtgccggccgccgtgagcgggcgctggacgctggcgctggcgccgcgagcgctcggcctcagccgcctggccgtcctgctcactctgcccgtcgcgctgcccgtggggcagctgctggagctggcggcgcggcccgggcggctgcgggagcgggtgctggagctggcgcgcggcggcggcgacccctacagcgatctcagcaagggcgtgctgcgctgccggaccgtggaggacgtgctcacgcccctcgaagactgcttcatgctggacgccagcaccgtgctggacttcggcgtcctggccagcatcatgcagagcggccacacgcgcatcccggtgtacgaggaggagcgctccaacatcgtggacatgctctacctcaaggacttggccttcgtggatcccgaagactgcacgccgctcagcaccatcactcgtttctacaaccatccgctccacttcgtcttcaacgacaccaagctggacgctgtcctggaggaattcaagcgagggaagtcccacctggccatcgtgcagaaggtgaacaacgagggtgaaggcgaccccttctacgaggtcctgggcctggtcaccctggaggacgtgatcgaggagatcatcaggtccgagatcctggacgagtctgaagactaccgagacaccgtggtgaagaggaagcctgcttctctgatggcccctctgaagcggaaggaggagttctccttgttcaaggtgtctgatgatgaatataaagtaacaatctcgcctcagctgctcttggccacccagcgcttcctgtcccgagaagtggatgtattcagcccgctgcgcatctctgagaaggtcctgctgcacctgttgaagcatcccagtgtcaaccaggaagtgaggtttgacgagagcaaccggctggccacacaccactacctgtaccagcgcagccagccggtggattacttcattctcatcctgcagggcagggttgaagtggagatcgggaaagagggtctgaagtttgagaatggggccttcacgtactatggagtgtcggccctaactgtgccatcctcggttcaccagtccccggtgtcctcgctccagcccatccgccatgacctgcagcccgacccaggtgacggcacgcattcatctgcgtattgtcccgactacaccgtgagggcgctctctgatctgcagctcatcaaggttacgcgactgcagtacctcaatgcactcctggctacccgagcccagaacctgccacagtcccctgagaacaccgacctgcaggttattccaggcagccagaccaggctccttggtgagaagaccaccacagcggcagggtccagccacagcaggcccggcgtcccggtggaaggcagccctgggcggaacccaggcgtttaacggctcactaggcagccccagatctggggaacagatgagcacgtggggagctggagtgagctgagcagaagttttgtgcccgcctgcccccatcccctccaggccacgttttagatggcccttgtagttgcgggtcctgggtgtcctcagaactagacatcaatgcctggatccttcagccggccctgccctcctttaggagacaggagtcaccagggcacagccctccaggcccgcctcaggaaggaatgaaaggaatgccatcatctctagttcccagggcccagccttccccttctcccccggggcagggacagtgcggcatattcagattcagacctctttgggctgagccaccttgtgagtgcagttactgcctttgtgtggccgtgacctctatttgtttgcttttaatttgccaacctatcgctgctggcagcactttttgagcaagccgagagcacccattttggctgggggttcagatcgatggccttgtccatgttgtcctttctggcttccctgatggtgtcatgtttcagcgcatgcgccccagcctttcccatgtgccaaaccagaagctccactgcccgtaggctgtccctgtagccctgctccctccctggaggctgctcttctgattctgagagctggcctagtggtgctgagggcccctttctgcttctctgcccacctgctgagttgccactcgcagtgttgtcagttcccgtgttctgagaagaggtcatgcctgggaggaagggatcgtcatgctgcatcgaatcctctctccgccgtgtggcccccaggagagtagctgcctgttgcacctgctccacacctccccacagcctccctgcaggtgctgtgtggccgtgatgtgcagagagcagtgagggagggttcatgaaccaggtggatcctctttaaaaaaaaaaaagtttttgttatatctctagaacatttcaagtcttttcctttttttctgttcctagctatggggttttagagaagtgggaacaggaaggcatttgtctttttcttctagtttactacattttccttccgtagttcttcagctgtgtggaaacgggcatcacaaggacataggatcatagattgggtagggagggaggaggatttctggaacttttctcaaaggaatttggacccttataaatgggactgaaggtcaaaacaacagtgatatccttgcttagaaattgtcctcaaggaataaactctgagagcaagcccgggttggaaacagatgctttaaaatcctctctccagaa

SEQ ID NO: 123411 - DNA, 3308 bp, Homo sapiens
  Payload ID: 4235
  Gene Symbol: CNNM3
  Gene Name: cyclin and CBS domain divalent metal cation transport mediator 3
  Uniprot ID: Q8NE01
  ENST ID: ENST00000377060
  CDS Start-End: 34-2013
gctgcgcgagaggccgagagggggcagcaggcgatggcggcggcggtagctgcggcgggtcggttaggctggttgttcgccgcgctctgcctgggcaacgccgcgggggaggccgcgccgggcccgcgagtgctgggcttctgcctggaggaggatggagcggcgggcgcgggttgggtacgcggaggggcggcgcgggacacgccggacgccaccttcctcctgcgcctcttcggcccgggcttcgccaacagctcttggtcctgggtggccccggagggggcgggctgccgggaggaggcggcctcccccgcgggcgagtggcgcgcgctgctgcgcttgcgcctgcgggccgaggccgtgcgcccgcactcggcgctgctggcggtgcgcgtggagccgggtggcggggcggctgaggaggcggcgccgccctgggctctgggcctgggggcggccgggctgctggcgctggcagcgctggcgcgaggcctgcagctgagcgcgctggcgctggcgcctgccgaggtgcaggtgctgcgcgagagcggctcggaggcggagcgtgcggcggcgcggcgtttggagcccgcgcggcgctgggccggctgcgccttgggcgcgctgctgctgctggccagcctggcgcaggcggcgctggcggtgctgctgtaccgcgcggccggccagcgtgcggtgcccgccgtgttgggcagcgcggggctcgtgttcctggtgggagaggtggtgccggccgccgtgagcgggcgctggacgctggcgctggcgccgcgagcgctcggcctcagccgcctggccgtcctgctcactctgcccgtcgcgctgcccgtggggcagctgctggagctggcggcgcggcccgggcggctgcgggagcgggtgctggagctggcgcgcggcggcggcgacccctacagcgatctcagcaagggcgtgctgcgctgccggaccgtggaggacgtgctcacgcccctcgaagactgcttcatgctggacgccagcaccgtgctggacttcggcgtcctggccagcatcatgcagagcggccacacgcgcatcccggtgtacgaggaggagcgctccaacatcgtggacatgctctacctcaaggacttggccttcgtggatcccgaagactgcacgccgctcagcaccatcactcgtttctacaaccatccgctccacttcgtcttcaacgacaccaagctggacgctgtcctggaggaattcaagcgaggagacaccgtggtgaagaggaagcctgcttctctgatggcccctctgaagcggaaggaggagttctccttgttcaaggtgtctgatgatgaatataaagtaacaatctcgcctcagctgctcttggccacccagcgcttcctgtcccgagaagtggatgtattcagcccgctgcgcatctctgagaaggtcctgctgcacctgttgaagcatcccagtgtcaaccaggaagtgaggtttgacgagagcaaccggctggccacacaccactacctgtaccagcgcagccagccggtggattacttcattctcatcctgcagggcagggttgaagtggagatcgggaaagagggtctgaagtttgagaatggggccttcacgtactatggagtgtcggccctaactgtgccatcctcggttcaccagtccccggtgtcctcgctccagcccatccgccatgacctgcagcccgacccaggtgacggcacgcattcatctgcgtattgtcccgactacaccgtgagggcgctctctgatctgcagctcatcaaggttacgcgactgcagtacctcaatgcactcctggctacccgagcccagaacctgccacagtcccctgagaacaccgacctgcaggttattccaggcagccagaccaggctccttggtgagaagaccaccacagcggcagggtccagccacagcaggcccggcgtcccggtggaaggcagccctgggcggaacccaggcgtttaacggctcactaggcagccccagatctggggaacagatgagcacgtggggagctggagtgagctgagcagaagttttgtgcccgcctgcccccatcccctccaggccacgttttagatggcccttgtagttgcgggtcctgggtgtcctcagaactagacatcaatgcctggatccttcagccggccctgccctcctttaggagacaggagtcaccagggcacagccctccaggcccgcctcaggaaggaatgaaaggaatgccatcatctctagttcccagggcccagccttccccttctcccccggggcagggacagtgcggcatattcagattcagacctctttgggctgagccaccttgtgagtgcagttactgcctttgtgtggccgtgacctctatttgtttgcttttaatttgccaacctatcgctgctggcagcactttttgagcaagccgagagcacccattttggctgggggttcagatcgatggccttgtccatgttgtcctttctggcttccctgatggtgtcatgtttcagcgcatgcgccccagcctttcccatgtgccaaaccagaagctccactgcccgtaggctgtccctgtagccctgctccctccctggaggctgctcttctgattctgagagctggcctagtggtgctgagggcccctttctgcttctctgcccacctgctgagttgccactcgcagtgttgtcagttcccgtgttctgagaagaggtcatgcctgggaggaagggatcgtcatgctgcatcgaatcctctctccgccgtgtggcccccaggagagtagctgcctgttgcacctgctccacacctccccacagcctccctgcaggtgctgtgtggccgtgatgtgcagagagcagtgagggagggttcatgaaccaggtggatcctctttaaaaaaaaaaaagtttttgttatatctctagaacatttcaagtcttttcctttttttctgttcctagctatggggttttagagaagtgggaacaggaaggcatttgtctttttcttctagtttactacattttccttccgtagttcttcagctgtgtggaaacgggcatcacaaggacataggatcatagattgggtagggagggaggaggatttctggaacttttctcaaaggaatttggacccttataaatgggactgaaggtcaaaacaacagtgatatccttgcttagaaattgtcctcaaggaataaactctgagagcaagcccgggttggaaacagatgctttaaaatcctctctccagaa

SEQ ID NO: 123412 - DNA, 4800 bp, Homo sapiens
  Payload ID: 4236
  Gene Symbol: CNNM4
  Gene Name: cyclin and CBS domain divalent metal cation transport mediator 4
  Uniprot ID: Q6P4Q7
  ENST ID: ENST00000377075
  CDS Start-End: 99-2426
agttggctcggcggcagcggagcggccggagctgcggtgcggaccggggccgcgcggcgtggcgcggggagcggcggcggcggcagagccagagcaacatggcgccggtgggcgggggcgggcgcccggtcggcggaccggcccgcgggcgcctcctcctggcggcgccggtgctgctggtgctgctgtgggcgctgggggcccggggccagggcagcccccagcagggcacgatcgtgggcatgaggctggcgagctgcaacaagtcgtgtgggacgaacccggatggcatcatcttcgtgtccgagggcagcaccgtgaacctgaggctgtacggctacagcctgggcaacatctccagcaacctgatctccttcaccgaggtggacgatgccgagaccctccacaagtccaccagctgcctcgagctcaccaaggacctggtcgtccagcagctggtcaacgtgagccgcgggaacacgtccggcgtgctggtggtgctcaccaagttcctccggaggagcgagagcatgaagctgtatgcactgtgcacccgggcccagcccgacgggccctggctgaagtggacggacaaggactcactgctcttcatggtggaggagcctgggaggttcctgcctctctggctgcacattctcctaattacggtgctgctggtgctgtcgggcatattttctggcctcaacctcgggcttatggccctggaccccatggagctgcgcatcgtgcagaactgtggcaccgagaaggagaggcgctatgcccgcaagattgagcccatccggcgcaagggcaactaccttctctgctcgttgctcctagggaacgtgctggtcaacacctccctcacaatccttctagacaacctcatcgggtccggcctcatggcggtggcctcctccaccattggcattgtcatctttggggagatcctacctcaggccctgtgctcccgacatgggctggctgtgggtgccaacaccatccttctcaccaaattctttatgctactcaccttccccctcagttttcccattagcaagctcctggacttttttctgggccaggagattcgcactgtttacaaccgggagaagctgatggagatgttgaaggtgacggagccctataatgacctcgtgaaagaggagctcaatatgatccagggtgccctggaactacggaccaaaactgtagaggatatcatgacccagctccaggactgcttcatgatccgcagcgatgccatcctggacttcaacaccatgtcggagataatggaaagcggctatactcgcatcccggtgttcgaagacgagcagtccaatattgtagatattctctacgtcaaagacttggcctttgtggaccccgatgactgcacccccctcaagactatcactcgcttctataaccacccggtgcactttgtcttccatgacaccaagttggatgccatgctggaggagttcaagaaggggaagtcccacctggccatcgtgcagaaggtaaacaacgagggtgagggtgaccccttctacgaggtcctgggcctggtcaccctggaggacgtgatcgaggagatcatcaagtcggagatcctggacgagtccgacatgtacactgacaaccgaagccggaagcgggtgtctgagaagaacaagcgtgacttctctgccttcaaggatgcggacaatgagctcaaagtgaaaatctccccgcagctcctcctggccgctcatcgcttcctagccacagaggtctctcagtttagcccctccctgatatcagagaagatcctgctgcggctactcaagtacccagatgtcattcaggaactcaagtttgacgagcacaataagtactacgcccgccattacctgtacacccgaaataagccggccgactacttcatcctcatcctgcaggggaaggtggaggtggaggcagggaaggagaacatgaagtttgagacgggcgccttctcctactatgggactatggccctgacctcggtcccctccgaccgttccccagcacaccccaccccactcagccgctcagcctccctcagttacccagaccgcacagacgtctcaactgcagcaaccttggcaggcagcagcaaccagtttggcagctctgtcctgggccagtacatctctgacttcagcgtccgggcactcgtggacttgcagtacatcaagatcactcggcagcagtaccagaacgggctgctggcttctcgcatggagaacagccctcagtttcccatagacgggtgcaccacccacatggagaacttggccgagaagtctgagctgcctgtggtggacgagaccacaactcttctcaacgagcgtaactccttgctgcacaaagcctcccacgagaatgccatctgacaggagggcccggggccccctgcccaccctgcgggggcctccccagtgggcccacatgaagagagggaacctgttagtccagaaaggatacggatagatagcctgtctgactgaacagccagatggcccccagcctatgggggatctggcctctgccagggacctctgagtagctctgaggtggcactgtccagccctggatagggggggcagtgggccagctaccgtaagcaaaggctgttttttactgagagaatttctaaagtaggctcatcacttttttttaaatatcattttgggaagggaagacagggttaaggaactttatttaaaaaaaaaatatttttttcctaaaaactataaaagaggaagggtttcttgtcccgggaagcaacggacataatctgttcccagccatggccttccagcttgtgtccctgattcagggagctctcccttcctcctcctcctcctcctccggaggtgggatcccagagcctgccagtggaggcttatctgttgggaggaagacagctcttcacagaagcaaagaacaaaatggcatggagatcagctgcctgagcacctgcgctgtagcttatctgacaacgctgaggccacgagctcctgggtagctgtgatcagggacatgataatctgagctatgcagaggagcacatctgttgtcaactgctgtacccagaaatctagaactctgccgacagcctctcctggtgagtcgggactcagctgaggacacatccccaccctgcctcccatctggccctttggacaactggccctttgtgacagggctgactcaagtgttaggcagggtctcaggcctttgattgctcacccctgctccccaggccctgccctcacttttaccaaaggttctccctcggcgggagggcatctgtgttggaggtgatttgtctgggttcttccttttggttccagaaggaactgtcagtcatcagcatctgcgttgttagcagtcagtaccacccccgccccacaatgacagtcaaggctgacttgttgactgaagcctttttcccagaccccttatttcgaatccccaagcttcagtccctcttgggggtggagacaagaggacatgtgggaagccacggaagcaggttctttatgtcctctcctctgtggctggcaaggctcacctggccttatccacccacttatggaacctcaggagaggagggctcctcctaaaggcatgcagcttgcagcccctctttctcacacgtgtgatcctagcgtgagaggtcatcctgcccttgctgaagttagtagtactgtactaagagctctgccctcatgtgaattcctgccctggcgcctcttccctggggctgaatcaggccctgctgcaaaactccaggcttcccagggttggggaggctgtgggaccaaggtccatgttggtccttccactgggtgcagcaggagctgggtcccgagagcctggcaggtgaaactctgcaggccttccgcctgattattatttattcactcctttcctcaccccaagtgccctgctctccaggtgcctagagtatcctaactcttaggaccagggattgtcttgcaccaagtatgcctacccctggccagtctgaggtctcctagccatagaactgactcctggaagcctggagagaaggtggtgacacccatgggttctcaactgtaaggaaaaaagacaccagacttttgttccctagtgggggaaagcccttagtcttgtacaggagcagcttgctcccaagtccttttggaagctggcagagctatattcctgacagccctgactgccaggtagagcaaaagacattggtgggggtatgtgaagcaaaaggggcaggtgcacacacctccacagtgacctctgtgcacacggttaccaccaactggctggccctcctcctcttccctggcccattgatcatcccttctcacagagggtcatcattatttccaaatattgtttgtctgatgacttcctcttcccagtgcaatttttcccttcctatttcaacctctggttcctgggatgagccataccctggaactggcccacccactgtgtcttccacgtaagggagacctttgcaaagggcatccaaatgggtaggcaggtgacagccgccgtatttattttgcataatattttaatttgtatatttttgtgatttattttggcgttatgagtttgactctcggggagttttgttgttatgactcttgtgtcttttgtcacaaaacaatgatatttgctaaacgatatatggaatttatttttgattggtaataaaaaatcaaatatgtataaatcctggtgaatctacaa

SEQ ID NO: 123413 - DNA, 2169 bp, Homo sapiens
  Payload ID: 4237
  Gene Symbol: CCNB1
  Gene Name: cyclin B1
  Uniprot ID: P14635
  ENST ID: ENST00000256442
  CDS Start-End: 254-1555
cgaacgccttcgcgcgatcgccctggaaacgcattctctgcgaccggcagccgccaatgggaagggagtgagtgccacgaacaggccaataaggagggagcagtgcggggtttaaatctgaggctaggctggctcttctcggcgtgctgcggcggaacggctgttggtttctgctgggtgtaggtccttggctggtcgggcctccggtgttctgcttctccccgctgagctgctgcctggtgaagaggaagccatggcgctccgagtcaccaggaactcgaaaattaatgctgaaaataaggcgaagatcaacatggcaggcgcaaagcgcgttcctacggcccctgctgcaacctccaagcccggactgaggccaagaacagctcttggggacattggtaacaaagtcagtgaacaactgcaggccaaaatgcctatgaagaaggaagcaaaaccttcagctactggaaaagtcattgataaaaaactaccaaaacctcttgaaaaggtacctatgctggtgccagtgccagtgtctgagccagtgccagagccagaacctgagccagaacctgagcctgttaaagaagaaaaactttcgcctgagcctattttggttgatactgcctctccaagcccaatggaaacatctggatgtgcccctgcagaagaagacctgtgtcaggctttctctgatgtaattcttgcagtaaatgatgtggatgcagaagatggagctgatccaaacctttgtagtgaatatgtgaaagatatttatgcttatctgagacaacttgaggaagagcaagcagtcagaccaaaatacctactgggtcgggaagtcactggaaacatgagagccatcctaattgactggctagtacaggttcaaatgaaattcaggttgttgcaggagaccatgtacatgactgtctccattattgatcggttcatgcagaataattgtgtgcccaagaagatgctgcagctggttggtgtcactgccatgtttattgcaagcaaatatgaagaaatgtaccctccagaaattggtgactttgcttttgtgactgacaacacttatactaagcaccaaatcagacagatggaaatgaagattctaagagctttaaactttggtctgggtcggcctctacctttgcacttccttcggagagcatctaagattggagaggttgatgtcgagcaacatactttggccaaatacctgatggaactaactatgttggactatgacatggtgcactttcctccttctcaaattgcagcaggagctttttgcttagcactgaaaattctggataatggtgaatggacaccaactctacaacattacctgtcatatactgaagaatctcttcttccagttatgcagcacctggctaagaatgtagtcatggtaaatcaaggacttacaaagcacatgactgtcaagaacaagtatgccacatcgaagcatgctaagatcagcactctaccacagctgaattctgcactagttcaagatttagccaaggctgtggcaaaggtgtaacttgtaaacttgagttggagtactatatttacaaataaaattggcaccatgtgccatctgtacatattactgttgcatttacttttaataaagcttgtggccccttttacttttttatagcttaactaatttgaatgtggttacttcctactgtagggtagcggaaaagttgtcttaaaaggtatggtggggatatttttaaaaactccttttggtttacctggggatccaattgatgtatatgtttatatactgggttcttgttttatatacctggcttttactttattaatatgagttactgaaggtgatggaggtatttgaaaattttacttccataggacatactgcatgtaagccaagtcatggagaatctgctgcatagctctattttaaagtaaaagtctaccaccgaatccctagtccccctgttttctgtttcttcttgtgattgctgccataattctaagttatttacttttaccactatttaagttatcaactttagctagtatcttcaaactttcactttgaaaaatgagaattttatattctaagccagttttcattttggttttgtgttttggttaataaaacaatactcaaatacaaaa

SEQ ID NO: 123414 - DNA, 1331 bp, Homo sapiens
  Payload ID: 4237
  Gene Symbol: CCNB1
  Gene Name: cyclin B1
  ENST ID: ENST00000506572
  CDS Start-End: 129-1331
aggctggctcttctcggcgtgctgcggcggaacggctgttggtttctgctgggtgtaggtccttggctggtcgggcctccggtgttctgcttctccccgctgagctgctgcctggtgaagaggaagccatggcgctccgagtcaccaggaactcgaaaattaatgctgaaaataaggcgaagatcaacatggcaggcgcaaagcgcgttcctacggcccctgctgcaacctccaagcccggactgaggccaagaacagctcttggggacattggtaacaaagtcagtgaacaactgcaggccaaaatgcctatgaagaaggaagcaaaaccttcagctactggaaaagtcattgataaaaaactaccaaaacctcttgaaaaggtacctatgctggtgccagtgccagtgtctgagccagtgccagagccagaacctgagccagaacctgagcctgttaaagaagaaaaactttcgcctgagcctattttggttgatactgcctctccaagcccaatggaaacatctggatgtgcccctgcagaagaagacctgtgtcaggctttctctgatgtaattcttgcagtaaatgatgtggatgcagaagatggagctgatccaaacctttgtagtgaatatgtgaaagatatttatgcttatctgagacaacttgaggaagagcaagcagtcagaccaaaatacctactgggtcgggaagtcactggaaacatgagagccatcctaattgactggctagtacaggttcaaatgaaattcaggttgttgcaggagaccatgtacatgactgtctccattattgatcggttcatgcagaataattgtgtgcccaagaagatgctgcagctggttggtgtcactgccatgtttattgcaagcaaatatgaagaaatgtaccctccagaaattggtgactttgcttttgtgactgacaacacttatactaagcaccaaatcagacagatggaaatgaagattctaagagctttaaactttggtctgggtcggcctctacctttgcacttccttcggagagcatctaagattggagaggttgatgtcgagcaacatactttggccaaatacctgatggaactaactatgttggactatgacatggtgcactttcctccttctcaaattgcagcaggagctttttgcttagcactgaaaattctggataatggtgaatggacaccaactctacaacattacctgtcatatactgaagaatctcttcttccagttatgcagcacctggctaagaatgtagtcatggtaaatcaaggacttacaaagcacatggtgagtcaa

SEQ ID NO: 123415 - DNA, 1190 bp, Homo sapiens
  Payload ID: 4237
  Gene Symbol: CCNB1
  Gene Name: cyclin B1
  Uniprot ID: P14635
  ENST ID: ENST00000505500
  CDS Start-End: 1-1190
atggcgctccgagtcaccaggaactcgaaaattaatgctgaaaataaggcgaagatcaacatggcaggcgcaaagcgcgttcctacggcccctgctgcaacctccaagcccggactgaggccaagaacagctcttggggacattggtaacaaagtcagtgaacaactgcaggccaaaatgcctatgaagaaggaagcaaaaccttcagctactggaaaagtcattgataaaaaactaccaaaacctcttgaaaaggtacctatgctggtgccagtgccagtgtctgagccagtgccagagccagaacctgagccagaacctgagcctgttaaagaagaaaaactttcgcctgagcctattttggttgatactgcctctccaagcccaatggaaacatctggatgtgcccctgcagaagaagacctgtgtcaggctttctctgatgtaattcttgcagtaaatgatgtggatgcagaagatggagctgatccaaacctttgtagtgaatatgtgaaagatatttatgcttatctgagacaacttgaggaagagcaagcagtcagaccaaaatacctactgggtcgggaagtcactggaaacatgagagccatcctaattgactggctagtacaggttcaaatgaaattcaggttgttgcaggagaccatgtacatgactgtctccattattgatcggttcatgcagaataattgtgtgcccaagaagatgctgcagctggttggtgtcactgccatgtttattgcaagcaaatatgaagaaatgtaccctccagaaattggtgactttgcttttgtgactgacaacacttatactaagcaccaaatcagacagatggaaatgaagattctaagagctttaaactttggtctgggtcggcctctacctttgcacttccttcggagagcatctaagattggagaggttgatgtcgagcaacatactttggccaaatacctgatggaactaactatgttggactatgacatggtgcactttcctccttctcaaattgcagcaggagctttttgcttagcactgaaaattctggataatggtgaatggactgtcaagaacaagtatgccacatcgaagcatgctaagatcagcactctaccacagctgaattctgcactagttcaagatttagccaaggctgtggcaaaggtgta

SEQ ID NO: 123416 - DNA, 750 bp, Homo sapiens
  Payload ID: 4237
  Gene Symbol: CCNB1
  Gene Name: cyclin B1
  ENST ID: ENST00000503507
  CDS Start-End: 1-186
gcgctccgagtcaccagggtgagccgcttcggactgcgaactaacgcggccttcttagctgctgcctgctctccctgcctcgcctgcgggagcctcccgagcgggagagggccgcaggagcgatttggggaggaaggtgggaggggactcaccaagagagcgccgaggtgggcccaggcctggtgagagagtgtgggggacgatggatggagggaggaagaactcgaaaattaatgctgaaaataaggcgaagatcaacatggcaggcgcaaagcgcgttcctacggcccctgctgcaacctccaagcccggactgaggccaagaacagctcttggggacattggtaacaaagtcagtgaacaactgcaggccaaaatgcctatgaagaaggaagcaaaaccttcagctactggaaaagtcattgataaaaaactaccaaaacctcttgaaaaggtacctatgctggtgccagtgccagtgtctgagccagtgccagagccagaacctgagccagaacctgagcctgttaaagaagaaaaactttcgcctgagcctattttggttgatactgcctctccaagcccaatggaaacatctggatgtgcccctgcagaagaagacctgtgtcaggctttctctgatgtaattcttgcagtaaatgatgtggatgcagaagatggagctgatccaaacctttgtagtgaatatgtgaaagatatttatgcttatctgagacaacttgaggaaga

SEQ ID NO: 123417 - DNA, 780 bp, Homo sapiens
  Payload ID: 4237
  Gene Symbol: CCNB1
  Gene Name: cyclin B1
  ENST ID: ENST00000508407
  CDS Start-End: 48-780
gtgttctgcttctccccgctgagctgctgcctggtgaagaggaagccatggcgctccgagtcaccaggaactcgaaaattaatgctgaaaataaggcgaagatcaacatggcaggcgcaaagcgcgttcctacggcccctgctgcaacctccaagcccggactgaggccaagaacagctcttggggacattggtaacaaagtcagtgaacaactgcaggccaaaatgcctatgaagaaggaagcaaaaccttcagctactggaaaagtcattgataaaaaactaccaaaacctcttgaaaaggtacctatgctggtgccagtgccagtgtctgagccagtgccagagccagaacctgagccagaacctgagcctgttaaagaagaaaaactttcgcctgagcctattttggttgatactgcctctccaagcccaatggaaacatctggatgtgcccctgcagaagaagacctgtgtcaggctttctctgatgtaattcttgcagtaaatgatgtggatgcagaagatggagctgatccaaacctttgtagtgaatatgtgaaagatatttatgcttatctgagacaacttgagaataattgtgtgcccaagaagatgctgcagctggttggtgtcactgccatgtttattgcaagcaaatatgaagaaatgtaccctccagaaattggtgactttgcttttgtgactgacaacacttatactaagcaccaaatcagacagatggaaatgaagattctaagagctttaaactttggtctgg

SEQ ID NO: 123418 - DNA, 767 bp, Homo sapiens
  Payload ID: 4237
  Gene Symbol: CCNB1
  Gene Name: cyclin B1
  ENST ID: ENST00000507798
  CDS Start-End: 1-558
caagcagtcagaccaaaatacctactgggtcgggaagtcactggaaacatgagagccatcctaattgactggctagtacaggttcaaatgaaattcaggttgttgcaggagaccatgtacatgactgtctccattattgatcggttcatgcagaataattgtgtgcccaagaagatgctgcagctggttggtgtcactgccatgtttattgcaagcaaatatgaagaaatgtaccctccagaaattggtgactttgcttttgtgactgacaacacttatactaagcaccaaatcagacagatggaaatgaagattctaagagctttaaactttggtctgggtcggcctctacctttgcacttccttcggagagcatctaagattggagaggttgatgtcgagcaacatactttggccaaatacctgatggaactaactatgttggactatgacatggtgcactttcctccttctcaaattgcagcaggagctttttgcttagcactgaaaattctggataatggtgaatggttatgcagcacctggctaagaatgtagtcatggtaaatcaaggacttacaaagcacatgactgtcaagaacaagtatgccacatcgaagcatgctaagatcagcactctaccacagctgaattctgcactagttcaagatttagccaaggctgtggcaaaggtgtaacttgtaaacttgagttggagtactatatttacaaataaaattggcaccatgtgccatctgtacatatta

SEQ ID NO: 123419 - DNA, 1305 bp, Homo sapiens
  Payload ID: 4238
  Gene Symbol: CCNB1IP1
  Gene Name: cyclin B1 interacting protein 1, E3 ubiquitin protein ligase
  Uniprot ID: Q9NPC3
  ENST ID: ENST00000353689
  CDS Start-End: 290-1123
acttcccaaggcgacttcctgtctctccactttctttccctctccgttttggtgggctgaaatgatcctagataattgatagatcctgtggttcaactggatttctagatagaagctggattcatgtgatgccagaggagtaaaatttcaagagactgaaaccagatctgagtttcgctgttccagtctggacctctttggtgctgtaaatcctggatatactgtagatgagtactgcgtttttcttttatggcctctcttcagcttctggagacctcactatcctattatgtctttgtgtgaagacatgctgctttgtaattatcgaaagtgtcgcatcaaactctctggctatgcatgggtcactgcctgctctcacatcttctgtgatcagcatggcagtggtgagtttagtcgctcaccagctatctgtcctgcctgcaacagtaccctttctggaaagctagatattgtccgcacagaactcagtccatcagaggaatataaagctatggtattggcaggactgcgaccagagatcgtgttggacattagctcccgagcgctggccttctggacatatcaggtacatcaggaacgtctctatcaagaatacaatttcagcaaggctgagggccatctgaaacagatggagaagatatatactcagcaaatacaaagcaaggatgtagaattgacctctatgaaaggggaggttacctccatgaagaaagtactagaagaatacaagaaaaagttcagtgacatctctgagaaacttatggagcgcaatcgtcagtatcaaaagctccaaggcctctatgatagccttaggctacgaaacatcactattgctaaccatgaaggcacccttgaaccatccatgattgcacagtctggtgttcttggcttcccattaggtaacaactccaagtttcctttggataatacacctgttcgaaatcggggcgatggagatggagattttcagttcagaccattttttgcgggttctcccacagcacctgaacccagcaacagcttttttagttttgtctctccaagtcgtgaattagagcagcagcaagtttctagcagggccttcaaagtaaaaagaatttgagccacgcatagtgtcacgcacctgtgatcccagctacttaggaggttgaggctgggaggatcacttgagcccaggagtctgaggctttagtgatctaagatcatgccactgcactccagcctgggcaacagagtgagaccctgtttctaaaaaaaaataaagataatttagctaactttaca

SEQ ID NO: 123420 - DNA, 1479 bp, Homo sapiens
  Payload ID: 4238
  Gene Symbol: CCNB1IP1
  Gene Name: cyclin B1 interacting protein 1, E3 ubiquitin protein ligase
  Uniprot ID: Q9NPC3
  ENST ID: ENST00000358932
  CDS Start-End: 466-1299
ctccactttctttccctctccgttttggtgggctggttgaagatgaaatccactgaggagggaagtccagcaccctgtgtgccagtccagaactggcccatctgtagaccccctgaaaatcatatgggcttggatttggatattctcaacagaaagggttaaaggctgatggtacctaaagcctggtacttgaattttgatcaagataagctgccttaagttctcttcattacacaaatgatcctagataattgatagatcctgtggttcaactggatttctagatagaagctggattcatgtgatgccagaggagtaaaatttcaagagactgaaaccagatctgagtttcgctgttccagtctggacctctttggtgctgtaaatcctggatatactgtagatgagtactgcgtttttcttttatggcctctcttcagcttctggagacctcactatcctattatgtctttgtgtgaagacatgctgctttgtaattatcgaaagtgtcgcatcaaactctctggctatgcatgggtcactgcctgctctcacatcttctgtgatcagcatggcagtggtgagtttagtcgctcaccagctatctgtcctgcctgcaacagtaccctttctggaaagctagatattgtccgcacagaactcagtccatcagaggaatataaagctatggtattggcaggactgcgaccagagatcgtgttggacattagctcccgagcgctggccttctggacatatcaggtacatcaggaacgtctctatcaagaatacaatttcagcaaggctgagggccatctgaaacagatggagaagatatatactcagcaaatacaaagcaaggatgtagaattgacctctatgaaaggggaggttacctccatgaagaaagtactagaagaatacaagaaaaagttcagtgacatctctgagaaacttatggagcgcaatcgtcagtatcaaaagctccaaggcctctatgatagccttaggctacgaaacatcactattgctaaccatgaaggcacccttgaaccatccatgattgcacagtctggtgttcttggcttcccattaggtaacaactccaagtttcctttggataatacacctgttcgaaatcggggcgatggagatggagattttcagttcagaccattttttgcgggttctcccacagcacctgaacccagcaacagcttttttagttttgtctctccaagtcgtgaattagagcagcagcaagtttctagcagggccttcaaagtaaaaagaatttgagccacgcatagtgtcacgcacctgtgatcccagctacttaggaggttgaggctgggaggatcacttgagcccaggagtctgaggctttagtgatctaagatcatgccactgcactccagcctgggcaacagagtgagaccctgtttctaaaaaaaaataaagataatttagctaacttta

SEQ ID NO: 123421 - DNA, 1613 bp, Homo sapiens
  Payload ID: 4238
  Gene Symbol: CCNB1IP1
  Gene Name: cyclin B1 interacting protein 1, E3 ubiquitin protein ligase
  Uniprot ID: Q9NPC3
  ENST ID: ENST00000398160
  CDS Start-End: 598-1431
aatagactgtgcttcatgtgcacagtgcgtgtgttcttggaaaacgccggcttcattttgcttggcgggaaagatattatcatcctaatgctgttttgatttatatctccctgggtgaggtcagatttcgggagaaggcgttcagctcagtagagtttaattctccggttgaagatgaaatccactgaggagggaagtccagcaccctgtgtgccagtccagaactggcccatctgtagaccccctgaaaatcatatgggcttggatttggatattctcaacagaaagggttaaaggctgatggtacctaaagcctggtacttgaattttgatcaagataagctgccttaagttctcttcattacacaaatgatcctagataattgatagatcctgtggttcaactggatttctagatagaagctggattcatgtgatgccagaggagtaaaatttcaagagactgaaaccagatctgagtttcgctgttccagtctggacctctttggtgctgtaaatcctggatatactgtagatgagtactgcgtttttcttttatggcctctcttcagcttctggagacctcactatcctattatgtctttgtgtgaagacatgctgctttgtaattatcgaaagtgtcgcatcaaactctctggctatgcatgggtcactgcctgctctcacatcttctgtgatcagcatggcagtggtgagtttagtcgctcaccagctatctgtcctgcctgcaacagtaccctttctggaaagctagatattgtccgcacagaactcagtccatcagaggaatataaagctatggtattggcaggactgcgaccagagatcgtgttggacattagctcccgagcgctggccttctggacatatcaggtacatcaggaacgtctctatcaagaatacaatttcagcaaggctgagggccatctgaaacagatggagaagatatatactcagcaaatacaaagcaaggatgtagaattgacctctatgaaaggggaggttacctccatgaagaaagtactagaagaatacaagaaaaagttcagtgacatctctgagaaacttatggagcgcaatcgtcagtatcaaaagctccaaggcctctatgatagccttaggctacgaaacatcactattgctaaccatgaaggcacccttgaaccatccatgattgcacagtctggtgttcttggcttcccattaggtaacaactccaagtttcctttggataatacacctgttcgaaatcggggcgatggagatggagattttcagttcagaccattttttgcgggttctcccacagcacctgaacccagcaacagcttttttagttttgtctctccaagtcgtgaattagagcagcagcaagtttctagcagggccttcaaagtaaaaagaatttgagccacgcatagtgtcacgcacctgtgatcccagctacttaggaggttgaggctgggaggatcacttgagcccaggagtctgaggctttagtgatctaagatcatgccactgcactccagcctgggcaacagagtgagaccctgtttctaaaaaaaaataaagataatttagctaactttaca

SEQ ID NO: 123422 - DNA, 1604 bp, Homo sapiens
  Payload ID: 4238
  Gene Symbol: CCNB1IP1
  Gene Name: cyclin B1 interacting protein 1, E3 ubiquitin protein ligase
  Uniprot ID: Q9NPC3
  ENST ID: ENST00000398163
  CDS Start-End: 650-1483
tcaggttgaagatgaaatccactgaggagggaagtccagcaccctgtgtgccagtccagaactggcccatctgtagaccccctgaaaatcatatgggcttggatttggatattctcaacagaaagggttaaaggctgatggtacctaaagcctggtacttgaattttgatcaagataagctgccttaagttctcttcattacacaaatgatcctagataattgatagatcctgtggttcaactggatttctagatagaagctggattcatgtgatgccagaggagtaaaatttcaagagactgaaaccagatctgagtttcgctgttccagtctggacctctttggtgctgtaaatcctggatatactgtagatgagtactgcgtttttcttttatgacggagggtcgctcttgttgccgtggctggagtgcaatggtgcgatctcggctcactgcaacctttgcctcgtgggttcaagtgattctcctgcctcagcctcccgagtagctgggattgcaggcgtccaccaccacgcccagctaatttttgtattttagtagagagagggtttcaccgtgttggccacgctggtcgggaactcctgacctcaggcctctcttcagcttctggagacctcactatcctattatgtctttgtgtgaagacatgctgctttgtaattatcgaaagtgtcgcatcaaactctctggctatgcatgggtcactgcctgctctcacatcttctgtgatcagcatggcagtggtgagtttagtcgctcaccagctatctgtcctgcctgcaacagtaccctttctggaaagctagatattgtccgcacagaactcagtccatcagaggaatataaagctatggtattggcaggactgcgaccagagatcgtgttggacattagctcccgagcgctggccttctggacatatcaggtacatcaggaacgtctctatcaagaatacaatttcagcaaggctgagggccatctgaaacagatggagaagatatatactcagcaaatacaaagcaaggatgtagaattgacctctatgaaaggggaggttacctccatgaagaaagtactagaagaatacaagaaaaagttcagtgacatctctgagaaacttatggagcgcaatcgtcagtatcaaaagctccaaggcctctatgatagccttaggctacgaaacatcactattgctaaccatgaaggcacccttgaaccatccatgattgcacagtctggtgttcttggcttcccattaggtaacaactccaagtttcctttggataatacacctgttcgaaatcggggcgatggagatggagattttcagttcagaccattttttgcgggttctcccacagcacctgaacccagcaacagcttttttagttttgtctctccaagtcgtgaattagagcagcagcaagtttctagcagggccttcaaagtaaaaagaatttgagccacgcatagtgtcacgcacctgtgatcccagctacttaggaggttgaggctgggaggatcacttgagcccaggagtctgaggctttagtgatctaagatcatgccactgcactccagcc

SEQ ID NO: 123423 - DNA, 1631 bp, Homo sapiens
  Payload ID: 4238
  Gene Symbol: CCNB1IP1
  Gene Name: cyclin B1 interacting protein 1, E3 ubiquitin protein ligase
  Uniprot ID: Q9NPC3
  ENST ID: ENST00000398169
  CDS Start-End: 618-1451
gtttcaggttgaagatgaaatccactgaggagggaagtccagcaccctgtgtgccagtccagaactggcccatctgtagaccccctgaaaatcatatgggcttggatttggatattctcaacagaaagggttaaaggctgatggtacctaaagcctggtacttgaattttgatcaagataagctgccttaagttctcttcattacacaaatgatcctagataattgatagatcctgtggttcaactggatttctagatagaagctggattcatgtgatgccagaggagtaaaatttcaagagactgaaaccagatctgagtttcgctgttccagtctggacctctttggtgctgtaaatcctggatatactgtagatgagtactgcgtttttcttttatgccggagctgcggcccgcaactccctcagcctggcaggtcccaggatgcttcggggcaaccccacgcatgcgcgctctggcgtagttccctgaagcactcgctcgcagagaatcctggaatcttcgcttgtggagctgtggaggcaacggagtttttccgcgctttttctttcagcctcaggcctctcttcagcttctggagacctcactatcctattatgtctttgtgtgaagacatgctgctttgtaattatcgaaagtgtcgcatcaaactctctggctatgcatgggtcactgcctgctctcacatcttctgtgatcagcatggcagtggtgagtttagtcgctcaccagctatctgtcctgcctgcaacagtaccctttctggaaagctagatattgtccgcacagaactcagtccatcagaggaatataaagctatggtattggcaggactgcgaccagagatcgtgttggacattagctcccgagcgctggccttctggacatatcaggtacatcaggaacgtctctatcaagaatacaatttcagcaaggctgagggccatctgaaacagatggagaagatatatactcagcaaatacaaagcaaggatgtagaattgacctctatgaaaggggaggttacctccatgaagaaagtactagaagaatacaagaaaaagttcagtgacatctctgagaaacttatggagcgcaatcgtcagtatcaaaagctccaaggcctctatgatagccttaggctacgaaacatcactattgctaaccatgaaggcacccttgaaccatccatgattgcacagtctggtgttcttggcttcccattaggtaacaactccaagtttcctttggataatacacctgttcgaaatcggggcgatggagatggagattttcagttcagaccattttttgcgggttctcccacagcacctgaacccagcaacagcttttttagttttgtctctccaagtcgtgaattagagcagcagcaagtttctagcagggccttcaaagtaaaaagaatttgagccacgcatagtgtcacgcacctgtgatcccagctacttaggaggttgaggctgggaggatcacttgagcccaggagtctgaggctttagtgatctaagatcatgccactgcactccagcctgggcaacagagtgagaccctgtttctaaaaaaaaataaagataatttagctaacttta

SEQ ID NO: 123424 - DNA, 1686 bp, Homo sapiens
  Payload ID: 4238
  Gene Symbol: CCNB1IP1
  Gene Name: cyclin B1 interacting protein 1, E3 ubiquitin protein ligase
  Uniprot ID: Q9NPC3
  ENST ID: ENST00000437553
  CDS Start-End: 671-1504
acttcccaaggcgacttcctgtctctccactttctttccctctccgttttggtgggctggttgaagatgaaatccactgaggagggaagtccagcaccctgtgtgccagtccagaactggcccatctgtagaccccctgaaaatcatatgggcttggatttggatattctcaacagaaagggttaaaggctgatggtacctaaagcctggtacttgaattttgatcaagataagctgccttaagttctcttcattacacaaatgatcctagataattgatagatcctgtggttcaactggatttctagatagaagctggattcatgtgatgccagaggagtaaaatttcaagagactgaaaccagatctgagtttcgctgttccagtctggacctctttggtgctgtaaatcctggatatactgtagatgagtactgcgtttttcttttatgccggagctgcggcccgcaactccctcagcctggcaggtcccaggatgcttcggggcaaccccacgcatgcgcgctctggcgtagttccctgaagcactcgctcgcagagaatcctggaatcttcgcttgtggagctgtggaggcaacggagtttttccgcgctttttctttcagcctcagagcctctcttcagcttctggagacctcactatcctattatgtctttgtgtgaagacatgctgctttgtaattatcgaaagtgtcgcatcaaactctctggctatgcatgggtcactgcctgctctcacatcttctgtgatcagcatggcagtggtgagtttagtcgctcaccagctatctgtcctgcctgcaacagtaccctttctggaaagctagatattgtccgcacagaactcagtccatcagaggaatataaagctatggtattggcaggactgcgaccagagatcgtgttggacattagctcccgagcgctggccttctggacatatcaggtacatcaggaacgtctctatcaagaatacaatttcagcaaggctgagggccatctgaaacagatggagaagatatatactcagcaaatacaaagcaaggatgtagaattgacctctatgaaaggggaggttacctccatgaagaaagtactagaagaatacaagaaaaagttcagtgacatctctgagaaacttatggagcgcaatcgtcagtatcaaaagctccaaggcctctatgatagccttaggctacgaaacatcactattgctaaccatgaaggcacccttgaaccatccatgattgcacagtctggtgttcttggcttcccattaggtaacaactccaagtttcctttggataatacacctgttcgaaatcggggcgatggagatggagattttcagttcagaccattttttgcgggttctcccacagcacctgaacccagcaacagcttttttagttttgtctctccaagtcgtgaattagagcagcagcaagtttctagcagggccttcaaagtaaaaagaatttgagccacgcatagtgtcacgcacctgtgatcccagctacttaggaggttgaggctgggaggatcacttgagcccaggagtctgaggctttagtgatctaagatcatgccactgcactccagcctgggcaacagagtgagaccctgtttctaaaaaaaaataaagataatttagctaactttaca

SEQ ID NO: 123425 - DNA, 755 bp, Homo sapiens
  Payload ID: 4238
  Gene Symbol: CCNB1IP1
  Gene Name: cyclin B1 interacting protein 1, E3 ubiquitin protein ligase
  ENST ID: ENST00000554047
  CDS Start-End: 1-194
gtgagtttagtcgctcaccagctatctgtcctgcctgcaacagtaccctttctggaaagctagatattgtccgcacagaactcagtccatcagaggaatataaagctatggtattggcaggactgcgaccagagatcgtgttggacattagctcccgagcgctggccttctggacatatcagtatttcctttgaaagacctccctgtggatgactttaagcatgtccttgaatgtattgttatatcttacatatacacttatacttcttaaggatgtttgtcatctgtcaagtaactttttattatatttttctggggtctttcacagagcagagatttttaagtttaatgaagtcctgcttatcaattttctctttcacggattatacctttggtgtattttaaaagtcactgccaaatccaagatccacctggattttaccctatgttatcttctgggagtttcatagttttgcattttatgtttaagtctgtgaaccattttgagtttatttttgtgaaaagtataagatctgtctagattcattgggtcctcaattttttgctggctattggccagaggctgttcttagttacttgtctcttgggccttcctgacatgactgcttgcttcctcaaagccagcaagggagtgtgtctcctagtaagacagaccttatagtcttaggtaatatacttatgaagtgacaacctgtcacattttctgtagtattctagtcacaggtcctgcccac

SEQ ID NO: 123426 - DNA, 513 bp, Homo sapiens
  Payload ID: 4238
  Gene Symbol: CCNB1IP1
  Gene Name: cyclin B1 interacting protein 1, E3 ubiquitin protein ligase
  ENST ID: ENST00000554184
  CDS Start-End: 1-94
gacattagctcccgagcgctggccttctggacatatcaggctagtctctaactcctgggttcaagccattctcccgcctcagcctcctgagtagcctgtgcttcacttggtacatcaggaacgtctctatcaagaatacaatttcagcaaggctgagggccatctgaaacagatggagaagatatatactcagcaaatacaaagcaaggatgtagaattgacctctatgaaaggggaggttacctccatgaagaaagtactagaagaatacaagaaaaagttcagtgacatctctgagaaacttatggagcgcaatcgtcagtatcaaaagctccaaggcctctatgatagccttaggctacgaaacatcactattgctaaccatgaaggcacccttgaaccatccatgattgcacagtctggtgttcttggcttcccattaggtaacaactccaagtttcctttggataatacacctgttcgaaatcggggcgatggagatggagattttca

SEQ ID NO: 123427 - DNA, 392 bp, Homo sapiens
  Payload ID: 4238
  Gene Symbol: CCNB1IP1
  Gene Name: cyclin B1 interacting protein 1, E3 ubiquitin protein ligase
  ENST ID: ENST00000553291
  CDS Start-End: 381-392
gttgaagatgaaatccactgaggagggaagtccagcaccctgtgtgccagtccagaactggcccatctgtagaccccctgaaaatcatatgggcttggatttggatattctcaacagaaagggttaaaggctgatggtacctaaagcctgaaatgatcctagataattgatagatcctgtggttcaactggatttctagatagaagctggattcatgtgatgccagaggagtaaaatttcaagagactgaaaccagatctgagtttcgctgttccagtctggacctctttggtgctgtaaatcctggatatactgtagatgagtactgcgtttttcttttatggcctctcttcagcttctggagacctcactatcctattatgtctttgtgt

SEQ ID NO: 123428 - DNA, 646 bp, Homo sapiens
  Payload ID: 4238
  Gene Symbol: CCNB1IP1
  Gene Name: cyclin B1 interacting protein 1, E3 ubiquitin protein ligase
  ENST ID: ENST00000556563
  CDS Start-End: 444-646
ggttgaagatgaaatccactgaggagggaagtccagcaccctgtgtgccagtccagaactggcccatctgtagaccccctgaaaatcatatgggcttggatttggatattctcaacagaaagggttaaaggctgatggtacctaaagcctggtacttgaattttgatcaagataagctgccttaagttctcttcattacacaaatgatcctagataattgatagatcctgtggttcaactggatttctagatagaagctggattcatgtgatgccagaggagtaaaatttcaagagactgaaaccagatctgagtttcgctgttccagtctggacctctttggtgctgtaaatcctggatatactgtagatgagtactgcgtttttcttttatggaatgttacagactagactaccactccatcaaatactgaagttgttggaatgtttgctttcttgaatgtcgtggtcactctggcctggccttcacaactcttattgcctctcttcagcttctggagacctcactatcctattatgtctttgtgtgaagacatgctgctttgtaattatcgaaagtgtcgcatcaaactctctggctatgcatgggtcactgcctgctctcacatcttctgtgatcagcatgg

SEQ ID NO: 123429 - DNA, 1294 bp, Homo sapiens
  Payload ID: 4238
  Gene Symbol: CCNB1IP1
  Gene Name: cyclin B1 interacting protein 1, E3 ubiquitin protein ligase
  ENST ID: ENST00000556854
  CDS Start-End: 481-789
ggcgacttcctgtctctccactttctttccctctccgttttggtgggctggttgaagatgaaatccactgaggagggaagtccagcaccctgtgtgccagtccagaactggcccatctgtagaccccctgaaaatcatatgggcttggatttggatattctcaacagaaagggttaaaggctgatggtacctaaagcctggtacttgaattttgatcaagataagctgccttaagttctcttcattacacaaatgatcctagataattgatagatcctgtggttcaactggatttctagatagaagctggattcatgtgatgccagaggagtaaaatttcaagagactgaaaccagatctgagtttcgctgttccagtctggacctctttggtgctgtaaatcctggatatactgtagatgagtactgcgtttttcttttatggcctctcttcagcttctggagacctcactatcctattatgtctttgtgtgaagacatgctgctttgtaattatcgaaagtgtcgcatcaaactctctggctatgcatgggtcactgcctgctctcacatcttctgtgatcagcatggcagtggtgagtttagtcgctcaccagctatctgtcctgcctgcaacagtaccctttctggaaagctagatattgtccgcacagaactcagtccatcagaggaatataaagctatggtattggcaggactgcgaccagagatcgtgttggacattagctcccgagcgctggccttctggacatatcagtatttcctttgaaagacctccctgtggatgactttaagcatgtccttgaatgtattgttatatcttacatatacacttatacttcttaaggatgtttgtcatctgtcaagtaactttttattatatttttctgggtacatcaggaacgtctctatcaagaatacaatttcagcaaggctgagggccatctgaaacagatggagaagatatatactcagcaaatacaaagcaaggatgtagaattgacctctatgaaaggggaggttacctccatgaagaaagtactagaagaatacaagaaaaagttcagtgacatctctgagaaacttatggagcgcaatcgtcagtatcaaaagctccaaggcctctatgatagccttaggctacgaaacatcactattgctaaccatgaaggcacccttgaaccatccatgattgcacagtctggtgttcttggcttcccattaggtaacaactccaagtttcctttggataatacacctgttcgaaatcgggg

SEQ ID NO: 123430 - DNA, 1331 bp, Homo sapiens
  Payload ID: 4238
  Gene Symbol: CCNB1IP1
  Gene Name: cyclin B1 interacting protein 1, E3 ubiquitin protein ligase
  ENST ID: ENST00000557665
  CDS Start-End: 870-1331
tttctttccctctccgttttggtgggctggtgagtgtgcgcttaattttgctctctaattgttttgaatttctcttccatttgagttatatacccaggtggcaggcctttatttcaagtcggcataggagtgtgtgtgagtcgcaaggagattaatttcggctgtgtggaggttgggagaaggcagtgaaatgctcttcctggcttgtttccacgtgggcctctgcagtactgggtttgccttccgtctccgagtcctggtgacccaggaacaatagactgtgcttcatgtgcacagtgcgtgtgttcttggaaaacgccggcttcattttgcttggcgggaaagatattatcatcctaatgctgttttgatttatatctccctgggtgaggtcagatttcgggagaaggcgttcagctcagtagagtttaattctccggttgaagatgaaatccactgaggagggaagtccagcaccctgtgtgccagtccagaactggcccatctgtagaccccctgaaaatcatatgggcttggatttggatattctcaacagaaagggttaaaggctgatggtacctaaagcctggtacttgaattttgatcaagataagctgccttaagttctcttcattacacaaatgatcctagataattgatagatcctgtggttcaactggatttctagatagaagctggattcatgtgatgccagaggagtaaaatttcaagagactgaaaccagatctgagtttcgctgttccagtctggacctctttggtgctgtaaatcctggatatactgtagatgagtactgcgtttttcttttatggcctctcttcagcttctggagacctcactatcctattatgtctttgtgtgaagacatgctgctttgtaattatcgaaagtgtcgcatcaaactctctggctatgcatgggtcactgcctgctctcacatcttctgtgatcagcatggcagtggtgagtttagtcgctcaccagctatctgtcctgcctgcaacagtaccctttctggaaagctagatattgtccgcacagaactcagtccatcagaggaatataaagctatggtattggcaggactgcgaccagagatcgtgttggacattagctcccgagcgctggccttctggacatatcaggtacatcaggaacgtctctatcaagaatacaatttcagcaaggctgagggccatctgaaacagatggagaagatatatactcagcaaatacaaagcaaggatgtagaattgacctctatgaaaggggaggttacctccatgaagaaagtactagaagaatacaag

SEQ ID NO: 123431 - DNA, 1556 bp, Homo sapiens
  Payload ID: 4239
  Gene Symbol: CCNB2
  Gene Name: cyclin B2
  Uniprot ID: O95067
  ENST ID: ENST00000288207
  CDS Start-End: 192-1388
gtgcgcagggccgcccaatggggcgcaagcgacgcggtatttgaatcctggaacaaggctacagcgtcgaagatccccagcgctgcgggctcggagagcagtcctaacggcgcctcgtacgctagtgtcctcccttttcagtccgcgtccctccctgggccgggctggcactcttgccttccccgtccctcatggcgctgctccgacgcccgacggtgtccagtgatttggagaatattgacacaggagttaattctaaagttaagagtcatgtgactattaggcgaactgttttagaagaaattggaaatagagttacaaccagagcagcacaagtagctaagaaagctcagaacaccaaagttccagttcaacccaccaaaacaacaaatgtcaacaaacaactgaaacctactgcttctgtcaaaccagtacagatggaaaagttggctccaaagggtccttctcccacacctgaggatgtctccatgaaggaagagaatctctgccaagctttttctgatgccttgctctgcaaaatcgaggacattgataacgaagattgggagaaccctcagctctgcagtgactacgttaaggatatctatcagtatctcaggcagctggaggttttgcagtccataaacccacatttcttagatggaagagatataaatggacgcatgcgtgccatcctagtggattggctggtacaagtccactccaagtttaggcttctgcaggagactctgtacatgtgcgttggcattatggatcgatttttacaggttcagccagtttcccggaagaagcttcaattagttgggattactgctctgctcttggcttccaagtatgaggagatgttttctccaaatattgaagactttgtttacatcacagacaatgcttataccagttcccaaatccgagaaatggaaactctaattttgaaagaattgaaatttgagttgggtcgacccttgccactacacttcttaaggcgagcatcaaaagccggggaggttgatgttgaacagcacactttagccaagtatttgatggagctgactctcatcgactatgatatggtgcattatcatccttctaaggtagcagcagctgcttcctgcttgtctcagaaggttctaggacaaggaaaatggaacttaaagcagcagtattacacaggatacacagagaatgaagtattggaagtcatgcagcacatggccaagaatgtggtgaaagtaaatgaaaacttaactaaattcatcgccatcaagaataagtatgcaagcagcaaactcctgaagatcagcatgatccctcagctgaactcaaaagccgtcaaagaccttgcctccccactgataggaaggtcctaggctgccgtggcccctggggatgtgtgcttcattgtgccctttttcttattggtttagaactcttgattttgtacatagtcctctggtctatctcatgaaacctcttctcagaccagttttctaaacatatattgaggaaaaataaagcgattggtttttcttaaggta

SEQ ID NO: 123432 - DNA, 1064 bp, Homo sapiens
  Payload ID: 4239
  Gene Symbol: CCNB2
  Gene Name: cyclin B2
  ENST ID: ENST00000559622
  CDS Start-End: 113-925
gcgctgcgggctcggagagcagtcctaacggcgcctcgtacgctagtgtcctcccttttcagtccgcgtccctccctgggccgggctggcactcttgccttccccgtccctcatggcgctgctccgacgcccgacgggtccttctcccacacctgaggatgtctccatgaaggaagagaatctctgccaagctttttctgatgccttgctctgcaaaatcgaggacattgataacgaagattgggagaaccctcagctctgcagtgactacgttaaggatatctatcagtatctcaggcagctggaggttttgcagtccataaacccacatttcttagatggaagagatataaatggacgcatgcgtgccatcctagtggattggctggtacaagtccactccaagtttaggcttctgcaggagactctgtacatgtgcgttggcattatggatcgatttttacaggttcagccagtttcccggaagaagcttcaattagttgggattactgctctgctcttggcttccaagtatgaggagatgttttctccaaatattgaagactttgtttacatcacagacaatgcttataccagttcccaaatccgagaaatggaaactctaattttgaaagaattgaaatttgagttgggtcgacccttgccactacacttcttaaggcgagcatcaaaagccggggagaacttaaagcagcagtattacacaggatacacagagaatgaagtattggaagtcatgcagcacatggccaagaatgtggtgaaagtaaatgaaaacttaactaaattcatcgccatcaagaataagtatgcaagcagcaaactcctgaagatcagcatgatccctcagctgaactcaaaagccgtcaaagaccttgcctccccactgataggaaggtcctaggctgccgtggcccctggggatgtgtgcttcattgtgccctttttcttattggtttagaactcttgattttgtacatagtcctctggtctatctcatgaaacctcttctcagaccagttttctaaacatatattgaggaa

SEQ ID NO: 123433 - DNA, 2503 bp, Homo sapiens
  Payload ID: 4239
  Gene Symbol: CCNB2
  Gene Name: cyclin B2
  ENST ID: ENST00000621385
  CDS Start-End: 1-1125
atggcgctgctccgacgcccgacggtgtccagtgatttggagaatattgacacaggagttaattctaaagttaagagtcatgtgactattaggcgaactgttttagaagaaattggaaatagagttacaaccagagcagcacaagtagctaagaaagctcagaacaccaaagttccagttcaacccaccaaaacaacaaatgtcaacaaacaactgaaacctactgcttctgtcaaaccagtacagatggaaaagttggctccaaagggtccttctcccacacctgaggatgtctccatgaaggaagagaatctctgccaagctttttctgatgccttgctctgcaaaatcgaggacattgataacgaagattgggagaaccctcagctctgcagtgactacgttaaggatatctatcagtatctcaggcagctggaggttttgcagtccataaacccacatttcttagatggaagagatataaatggacgcatgcgtgccatcctagtggattggctggtacaagtccactccaagtttaggcttctgcaggagactctgtacatgtgcgttggcattatggatcgatttttacaggttcagccagtttcccggaagaagcttcaattagttgggattactgctctgctcttggcttccaagtatgaggagatgttttctccaaatattgaagactttgtttacatcacagacaatgcttataccagttcccaaatccgagaaatggaaactctaattttgaaagaattgaaatttgagttgggtcgacccttgccactacacttcttaaggcgagcatcaaaagccggggaggttgatgttgaacagcacactttagccaagtatttgatggagctgactctcatcgactatgatatggtgcattatcatccttctaaggtagcagcagctgcttcctgcttgtctcagaaggttctaggacaaggaaaatggaacttaaagcagcagtattacacaggatacacagagaatgaagtattggaagtcatgcagcacatggccaagaatgtggtgaaagtaaatgaaaacttaactaaattcatcgtaagtactactgttttcttaagctgtggaaagctttaggttctgggttttgtgtgtatgttgggcgggggggggcggtgtgtgccgtcatgtaaatatattaataacatgtgggagttttagcacaaatcctttatcctttatatttttctggtacagtatggtatggagcatactgataaaccctgaaagcaagctttatttgaaacaaggtcgataggctagccatgtccaggcccagatcccagtcaaccagtcggttactcaatgtattgaattactctgtgcttatactagcatcctggggagggcactttgcaagcagggaaggctggtctgcatgtgattgggaagagagagggcccacttcaaatggcggtgtattatattgcgtattcaggtgatgttactcagagcctttgtccagggtcttttgaggcaatgatggaaaaacgcctaattagcaagcatggttaagagggaagaggcccattcagggggcatcctgagggcatggtgtctatctctgcatggcccacctatgaggaggagccaaaggagacttagtgctgtcctgtgcttgtgtgacaccaaacatcagagctcaccaagtgtgtggtggcaaagagcaaggtatttgaacctcagaagagtctcaagtgtcctcacaacatgatttgcttcatggaagtgtaatatgtgttcagtcctgagaggactgtctgggatttgttaagcactagttgccaccctcttttattgtcttttattgtcttttaattgttcctattgctgccaggcctggtgaacctgttatgtcctgatggcacttaggtgtcgtaaacacagctccccctcccatccctctggtagcctacaagaggaagcctgctacttggaccttgaaatcatttgttcctatcacctgtgctaccagctgtgttttattcattaatggggatggaaggaaatggtcaggcacatgttatgagcccagagctttcactggcttcagcgattgggcatcatcaatgtgatcatgattgtagccgtggacctttgataattgtgagttagactaggaataaggtatcattgggggttcctgacatgtgcttaatcacaaatgacttctgcaggccatcaagaataagtatgcaagcagcaaactcctgaagatcagcatgatccctcagctgaactcaaaagccgtcaaagaccttgcctccccactgataggaaggtcctaggctgccgtggcccctggggatgtgtgcttcattgtgccctttttcttattggtttagaactcttgattttgtacatagtcctctggtctatctcatgaaacctcttctcagaccagttttctaaacatatattgaggaaaaataaagcgattggtttttcttaaggt

SEQ ID NO: 123434 - DNA, 4513 bp, Homo sapiens
  Payload ID: 4240
  Gene Symbol: CCNB3
  Gene Name: cyclin B3
  Uniprot ID: Q8WWL7
  ENST ID: ENST00000276014
  CDS Start-End: 119-4306
ttccaggtgtctggaactggattacagtttcttctgattgaacgcagcctttgaatactgcctggcctatcgcgaatacatccctgccttggacaagacgcagctgaatctctaagtgatgctactgccactaccaccccagagctccaaacctgtgcctaagaaatctcagtccagcaaaattgtgcccagtcatcatgacccatctgaaaagacgggggagaattgccaaacgaagatatctccatcttcacttcaggagtctccatcttcacttcagggagcactcaaaaagagatcagcttttgaagatctcactaatgcttctcaatgtcaacctgtccagcccaagaaagaagccaataaagagtttgtaaaagttgtttccaagaagataaacaggaacacacatgctcttggactggccaaaaagaataagcggaatctaaaatggcataagctggaagtcacaccagtagtagcctctactaccgtggtaccaaacattatggagaaaccactcattctagacatatccaccacctccaaaacacccaacactgaggaggcatctctcttcagaaagccattagttttaaaggaggaacccactattgaggatgaaacccttatcaataagtcattatctttaaaaaagtgctcaaatcatgaggaggtgtccttactggaaaagctacagcccctgcaggaggagagtgacagtgatgatgcgtttgttatagagccaatgacttttaagaagacacataaaactgaggaggcagccatcaccaagaagacattatccttaaagaagaagatgtgtgcaagtcagcggaagcagtcctgccaggaagagtcgttggctgtgcaggatgtcaatatggaagaggattccttctttatggagtcaatgagttttaagaagaagcctaaaactgaggagtcaatccccacccataagttatcatctttaaagaagaaatgtaccatttatgggaagatatgccactttaggaagccaccagtattgcagacaaccatctgtggagcaatgtcctccattaagaagcctaccactgagaaggagacacttttccaagagctatctgtattgcaagagaaacacaccactgagcatgagatgtccatcttgaagaaatcattggccttgcagaagaccaactttaaagaggattcccttgttaaggagtcgttagcctttaagaagaagcctagcactgaggaggcaatcatgatgccagtaatattgaaggagcagtgcatgactgaggggaagaggtcccgtctgaagccattagtattgcaggagatcacctctggagagaagtcgctcattatgaagccattgtccattaaagaaaagccatctactgagaaggagtccttttcccaggaaccatctgcattgcaaaagaagcacaccactcaggaggaggtttccatcttaaaggagccctcgtccttgctaaagtctccaactgaggagtcaccttttgatgaggctttggcttttacaaagaagtgtaccattgaggaggcaccccccaccaagaagcctttaattttaaagaggaagcatgccactcaggggacaatgtcccacttgaagaaaccactaatattacagaccacctctggagaaaagtcacttattaaggagccactgccctttaaagaagaaaaagtgtctttaaagaaaaagtgtaccacacaagagatgatgtccatctgtccagaactgttggactttcaggatatgattggtgaagataagaattctttctttatggagccaatgtcatttaggaagaaccctacaactgaggagacagtacttaccaagacatcgttgtctttacaggaaaagaaaattactcaggggaagatgtcccacttaaagaagccactggtcttgcagaagatcacttctgaggaggagtcattctataagaagctgttgccctttaagatgaaatctacaacggaagaaaagttcctctcccaggaaccatctgcattgaaagagaagcataccaccttgcaggaagtgtccctctcaaaagagtcattggccatccaagagaaggctaccactgaggaggaattctctcaggaactattttcattgcatgttaagcataccaacaaaagtgggtccctcttccaggaggctttggtcttgcaagagaagactgatgccgaagaggattccttgaagaacttgttggctttgcaggagaaaagcaccatggaagaagagtcccttatcaataagctattggctctgaaggaggagctttctgctgaggcagccacaaacatacagacacaattatctttaaagaagaagtccacttctcatggaaaagtgttcttcctgaagaagcagttggctttgaatgagaccatcaatgaagaggagttccttaataagcagccactggccttggaggggtatcccagcattgcggagggggagaccctcttcaagaagcttttggccatgcaggaggagcccagcattgagaaggaagctgtcctcaaggagcccactattgacacagaagctcactttaaggaacctttggccttgcaggaggagcccagcactgagaaggaggctgtcctcaaggagcccagtgttgacacagaagctcactttaaggaaactttggccttgcaggagaagcccagcattgagcaggaggccctctttaagcgacactcagctttgtgggagaagcccagcactgagaaggagaccatcttcaaggagtctttggacttgcaagagaagcccagcattaagaaagagaccctcctcaaaaagccattagccttgaagatgtctaccatcaatgaggcagtcctcttcgaagatatgatagctctgaatgagaaacccaccactgggaaggagttgtccttcaaggagccattagccttacaagagagtcccacctacaaggaagacacctttctcaaaacattgttggtcccccaagttggaaccagcccaaatgtgtctagcactgcccctgaatccataaccagcaagtccagcattgctaccatgaccagtgtgggcaaatctggtaccatcaatgaggcattcctcttcgaagatatgataactctgaatgagaaacccaccactgggaaggagttgtccttcaaggagccattggccttacaagagagtcccacctgcaaggaagacacctttctggaaacattcttgatcccccaaattggaaccagcccatatgtgtttagcaccacccctgaatccataacagagaagtccagcattgcaaccatgaccagcgtgggcaagtccaggaccaccaccgagtccagtgcatgtgaatctgcttctgataaacctgtctcaccacaggccaagggaacaccaaaggagataaccccacgggaagatattgatgaggacagcagtgatccaagtttcaacccaatgtatgccaaggaaatcttcagttacatgaaagagagagaggaacagtttatacttacagattacatgaacaggcagattgaaatcaccagtgacatgagggccattcttgtggactggttggtggaggtgcaggtgtcctttgagatgacccatgagaccctgtacttggcagtgaagctggtggatctctacctaatgaaggcagtatgcaagaaggataagttacaactccttggtgccactgcctttatgattgcagcaaaatttgaggagcacaactcacctcgtgtggatgactttgtgtacatctgtgatgataattatcagcgatctgaggtactcagcatggaaatcaacatcctgaacgtcctcaaatgtgacattaacattcccatcgcctaccattttctgcgcagatatgctaggtgtatccacaccaacatgaagacactgaccttgtcccgctacatctgcgagatgaccctgcaggaataccactatgtccaggagaaggcttccaagctagctgctgcctccttactcctggccctctacatgaagaagctcggatactgggttcccttcctggagcattacagtggctacagtatctctgagcttcaccccttggtcagacagctgaacaaactgctgactttcagttcttacgatagtctcaaggctgtgtattacaagtattctcacccggtcttctttgaagtcgccaaaatccctgccttggatatgttgaagctggaggagattttgaactgtgattgtgaggctcagggcctggtactctagcagcagccacagggctaagcatgcatgttaacagggtatatttattctatgttcgaatttgtcttttgatcgcttttattcatttttcctttctttgtcttttcccaaactgataatgttataaatatttatgttgcttgtttttatgaaagaaaaaatattgtcatatttgactacaaatttaataaaaaattaatggttattgtt

SEQ ID NO: 123435 - DNA, 1201 bp, Homo sapiens
  Payload ID: 4240
  Gene Symbol: CCNB3
  Gene Name: cyclin B3
  Uniprot ID: Q8WWL7
  ENST ID: ENST00000348603
  CDS Start-End: 119-994
ttccaggtgtctggaactggattacagtttcttctgattgaacgcagcctttgaatactgcctggcctatcgcgaatacatccctgccttggacaagacgcagctgaatctctaagtgatgctactgccactaccaccccagagctccaaacctgtgcctaagaaatctcagtccagcaaaattgtgcccagtcatcatgacccatctgaaaagacgggggagaattgccaaacgaagatatctccatcttcacttcaggagtctccatcttcacttcagggagcactcaaaaagagatcagcttttgaagatctcactaatgtgtcctttgagatgacccatgagaccctgtacttggcagtgaagctggtggatctctacctaatgaaggcagtatgcaagaaggataagttacaactccttggtgccactgcctttatgattgcagcaaaatttgaggagcacaactcacctcgtgtggatgactttgtgtacatctgtgatgataattatcagcgatctgaggtactcagcatggaaatcaacatcctgaacgtcctcaaatgtgacattaacattcccatcgcctaccattttctgcgcagatatgctaggtgtatccacaccaacatgaagacactgaccttgtcccgctacatctgcgagatgaccctgcaggaataccactatgtccaggagaaggcttccaagctagctgctgcctccttactcctggccctctacatgaagaagctcggatactgggttcccttcctggagcattacagtggctacagtatctctgagcttcaccccttggtcagacagctgaacaaactgctgactttcagttcttacgatagtctcaaggctgtgtattacaagtattctcacccggtcttctttgaagtcgccaaaatccctgccttggatatgttgaagctggaggagattttgaactgtgattgtgaggctcagggcctggtactctagcagcagccacagggctaagcatgcatgttaacagggtatatttattctatgttcgaatttgtcttttgatcgcttttattcatttttcctttctttgtcttttcccaaactgataatgttataaatatttatgttgcttgtttttatgaaagaaaaaatattgtcatatttgactacaaatttaataaaaaattaatggttattgtt

SEQ ID NO: 123436 - DNA, 1201 bp, Homo sapiens
  Payload ID: 4240
  Gene Symbol: CCNB3
  Gene Name: cyclin B3
  Uniprot ID: Q8WWL7
  ENST ID: ENST00000376038
  CDS Start-End: 119-994
ttaaaggtgtctggaactggattacagtttcttctgattgaacgcagcctttgaatactgcctggcctatcgcgaatacatccctgccttggacaagacgcagctgaatctctaagtgatgctactgccactaccaccccagagctccaaacctgtgcctaagaaatctcagtccagcaaaattgtgcccagtcatcatgacccatctgaaaagacgggggagaattgccaaacgaagatatctccatcttcacttcaggagtctccatcttcacttcagggagcactcaaaaagagatcagcttttgaagatctcactaatgtgtcctttgagatgacccatgagaccctgtacttggcagtgaagctggtggatctctacctaatgaaggcagtatgcaagaaggataagttacaactccttggtgccactgcctttatgattgcagcaaaatttgaggagcacaactcacctcgtgtggatgactttgtgtacatctgtgatgataattatcagcgatctgaggtactcagcatggaaatcaacatcctgaacgtcctcaaatgtgacattaacattcccatcgcctaccattttctgcgcagatatgctaggtgtatccacaccaacatgaagacactgaccttgtcccgctacatctgcgagatgaccctgcaggaataccactatgtccaggagaaggcttccaagctagctgctgcctccttactcctggccctctacatgaagaagctcggatactgggttcccttcctggagcattacagtggctacagtatctctgagcttcaccccttggtcagacagctgaacaaactgctgactttcagttcttacgatagtctcaaggctgtgtattacaagtattctcacccggtcttctttgaagtcgccaaaatccctgccttggatatgttgaagctggaggagattttgaactgtgattgtgaggctcagggcctggtactctagcagcagccacagggctaagcatgcatgttaacagggtatatttattctatgttcgaatttgtcttttgatcgcttttattcatttttcctttctttgtcttttcccaaactgataatgttataaatatttatgttgcttgtttttatgaaagaaaaaatattgtcatatttgactacaaatttaataaaaaattaatggttattgtt

SEQ ID NO: 123437 - DNA, 4693 bp, Homo sapiens
  Payload ID: 4240
  Gene Symbol: CCNB3
  Gene Name: cyclin B3
  Uniprot ID: Q8WWL7
  ENST ID: ENST00000376042
  CDS Start-End: 299-4486
gtggaagcatttccgtcattctgagacagttgggctgaggcggttggtcgcctctctctctctctctctctgttcctcatctacattttgattggtttatttttgtattgttttctttcagtttccgataggtggagaacattctgctaatagcttttcttccagtccatttgtggcttgttaaaggtgtctggaactggattacagtttcttctgattgaacgcagcctttgaatactgcctggcctatcgcgaatacatccctgccttggacaagacgcagctgaatctctaagtgatgctactgccactaccaccccagagctccaaacctgtgcctaagaaatctcagtccagcaaaattgtgcccagtcatcatgacccatctgaaaagacgggggagaattgccaaacgaagatatctccatcttcacttcaggagtctccatcttcacttcagggagcactcaaaaagagatcagcttttgaagatctcactaatgcttctcaatgtcaacctgtccagcccaagaaagaagccaataaagagtttgtaaaagttgtttccaagaagataaacaggaacacacatgctcttggactggccaaaaagaataagcggaatctaaaatggcataagctggaagtcacaccagtagtagcctctactaccgtggtaccaaacattatggagaaaccactcattctagacatatccaccacctccaaaacacccaacactgaggaggcatctctcttcagaaagccattagttttaaaggaggaacccactattgaggatgaaacccttatcaataagtcattatctttaaaaaagtgctcaaatcatgaggaggtgtccttactggaaaagctacagcccctgcaggaggagagtgacagtgatgatgcgtttgttatagagccaatgacttttaagaagacacataaaactgaggaggcagccatcaccaagaagacattatccttaaagaagaagatgtgtgcaagtcagcggaagcagtcctgccaggaagagtcgttggctgtgcaggatgtcaatatggaagaggattccttctttatggagtcaatgagttttaagaagaagcctaaaactgaggagtcaatccccacccataagttatcatctttaaagaagaaatgtaccatttatgggaagatatgccactttaggaagccaccagtattgcagacaaccatctgtggagcaatgtcctccattaagaagcctaccactgagaaggagacacttttccaagagctatctgtattgcaagagaaacacaccactgagcatgagatgtccatcttgaagaaatcattggccttgcagaagaccaactttaaagaggattcccttgttaaggagtcgttagcctttaagaagaagcctagcactgaggaggcaatcatgatgccagtaatattgaaggagcagtgcatgactgaggggaagaggtcccgtctgaagccattagtattgcaggagatcacctctggagagaagtcgctcattatgaagccattgtccattaaagaaaagccatctactgagaaggagtccttttcccaggaaccatctgcattgcaaaagaagcacaccactcaggaggaggtttccatcttaaaggagccctcgtccttgctaaagtctccaactgaggagtcaccttttgatgaggctttggcttttacaaagaagtgtaccattgaggaggcaccccccaccaagaagcctttaattttaaagaggaagcatgccactcaggggacaatgtcccacttgaagaaaccactaatattacagaccacctctggagaaaagtcacttattaaggagccactgccctttaaagaagaaaaagtgtctttaaagaaaaagtgtaccacacaagagatgatgtccatctgtccagaactgttggactttcaggatatgattggtgaagataagaattctttctttatggagccaatgtcatttaggaagaaccctacaactgaggagacagtacttaccaagacatcgttgtctttacaggaaaagaaaattactcaggggaagatgtcccacttaaagaagccactggtcttgcagaagatcacttctgaggaggagtcattctataagaagctgttgccctttaagatgaaatctacaacggaagaaaagttcctctcccaggaaccatctgcattgaaagagaagcataccaccttgcaggaagtgtccctctcaaaagagtcattggccatccaagagaaggctaccactgaggaggaattctctcaggaactattttcattgcatgttaagcataccaacaaaagtgggtccctcttccaggaggctttggtcttgcaagagaagactgatgccgaagaggattccttgaagaacttgttggctttgcaggagaaaagcaccatggaagaagagtcccttatcaataagctattggctctgaaggaggagctttctgctgaggcagccacaaacatacagacacaattatctttaaagaagaagtccacttctcatggaaaagtgttcttcctgaagaagcagttggctttgaatgagaccatcaatgaagaggagttccttaataagcagccactggccttggaggggtatcccagcattgcggagggggagaccctcttcaagaagcttttggccatgcaggaggagcccagcattgagaaggaagctgtcctcaaggagcccactattgacacagaagctcactttaaggaacctttggccttgcaggaggagcccagcactgagaaggaggctgtcctcaaggagcccagtgttgacacagaagctcactttaaggaaactttggccttgcaggagaagcccagcattgagcaggaggccctctttaagcgacactcagctttgtgggagaagcccagcactgagaaggagaccatcttcaaggagtctttggacttgcaagagaagcccagcattaagaaagagaccctcctcaaaaagccattagccttgaagatgtctaccatcaatgaggcagtcctcttcgaagatatgatagctctgaatgagaaacccaccactgggaaggagttgtccttcaaggagccattagccttacaagagagtcccacctacaaggaagacacctttctcaaaacattgttggtcccccaagttggaaccagcccaaatgtgtctagcactgcccctgaatccataaccagcaagtccagcattgctaccatgaccagtgtgggcaaatctggtaccatcaatgaggcattcctcttcgaagatatgataactctgaatgagaaacccaccactgggaaggagttgtccttcaaggagccattggccttacaagagagtcccacctgcaaggaagacacctttctggaaacattcttgatcccccaaattggaaccagcccatatgtgtttagcaccacccctgaatccataacagagaagtccagcattgcaaccatgaccagcgtgggcaagtccaggaccaccaccgagtccagtgcatgtgaatctgcttctgataaacctgtctcaccacaggccaagggaacaccaaaggagataaccccacgggaagatattgatgaggacagcagtgatccaagtttcaacccaatgtatgccaaggaaatcttcagttacatgaaagagagagaggaacagtttatacttacagattacatgaacaggcagattgaaatcaccagtgacatgagggccattcttgtggactggttggtggaggtgcaggtgtcctttgagatgacccatgagaccctgtacttggcagtgaagctggtggatctctacctaatgaaggcagtatgcaagaaggataagttacaactccttggtgccactgcctttatgattgcagcaaaatttgaggagcacaactcacctcgtgtggatgactttgtgtacatctgtgatgataattatcagcgatctgaggtactcagcatggaaatcaacatcctgaacgtcctcaaatgtgacattaacattcccatcgcctaccattttctgcgcagatatgctaggtgtatccacaccaacatgaagacactgaccttgtcccgctacatctgcgagatgaccctgcaggaataccactatgtccaggagaaggcttccaagctagctgctgcctccttactcctggccctctacatgaagaagctcggatactgggttcccttcctggagcattacagtggctacagtatctctgagcttcaccccttggtcagacagctgaacaaactgctgactttcagttcttacgatagtctcaaggctgtgtattacaagtattctcacccggtcttctttgaagtcgccaaaatccctgccttggatatgttgaagctggaggagattttgaactgtgattgtgaggctcagggcctggtactctagcagcagccacagggctaagcatgcatgttaacagggtatatttattctatgttcgaatttgtcttttgatcgcttttattcatttttcctttctttgtcttttcccaaactgataatgttataaatatttatgttgcttgtttttatgaaagaaaaaatattgtcatatttgactacaaatttaataaaaaattaatggttattgtt

SEQ ID NO: 123438 - DNA, 1521 bp, Homo sapiens
  Payload ID: 4240
  Gene Symbol: CCNB3
  Gene Name: cyclin B3
  Uniprot ID: Q8WWL7
  ENST ID: ENST00000476167
  CDS Start-End: 119-454
ttaaaggtgtctggaactggattacagtttcttctgattgaacgcagcctttgaatactgcctggcctatcgcgaatacatccctgccttggacaagacgcagctgaatctctaagtgatgctactgccactaccaccccagagctccaaacctgtgcctaagaaatctcagtccagcaaaattgtgcccagtcatcatgacccatctgaaaagacgggggagaattgccaaacgaagatatctccatcttcacttcaggagtctccatcttcacttcagggagcactcaaaaagagatcagcttttgaagatctcactaatgcttctcaatgtcaacctgtccagcccaagaaagaagccaataaagagtttgtaaaagttgtttccaagaagataaacaggaacacacatgctcttggactggccaaaaagaataagcggaatctaaaatgataaccccacgggaagatattgatgaggacagcagtgatccaagtttcaacccaatgtatgccaaggaaatcttcagttacatgaaagagagagaggaacagtttatacttacagattacatgaacaggcagattgaaatcaccagtgacatgagggccattcttgtggactggttggtggaggtgcaggtgtcctttgagatgacccatgagaccctgtacttggcagtgaagctggtggatctctacctaatgaaggcagtatgcaagaaggataagttacaactccttggtgccactgcctttatgattgcagcaaaatttgaggagcacaactcacctcgtgtggatgactttgtgtacatctgtgatgataattatcagcgatctgaggtactcagcatggaaatcaacatcctgaacgtcctcaaatgtgacattaacattcccatcgcctaccattttctgcgcagatatgctaggtgtatccacaccaacatgaagacactgaccttgtcccgctacatctgcgagatgaccctgcaggaataccactatgtccaggagaaggcttccaagctagctgctgcctccttactcctggccctctacatgaagaagctcggatactgggttcccttcctggagcattacagtggctacagtatctctgagcttcaccccttggtcagacagctgaacaaactgctgactttcagttcttacgatagtctcaaggctgtgtattacaagtattctcacccggtcttctttgaagtcgccaaaatccctgccttggatatgttgaagctggaggagattttgaactgtgattgtgaggctcagggcctggtactctagcagcagccacagggctaagcatgcatgttaacagggtatatttattctatgttcgaatttgtcttttgatcgcttttattcatttttcctttctttgtcttttcccaaactgataatgttataaatatttatgttgcttgtttttatgaaagaaaaaatattgtcatatttgactacaaatttaataaaaaattaatggttattgtt

SEQ ID NO: 123439 - DNA, 2212 bp, Homo sapiens
  Payload ID: 4241
  Gene Symbol: CCNC
  Gene Name: cyclin C
  ENST ID: ENST00000326298
  CDS Start-End: 105-713
gctgatttgatcgaggagcgcggttaccggacgggctgggtctatggtcgctccgcgggccgctccgccggctggtgcttttttatcagggcaagctgtgttccatggcagggaacttttggcagagctcccactatttgcaatggattttggataaacaagatctgttgaaggagcgccaaaaggatttaaagtttctctcagaggaagaatattggaagttacaaatattttttacaaatgttatccaagcattaggtgaacatcttaaattaagacaacaagttattgccactgctacggtatatttcaagagattctatgccaggtattctctgaaaagtatagatcctgtattaatggctcctacatgtgtgtttttggcatccaaagtagaggaatttggagtagtttcaaatacaagattgattgctgctgctacttctgtattaaaaactagattttcatatgcctttccaaaggaatttccttataggatgaatcatatattagaatgtgaattctatctgttagaactaatggattgttgcttgatagtgtatcatccttatagacctttgctccagtatgtgcaggacatgggccaagaagacatgttgcttccccttgcatggaggatagtgaatgatacctacagaacggatctttgcctactgtatcctcctttcatgatagctttagtaatagactaatccttgcatgtgagctttcaataatatgaactgcaactgtcataaatcaggattattattcccccaccccctttttgcttgcctacatgtagcctgtgttgtacagcagaaagatgccaggcaatggtttgctgagctttctgtggatatggaaaagattttggaaataatcagggttattttaaaactatatgagcagtggaagaatttcgatgagagaaaagagatggcaaccattcttagtaagatgccaaaaccaaaaccacctccaaacagtgaaggagagcagggtccaaatggaagtcagaactctagctacagccaatcttaaaacattccgaagaattccatagtggaccacttggaaataaaccattggacagatttcagtaatgtcttcagtggaacacaaatgaaaatgaatagcttgtttctgtcaagcatattggaaagtgattttatttttgcaaaataagtttttctttaatatgattctagtacataattgattaaaatctcttgattataaatgtttggaaaggttctaaggggacctacagacagacatacatagacatttcaaaattaatagcttttgattagtataatatttcttaatttggataataaaaattgtagctttttattaagccaggaaacatgaagcataatttgtttaaaattctctttggtcattgagggaccaaaaaaggacgtaaaatttacagtcaatctatgagggtttttttccctccataagtttaactttaaaactgtatttaaggaatcaaatcttacaaaatcctggaagattttggtaatgatgttgataatttcagggaaattaatcaagtacctatattgatttaaaagtgtattttattcagtagtttgaggatcttgccatggaagatactagcccagcctagcagaaaagtgcaatatgtatagcatactttgacattttaaacatgatagtccataaccattttgaaatgctgggcaaactacatgaagttatttataattaattcacagctaatcaggcattttgaaagcttaattggattcaaaaaccataatgttggaatttggtaaaattttaatgttgatttttactgtgaaaaggtttttataagatatacacaccctagtttaatgttgtgtcttggtgtggatttacagatttactacaggtattctgaaccaggaacacaatcaggtttcaggccagtttgatactggctgtccttaattctaatatgagagtaggacatcatactaaatgttatgtcagtgggactgtactgtctgtggaacttagcaaattaatcattttcttcagacttgaaggagagtgataaataaaatttggagtcataggatattgatgcacaatttaaggattaaacatttttaatcaattgtggatgatggcttattaaatgttgacttcctagtataaaactgcaagaataaaagtaacttctccagctgta

SEQ ID NO: 123440 - DNA, 2118 bp, Homo sapiens
  Payload ID: 4241
  Gene Symbol: CCNC
  Gene Name: cyclin C
  ENST ID: ENST00000369220
  CDS Start-End: 102-950
gatttgatcgaggagcgcggttaccggacgggctgggtctatggtcgctccgcgggccgctccgccggctggtgcttttttatcagggcaagctgtgttccatggcagggaacttttggcagagctcccactatttgcaatggattttggataaacaagatctgttgaaggagcgccaaaaggatttaaagtttctctcagaggaagaatattggaagttacaaatattttttacaaatgttatccaagcattaggtgaacatcttaaattaagacaacaagttattgccactgctacggtatatttcaagagattctatgccaggtattctctgaaaagtatagatcctgtattaatggctcctacatgtgtgtttttggcatccaaagtagaggaatttggagtagtttcaaatacaagattgattgctgctgctacttctgtattaaaaactagattttcatatgcctttccaaaggaatttccttataggatgaatcatatattagaatgtgaattctatctgttagaactaatggattgttgcttgatagtgtatcatccttatagacctttgctccagtatgtgcaggacatgggccaagaagacatgttgcttccccttgcatggatagtgaatgatacctacagaacggatctttgcctactgtatcctcctttcatgatagctttagcttgcctacatgtagcctgtgttgtacagcagaaagatgccaggcaatggtttgctgagctttctgtggatatggaaaagattttggaaataatcagggttattttaaaactatatgagcagtggaagaatttcgatgagagaaaagagatggcaaccattcttagtaagatgccaaaaccaaaaccacctccaaacagtgaaggagagcagggtccaaatggaagtcagaactctagctacagccaatcttaaaacattccgaagaattccatagtggaccacttggaaataaaccattggacagatttcagtaatgtcttcagtggaacacaaatgaaaatgaatagcttgtttctgtcaagcatattggaaagtgattttatttttgcaaaataagtttttctttaatatgattctagtacataattgattaaaatctcttgattataaatgtttggaaaggttctaaggggacctacagacagacatacatagacatttcaaaattaatagcttttgattagtataatatttcttaatttggataataaaaattgtagctttttattaagccaggaaacatgaagcataatttgtttaaaattctctttggtcattgagggaccaaaaaaggacgtaaaatttacagtcaatctatgagggtttttttccctccataagtttaactttaaaactgtatttaaggaatcaaatcttacaaaatcctggaagattttggtaatgatgttgataatttcagggaaattaatcaagtacctatattgatttaaaagtgtattttattcagtagtttgaggatcttgccatggaagatactagcccagcctagcagaaaagtgcaatatgtatagcatactttgacattttaaacatgatagtccataaccattttgaaatgctgggcaaactacatgaagttatttataattaattcacagctaatcaggcattttgaaagcttaattggattcaaaaaccataatgttggaatttggtaaaattttaatgttgatttttactgtgaaaaggtttttataagatatacacaccctagtttaatgttgtgtcttggtgtggatttacagatttactacaggtattctgaaccaggaacacaatcaggtttcaggccagtttgatactggctgtccttaattctaatatgagagtaggacatcatactaaatgttatgtcagtgggactgtactgtctgtggaacttagcaaattaatcattttcttcagacttgaaggagagtgataaataaaatttggagtcataggatattgatgcacaatttaaggattaaacatttttaatcaattgtggatgatggcttattaaatgttgacttcctagtataaaactgcaagaataaaagtaacttctccagctgta

SEQ ID NO: 123441 - DNA, 1704 bp, Homo sapiens
  Payload ID: 4241
  Gene Symbol: CCNC
  Gene Name: cyclin C
  ENST ID: ENST00000482541
  CDS Start-End: 102-533
gatttgatcgaggagcgcggttaccggacgggctgggtctatggtcgctccgcgggccgctccgccggctggtgcttttttatcagggcaagctgtgttccatggcagggaacttttggcagagctcccactatttgcaatggattttggataaacaagatctgttgaaggagcgccaaaaggatttaaagtttctctcagaggaagaatattggaagttacaaatattttttacaaatgttatccaagcattaggtgaacatcttaaattaagacaacaagttattgccactgctacggtatatttcaagagattctatgccaggtattctctgaaaagtatagatcctgtattaatggctcctacatgtgtgtttttggcatccaaagtagaggaatttggagtagtttcaaatacaagattgattgctgctgctacttctgtatgtaagtgcaaaaagtatatctgctttaaggatgtaattctaaagaaagctccagagtacatagatttttttttttttagtttatgagacatatgagattggttggctttattaaatttcctgaggataactttatatctagtgtatctggcaaaaaaatcaagctaaaaggtttttttttaaaaagatataaagatattacttttaatgttaaaatggatagtaattatcaatccaaaaacatcaactcagtggcttttaatcttgtaagagtaaagaaaaaattctgtttccgaattttattgtattttattgttttctaatgactattatgtcattcttatgggtagatattaatatctatgtgcaaacccgttcctgtgttgttgggttgttatgaggaccaaatgagttaatataagcttttagaacagtgccttgcttagtatgttactttgctgaggctgccataacaaaatgccacagaacaggtggcttaaacaacagaagcgtattttctcacagttttagagcatggaaatccaagatcaaggtgtctggctattcttacatggacctttctgtgagcacacacactcctggtttgctgtcttcttcatgtgaggacaatagtcttacagaattaggccccactcttatgtcctcatttaatcttttttttttctttcttttttttttttttttttttgagacagagtctcgctctgtcgcccaggctggagtgctcacttcaacttccgcctcctgggttcaagtgattctcctgcctcagcctcctgagtacctgggactacaggcatgtgccaccatgcccagctcatttttgtattttttagtagagacggggtttcaccatgttggccagactagtctcaaactcctgatctcgtgatccgctagcctcggcctcccaacgtgctgggattataggtgtgagccaccatgtctggcctgtcctcatttaatcttatccctttaaagaccctctctccaaatacagtcacattctgaggtactaggagttagggcttcaacatacgaattttggagggggacatatattggtccacaatacttggtaaactttaggggctatcatcatcatcatcatcttcaatgacaacaacatcattatcactggaaaacactgtgccaatgcagtggcattggtaccaaggtaaaatacaaggaatttaaggacaaaaaaagaagacagaaacataaaaatattaataca

SEQ ID NO: 123442 - DNA, 759 bp, Homo sapiens
  Payload ID: 4241
  Gene Symbol: CCNC
  Gene Name: cyclin C
  ENST ID: ENST00000524049
  CDS Start-End: 274-759
cggattcttggtttagctaggccgcggggggtcggatagagtgggcacagtttgcaatggattttggataaacaagatctgttgaaggagcgccaaaaggatttaaagtttctctcagaggaagaatattggaagttacaaatattttttacaaatgttatccaagcattaggtgaacatcttaaattaagacaacaagttattgccactgctacggtatatttcaagagattctatgccaggtattctctgaaaagtatagatcctgtattaatggctcctacatgtgtgtttttggcatccaaagtagaggaatttggagtagtttcaaatacaagattgattgctgctgctacttctgtattaaaaactagattttcatatgcctttccaaaggaatttccttataggatgaatcatatattagaatgtgaattctatctgttagaactaatggattgttgcttgatagtgtatcatccttatagacctttgctccagtatgtgcaggacatgggccaagaagacatgttgcttccccttgcatggaggatagtgaatgatacctacagaacggatctttgcctactgtatcctcctttcatgatagctttagcttgcctacatgtagcctgtgttgtacagcagaaagatgccaggcaatggtttgctgagctttctgtggatatggaaaagattttggaaataatcagggttattttaaaactatatgagcagtggaagaatttcgatgagaga

SEQ ID NO: 123443 - DNA, 674 bp, Homo sapiens
  Payload ID: 4241
  Gene Symbol: CCNC
  Gene Name: cyclin C
  ENST ID: ENST00000369217
  CDS Start-End: 97-674
gatcgaggagcgcggttaccggacgggctgggtctatggtcgctccgcgggccgctccgccggctggtgcttttttatcagggcaagctgtgttccatggcagggaacttttggcagagctcccactatcctaaaagaagggaccactttgccttgctcaaatcccttgagcagtcatggagtttcttatctggaaaaggtaacgagtgtggaagacaagacaattctggaaaaacaaacgaaaagattatgaaaggccattgtcttagtttgcaatggattttggataaacaagatctgttgaaggagcgccaaaaggatttaaagtttctctcagaggaagaatattggaagttacaaatattttttacaaatgttatccaagcattaggtgaacatcttaaattaagacaacaagttattgccactgctacggtatatttcaagagattctatgccaggtattctctgaaaagtatagatcctgtattaatggctcctacatgtgtgtttttggcatccaaagtagaggaatttggagtagtttcaaatacaagattgattgctgctgctacttctgtattaaaaactagattttcatatgcctttccaaaggaatttccttataggatgaatcatatattagaatgtgaattctatctgttagaactaat

SEQ ID NO: 123444 - DNA, 1152 bp, Homo sapiens
  Payload ID: 4241
  Gene Symbol: CCNC
  Gene Name: cyclin C
  ENST ID: ENST00000523961
  CDS Start-End: 120-269
gcggagtcgagccgagctgatttgatcgaggagcgcggttaccggacgggctgggtctatggtcgctccgcgggccgctccgccggctggtgcttttttatcagggcaagctgtgttccatggcagggaacttttggcagagctcccactatttgcaatggattttggataaacaagatctgttgaaggagcgccaaaaggatttaaagtttctctcagaggaagaatattggaagttacaaatattttttacaaatggtattctctgaaaagtatagatcctgtattaatggctcctacatgtgtgtttttggcatccaaagtagaggaatttggagtagtttcaaatacaagattgattgctgctgctacttctgtattaaaaactagattttcatatgcctttccaaaggaatttccttataggatgaatcatatattagaatgtgaattctatctgttagaactaatggattgttgcttgatagtgtatcatccttatagacctttgctccagtatgtgcaggacatgggccaagaagacatgttgcttccccttgcatggaggatagtgaatgatacctacagaacggatctttgcctactgtatcctcctttcatgatagctttagcttgcctacatgtagcctgtgttgtacagcagaaagatgccaggcaatggtttgctgagctttctgtggatatggaaaagattttggaaataatcagggttattttaaaactatatgagcagtggaagaatttcgatgagagaaaagagatggcaaccattcttagtaagatgccaaaaccaaaaccacctccaaacagtgaaggagagcagggtccaaatggaagtcagaactctagctacagccaatcttaaaacattccgaagaattccatagtggaccacttggaaataaaccattggacagatttcagtaatgtcttcagtggaacacaaatgaaaatgaatagcttgtttctgtcaagcatattggaaagtgattttatttttgcaaaataagtttttctttaatatgattctagtacataattgattaaaatctcttgattataaatgtttggaaaggttctaaggggacctacagacagacatacatagacatttcaaaattaatagctttt

SEQ ID NO: 123445 - DNA, 2473 bp, Homo sapiens
  Payload ID: 4241
  Gene Symbol: CCNC
  Gene Name: cyclin C
  Uniprot ID: P24863
  ENST ID: ENST00000520429
  CDS Start-End: 447-1298
aacagaaccccgtatctgagccacttcgcctaggttagacccactcagcaactcccgtgctgaagacaggagaccgagcggcttgggcccccggccagaattctcaagacgctctcgcgagagccttccaaccgccgcgagctctcgtgaacactagttctcttcaatctcagcacctccaagggtcagcacctcccctccggctccctccgctaccgcgggccggaacttttgtcgataggaacgggtttgcacagttgagtgttgtcggccggcgtgaaggagactagggggccatcctcttcctttcgccgtcgccgccgcggagcggagtcgagccgagctgatttgatcgaggagcgcggttaccggacgggctgggtctatggtcgctccgcgggccgctccgccggctggtgcttttttatcagggcaagctgtgttccatggcagggaacttttggcagagctcccactatttgcaatggattttggataaacaagatctgttgaaggagcgccaaaaggatttaaagtttctctcagaggaagaatattggaagttacaaatattttttacaaatgttatccaagcattaggtgaacatcttaaattaagacaacaagttattgccactgctacggtatatttcaagagattctatgccaggtattctctgaaaagtatagatcctgtattaatggctcctacatgtgtgtttttggcatccaaagtagaggaatttggagtagtttcaaatacaagattgattgctgctgctacttctgtattaaaaactagattttcatatgcctttccaaaggaatttccttataggatgaatcatatattagaatgtgaattctatctgttagaactaatggattgttgcttgatagtgtatcatccttatagacctttgctccagtatgtgcaggacatgggccaagaagacatgttgcttccccttgcatggaggatagtgaatgatacctacagaacggatctttgcctactgtatcctcctttcatgatagctttagcttgcctacatgtagcctgtgttgtacagcagaaagatgccaggcaatggtttgctgagctttctgtggatatggaaaagattttggaaataatcagggttattttaaaactatatgagcagtggaagaatttcgatgagagaaaagagatggcaaccattcttagtaagatgccaaaaccaaaaccacctccaaacagtgaaggagagcagggtccaaatggaagtcagaactctagctacagccaatcttaaaacattccgaagaattccatagtggaccacttggaaataaaccattggacagatttcagtaatgtcttcagtggaacacaaatgaaaatgaatagcttgtttctgtcaagcatattggaaagtgattttatttttgcaaaataagtttttctttaatatgattctagtacataattgattaaaatctcttgattataaatgtttggaaaggttctaaggggacctacagacagacatacatagacatttcaaaattaatagcttttgattagtataatatttcttaatttggataataaaaattgtagctttttattaagccaggaaacatgaagcataatttgtttaaaattctctttggtcattgagggaccaaaaaaggacgtaaaatttacagtcaatctatgagggtttttttccctccataagtttaactttaaaactgtatttaaggaatcaaatcttacaaaatcctggaagattttggtaatgatgttgataatttcagggaaattaatcaagtacctatattgatttaaaagtgtattttattcagtagtttgaggatcttgccatggaagatactagcccagcctagcagaaaagtgcaatatgtatagcatactttgacattttaaacatgatagtccataaccattttgaaatgctgggcaaactacatgaagttatttataattaattcacagctaatcaggcattttgaaagcttaattggattcaaaaaccataatgttggaatttggtaaaattttaatgttgatttttactgtgaaaaggtttttataagatatacacaccctagtttaatgttgtgtcttggtgtggatttacagatttactacaggtattctgaaccaggaacacaatcaggtttcaggccagtttgatactggctgtccttaattctaatatgagagtaggacatcatactaaatgttatgtcagtgggactgtactgtctgtggaacttagcaaattaatcattttcttcagacttgaaggagagtgataaataaaatttggagtcataggatattgatgcacaatttaaggattaaacatttttaatcaattgtggatgatggcttattaaatgttgacttcctagtataaaactgcaagaataaaagtaacttctccagctgtatcgacta

SEQ ID NO: 123446 - DNA, 1035 bp, Homo sapiens
  Payload ID: 4241
  Gene Symbol: CCNC
  Gene Name: cyclin C
  Uniprot ID: P24863
  ENST ID: ENST00000523799
  CDS Start-End: 332-928
gaacactagttctcttcaatctcagcacctccaagggtcagcacctcccctccggctccctccgctaccgcgggccggaacttttgtcgataggaacgggtttgcacatttgcaatggattttggataaacaagatctgttgaaggagcgccaaaaggatttaaagtttctctcagaggaagaatattggaagttacaaatattttttacaaatgttatccaagcattaggtgaacatcttaaattaagacaacaagttattgccactgctacggtatatttcaagagattctatgccaggtattctctgaaaagtatagatcctgtattaatggctcctacatgtgtgtttttggcatccaaagtagaggaatttggagtagtttcaaatacaagattgattgctgctgctacttctgtattaaaaactagattttcatatgcctttccaaaggaatttccttataggatgaatcatatattagaatgtgaattctatctgttagaactaatggattgttgcttgatagtgtatcatccttatagacctttgctccagtatgtgcaggacatgggccaagaagacatgttgcttccccttgcatggaggatagtgaatgatacctacagaacggatctttgcctactgtatcctcctttcatgatagctttagcttgcctacatgtagcctgtgttgtacagcagaaagatgccaggcaatggtttgctgagctttctgtggatatggaaaagattttggaaataatcagggttattttaaaactatatgagcagtggaagaatttcgatgagagaaaagagatggcaaccattcttagtaagatgccaaaaccaaaaccacctccaaacagtgaaggagagcagggtccaaatggaagtcagaactctagctacagccaatcttaaaacattccgaagaattccatagtggaccacttggaaataaaccattggacagatttcagtaatgtcttcagtggaacacaaatgaaaatgaatagcttgtttctgtc

SEQ ID NO: 123447 - DNA, 849 bp, Homo sapiens
  Payload ID: 4241
  Gene Symbol: CCNC
  Gene Name: cyclin C
  ENST ID: ENST00000486428
  CDS Start-End: 1-687
cttaaattaagacaacaagttattgccactgctacggtatatttcaagagattctatgccaggtattctctgaaaagtatagatcctgtattaatggctcctacatgtgtgtttttggcatccaaagtagaggaatttggagtagtttcaaatacaagattgattgctgctgctacttctgtattaaaaactagattttcatatgcctttccaaaggaatttccttataggatgaatcatatattagaatgtgaattctatctgttagaactaatggattgttgcttgatagtgtatcatccttatagacctttgctccagtatgtgcaggacatgggccaagaagacatgttgcttccccttgcatggaggatagtgaatgatacctacagaacggatctttgcctactgtatcctcctttcatgatagctttagcttgcctacatgtagcctgtgttgtacagcagaaagatgccaggcaatggtttgctgagctttctgtggatatggaaaagattttggaaataatcagggttattttaaaactatatgagcagtggaagaatttcgatgagagaaaagagatggcaaccattcttagtaagatgccaaaaccaaaaccacctccaaacagaaattccctgagtgattctccactagtggcagggcctgaagctgcaagatgatggtggacaagataagtgaaggagagcagggtccaaatggaagtcagaactctagctacagccaatcttaaaacattccgaagaattccatagtggaccacttggaaataaaccattggacagatttcagtaatgtcttcagtggaacacaaatgaaaatga

SEQ ID NO: 123448 - DNA, 958 bp, Homo sapiens
  Payload ID: 4241
  Gene Symbol: CCNC
  Gene Name: cyclin C
  Uniprot ID: P24863
  ENST ID: ENST00000523985
  CDS Start-End: 282-878
gtcgccgccgcggagcggagtcgagccgagctgatttgatcgaggagcgcggttaccggacgggctgggtctatggtcgctccgcgggccgctccgccggctggtgcttttttatcagggcaagctgtgttccatggcagggaacttttggcagagctcccactattatccaagcattaggtgaacatcttaaattaagacaacaagttattgccactgctacggtatatttcaagagattctatgccaggtattctctgaaaagtatagatcctgtattaatggctcctacatgtgtgtttttggcatccaaagtagaggaatttggagtagtttcaaatacaagattgattgctgctgctacttctgtattaaaaactagattttcatatgcctttccaaaggaatttccttataggatgaatcatatattagaatgtgaattctatctgttagaactaatggattgttgcttgatagtgtatcatccttatagacctttgctccagtatgtgcaggacatgggccaagaagacatgttgcttccccttgcatggaggatagtgaatgatacctacagaacggatctttgcctactgtatcctcctttcatgatagctttagcttgcctacatgtagcctgtgttgtacagcagaaagatgccaggcaatggtttgctgagctttctgtggatatggaaaagattttggaaataatcagggttattttaaaactatatgagcagtggaagaatttcgatgagagaaaagagatggcaaccattcttagtaagatgccaaaaccaaaaccacctccaaacagtgaaggagagcagggtccaaatggaagtcagaactctagctacagccaatcttaaaacattccgaagaattccatagtggaccacttggaaataaaccattggacagatttcagtaatgtcttcagtggaacaca

SEQ ID NO: 123449 - DNA, 1426 bp, Homo sapiens
  Payload ID: 4241
  Gene Symbol: CCNC
  Gene Name: cyclin C
  ENST ID: ENST00000518714
  CDS Start-End: 136-984
ccgtcgccgccgcggagcggagtcgagccgagctgatttgatcgaggagcgcggttaccggacgggctgggtctatggtcgctccgcgggccgctccgccggctggtgcttttttatcagggcaagctgtgttccatggcagggaacttttggcagagctcccactatttgcaatggattttggataaacaagatctgttgaaggagcgccaaaaggatttaaagtttctctcagaggaagaatattggaagttacaaatattttttacaaatgttatccaagcattaggtgaacatcttaaattaagacaacaagttattgccactgctacggtatatttcaagagattctatgccaggtattctctgaaaagtatagatcctgtattaatggctcctacatgtgtgtttttggcatccaaagtagaggaatttggagtagtttcaaatacaagattgattgctgctgctacttctgtattaaaaactagattttcatatgcctttccaaaggaatttccttataggatgaatcatatattagaatgtgaattctatctgttagaactaatggattgttgcttgatagtgtatcatccttatagacctttgctccagtatgtgcaggacatgggccaagaagacatgttgcttccccttgcatggaggatagtgaatgatacctacagaacggatctttgcctactgtatcctcctttcatgatagctttagcttgcctacatgtagcctgtgttgtacagcagaaagatgccaggcaatggtttgctgagctttctgtggatatggaaaagattttggaaataatcagggttattttaaaactatatgagcagtggaagaatttcgatgagagaaaagagatggcaaccattcttagtaagatgccaaaaccaaaaccacctccaaacagaaattccctgagtgattctccactagtggcagggcctgaagctgcaagatgatggtggacaagataaggcaataatcctattgccaaagttactggtattttcagttttagttatttttaagtattcagcatttttattttaagtattcagcattttccaggaaattaccatatttcttgctgacttataaaggtttgctgtatttatatatgattttattatgcctttggacaacagttttggtttttttttttttttgaagaacacttcttgtttttcataaatagtaggaataggattttatatgtaagatttaattttataggaaatttgtttagaagaagctgtaatctctatgttgagtgatacctgtaataacaatgaaatcccataccctaatttaaagtttttgagtatatatggacactaacttccagaatgcttgttatatgtgagggcacaaagttatataagaataaaaacataaaaccaa

SEQ ID NO: 123450 - DNA, 2186 bp, Homo sapiens
  Payload ID: 4241
  Gene Symbol: CCNC
  Gene Name: cyclin C
  ENST ID: ENST00000520371
  CDS Start-End: 187-1035
agtgttgtcggccggcgtgaaggagactagggggccatcctcttcctttcgccgtcgccgccgcggagcggagtcgagccgagctgatttgatcgaggagcgcggttaccggacgggctgggtctatggtcgctccgcgggccgctccgccggctggtgcttttttatcagggcaagctgtgttccatggcagggaacttttggcagagctcccactatttgcaatggattttggataaacaagatctgttgaaggagcgccaaaaggatttaaagtttctctcagaggaagaatattggaagttacaaatattttttacaaatgttatccaagcattaggtgaacatcttaaattaagacaacaagttattgccactgctacggtatatttcaagagattctatgccaggtattctctgaaaagtatagatcctgtattaatggctcctacatgtgtgtttttggcatccaaagtagaggaatttggagtagtttcaaatacaagattgattgctgctgctacttctgtattaaaaactagattttcatatgcctttccaaaggaatttccttataggatgaatcatatattagaatgtgaattctatctgttagaactaatggattgttgcttgatagtgtatcatccttatagacctttgctccagtatgtgcaggacatgggccaagaagacatgttgcttccccttgcatggaggatagtgaatgatacctacagaacggatctttgcctactgtatcctcctttcatgatagctttagcttgcctacatgtagcctgtgttgtacagcagaaagatgccaggcaatggtttgctgagctttctgtggatatggaaaagattttggaaataatcagggttattttaaaactatatgagcagtggaagaatttcgatgagagaaaagagatggcaaccattcttagtaagatgccaaaaccaaaaccacctccaaacagaaattccctgagtgattctccactagtggcagggcctgaagctgcaagatgatggtggacaagataaggcaataatcctattgccaaagttactgtgaaggagagcagggtccaaatggaagtcagaactctagctacagccaatcttaaaacattccgaagaattccatagtggaccacttggaaataaaccattggacagatttcagtaatgtcttcagtggaacacaaatgaaaatgaatagcttgtttctgtcaagcatattggaaagtgattttatttttgcaaaataagtttttctttaatatgattctagtacataattgattaaaatctcttgattataaatgtttggaaaggttctaaggggacctacagacagacatacatagacatttcaaaattaatagcttttgattagtataatatttcttaatttggataataaaaattgtagctttttattaagccaggaaacatgaagcataatttgtttaaaattctctttggtcattgagggaccaaaaaaggacgtaaaatttacagtcaatctatgagggtttttttccctccataagtttaactttaaaactgtatttaaggaatcaaatcttacaaaatcctggaagattttggtaatgatgttgataatttcagggaaattaatcaagtacctatattgatttaaaagtgtattttattcagtagtttgaggatcttgccatggaagatactagcccagcctagcagaaaagtgcaatatgtatagcatactttgacattttaaacatgatagtccataaccattttgaaatgctgggcaaactacatgaagttatttataattaattcacagctaatcaggcattttgaaagcttaattggattcaaaaaccataatgttggaatttggtaaaattttaatgttgatttttactgtgaaaaggtttttataagatatacacaccctagtttaatgttgtgtcttggtgtggatttacagatttactacaggtattctgaaccaggaacacaatcaggtttcaggccagtttgatactggctgtccttaattctaatatgagagtaggacatcatactaaatgttatgtcagtgggactgtactgtctgtggaacttagcaaattaatcattttcttcagacttgaaggagagtgataaataaaatttggagtcatagg

SEQ ID NO: 123451 - DNA, 1412 bp, Homo sapiens
  Payload ID: 4241
  Gene Symbol: CCNC
  Gene Name: cyclin C
  ENST ID: ENST00000484049
  CDS Start-End: 126-470
cgcggagcggagtcgagccgagctgatttgatcgaggagcgcggttaccggacgggctgggtctatggtcgctccgcgggccgctccgccggctggtgcttttttatcagggcaagctgtgttccatggcagggaacttttggcagagctcccactatttgcaatggattttggataaacaagatctgttgaaggagcgccaaaaggatttaaagtttctctcagaggaagaatattggaagttacaaatattttttacaaatgttatccaagcattaggtgaacatcttaaattaagacaacaagttattgccactgctacggtatatttcaagagattctatgccaggtattctctgaaaagtatagatcctgtattaatggctcctacatgtgtgtttttggcatccaaagtagaggaatttggagtagtttcaaatacaagattgattgctgctgctacttcttaaaaactagattttcatatgcctttccaaaggaatttccttataggatgaatcatatattagaatgtgaattctatctgttagaactaatggattgttgcttgatagtgtatcatccttatagacctttgctccagtatgtgcaggacatgggccaagaagacatgttgcttccccttgcatggaggatagtgaatgatacctacagaacggatctttgcctactgtatcctcctttcatgatagctttagcttgcctacatgtagcctgtgttgtacagcagaaagatgccaggcaatggtttgctgagctttctgtggatatggaaaagattttggaaataatcagggttattttaaaactatatgagcagtggaagaatttcgatgagagaaaagagatggcaaccattcttagtaagatgccaaaaccaaaaccacctccaaacagaaattccctgagtgattctccactagtggcagggcctgaagctgcaagatgatggtggacaagataaggcaataatcctattgccaaagttactggtattttcagttttagttatttttaagtattcagcatttttattttaagtattcagcattttccaggaaattaccatatttcttgctgacttataaaggtttgctgtatttatatatgattttattatgcctttggacaacagttttggtttttttttttttttgaagaacacttcttgtttttcataaatagtaggaataggattttatatgtaagatttaattttataggaaatttgtttagaagaagctgtaatctctatgttgagtgatacctgtaataacaatgaaatcccataccctaatttaaagtttttgagtatatatggacactaacttccagaatgcttgttatatgtgagggcacaaagttatataagaataaaaacataaaaccaa

SEQ ID NO: 123452 - DNA, 896 bp, Homo sapiens
  Payload ID: 4241
  Gene Symbol: CCNC
  Gene Name: cyclin C
  ENST ID: ENST00000627680
  CDS Start-End: 288-896
ctcttcaatctcagcacctccaagggtcagcacctcccctccggctccctccgctaccgcgggccggaacttttgtcgataggaacgggtttgcacagttgagtgttgtcggccggcgtgaaggagactagggggccatcctcttcctttcgccgtcgccgccgcggagcggagtcgagccgagctgatttgatcgaggagcgcggttaccggacgggctgggtctatggtcgctccgcgggccgctccgccggctggtgcttttttatcagggcaagctgtgttccatggcagggaacttttggcagagctcccactatttgcaatggattttggataaacaagatctgttgaaggagcgccaaaaggatttaaagtttctctcagaggaagaatattggaagttacaaatattttttacaaatgttatccaagcattaggtgaacatcttaaattaagacaacaagttattgccactgctacggtatatttcaagagattctatgccaggtattctctgaaaagtatagatcctgtattaatggctcctacatgtgtgtttttggcatccaaagtagaggaatttggagtagtttcaaatacaagattgattgctgctgctacttctgtattaaaaactagattttcatatgcctttccaaaggaatttccttataggatgaatcatatattagaatgtgaattctatctgttagaactaatggattgttgcttgatagtgtatcatccttatagacctttgctccagtatgtgcaggacatgggccaagaagacatgttgcttccccttgcatggaggatagtgaatgatacctacagaacggatctttgcctactgtatcctcctttcatgatagctttagtaatagactaa

SEQ ID NO: 123453 - DNA, 3801 bp, Homo sapiens
  Payload ID: 4242
  Gene Symbol: DMTF1
  Gene Name: cyclin D binding myb-like transcription factor 1
  Uniprot ID: Q9Y222
  ENST ID: ENST00000331242
  CDS Start-End: 327-2609
agcgggacagacgagcgggaggggcagcgtgcggggagctgggggcggggcgcggccgcagctccgtttccggtggctcgtcgcgctcgctcactccagctgcagccactctcgcccgtggctgcttcctccatcctggtattttttggagcttccatcctggttcttccaaagtgcccggacccaaaacaggaaagtgttgcggagataggaacatgggagagaaacaatctgggtaacatgaaagtgatgctggttgctaagggaaggcaacttgattctgtgggaagggctgtagctgatccatccgttgtctagatttgagtatgagcacagtggaagaggattctgacacagtaacagtagaaactgtgaactctgtgactttgactcaggacacagaagggaatctcattcttcactgccctcagaatgaagcggatgaaatagactcagaagatagtattgaacctccacataaaaggctttgtttgtcctctgaggatgatcagagtattgatgattctactccttgcatatcagttgttgcacttccactttcagaaaatgatcagagctttgaagtgaccatgactgcaaccacagaagtagcagatgatgaggttactgaggggactgtgacacagatacagattttgcagaatgagcaactagatgaaatatctcccttgggtaacgaggaagtttcagcagttagccaagcatggtttacaactaaagaagataaggattctctgactaataaaggacataaatggaagcaggggatgtggtccaaggaagaaattgatattttgatgaacaatattgaacgctatcttaaggcacgcggaataaaagatgctacagaaatcatctttgagatgtcaaaagacgaaagaaaagatttctacaggactatagcatggggtctgaaccggcctttgtttgcagtttatagaagagtgcttcgcatgtatgatgacagaaaccatgtgggaaaatatacacctgaagaaattgagaagctcaaggagctccggataaagcatggcaatgactgggcaacaataggggcggcgctaggaagaagtgcatcttctgtcaaagatcggtgccgactgatgaaggatacttgcaacacagggaagtggacagaagaagaagaaaagagacttgcagaagtggttcatgagttgacaagcactgagccaggtgacatagtcacacagggtgtgtcttgggcagctgtggctgaacgagtcggtacccgctcagaaaagcaatgtcgttctaaatggctcaactacctgaattggaaacagagtgggggtactgaatggaccaaggaagatgaaatcaatctcatcctcaggatagcagaacttgatgtagctgatgaaaatgacattaactgggatctgttagctgagggatggagtagtgtccgttcaccacaatggctacgaagtaaatggtggaccatcaaaaggcaaattgcaaaccataaggatgtttcgttccctgtcttaataaaaggtcttaaacagttacatgagaaccaaaaaaacaacccaacgcttttggagaataaatcaggatctggagttccaaacagtaataccaattccagtgtgcagcatgttcagataagagttgcccgcttggaagataatacagccatctcttctagccccatggcagcattgcagattccagtccagatcacccatgtttcttcagcagactctcctgctaccgttgactcagaaacaataacactaaacagtggaacactacagacatttgagattcttccctctttccatctacagcccactggcactccaggcacctacctacttcaaacaagctcaagccaaggccttcccctaactctgactgctagtcccacagtaaccctgacagctgctgctcctgcttctcctgaacagattattgttcatgctttatccccagaacatttgttgaacacaagtgataatgttacagtgcagtgtcacacaccaagagtcatcattcagactgttgccacagaggacatcacttcttccatatcccaagcagaactgacagtcgatagtgatattcagtcatctgattttcctgagcctccagacgccctagaagcagacactttcccagatgaaattcatcaccctaagatgactgtggagccatcatttaatgatgctcatgtatccaaattcagtgaccaaaatagcacagaactgatgaatagtgttatggtcagaacagaagaagaaatctctgacaccgaccttaaacaagaggaatcaccctctgatttagccagtgcttatgttactgagggtttagagtctcccactatagaagaacaagttgatcaaacaattgatgatgaaacaatacttatcgttccttcaccacatggctttatccaggcatctgatgttatagatactgaatctgtcttgcctttgacaacactaacagatcccatactccaacatcatcaggaagaatcaaatatcattggatcatccttgggcagtcctgtttcagaagattcaaaggatgtcgaagatttggtaaactgtcattagaataattcttagaaataggcagttcaagcaaagaaggcacactgttaattacaacctcttcaaagaaataggagcaacccccaagaggcttaatttaccaatttaaatagccacagtccttaagccacacacattgttgctgctatgactttttacctcctttaaacacatcatctgaggttgagttttatgacagtatgtagttgagtggaggctgggagttttaagcataaatccctgtttagtgttacatgggaataaggaatttcattcacttcagccactaagaaaagtttagaatcacgaaagcttaactgctgtggtttaaagtacagtttctctaaagatcagacatggcactgtctcctctcaagcctggttgtagttcagatgagtcttttcaacatggtcttcaacatggtctagagcttaccagtgatcttctgatcttcaagaagactaagtttgagacttgaccagcatacaagtatagagacctaggaggtggtcttgtggtggtacatttggttaacccattgctggcagtgggagctgatttaggcagggtaaacaggaaagcattaaaagttaaaattcactacaggttttttgttacttttaaagggaatatggataagcatagtaacaaaacccaccagaatctaagcagttttcaccccctcagaaaccactgtcattagtttacaaagttagcactttgaagtaaaactaaatgaggaaggaagtaatgttacctatccttgataccatgaccatttattagatgttttgctatataaattaccgagagaatagtttgtcatccacttagtgtgttagctggtggggtacaatataacctctcatctcaggctattttaaaaaaacaatatttgcttctataacaaaaggaaacaaatctaagaatcattcctgtactacagaagggttaaggcaaaggtagccttttgggctttttaatgaatatgacccctatagaaaagtcaagaaaaaaaaacccttgtataaattattttatttattattgtaattagatcttcacaaagttgtcttttcactgtgttttgtcaacgtgaaattaaattgtagttataagcaaaagttggttgcctagggaacaattgtatattcagtttaacagaaataaaagaatatttgtcttaagatgcaa

SEQ ID NO: 123454 - DNA, 4038 bp, Homo sapiens
  Payload ID: 4242
  Gene Symbol: DMTF1
  Gene Name: cyclin D binding myb-like transcription factor 1
  Uniprot ID: Q9Y222
  ENST ID: ENST00000394703
  CDS Start-End: 564-2846
aagtaagtgcgatggaaccttcaggttccaaccgccgccagggccgctccgcccagtggagcctgtccggcccccttgctgcccgctagctcccgccggctggcgcaagctgtcggcgccggggcactgcgggcggggtcggagcctggccttcctgacgttgcagctgccgtccccgcacgttccggccagggcctccctcttagggccgggcggtgcccgtggctcaggctgcagagtagaaagcacaaaaaccagcctgattgtatctggaaaaaaccattatgttacagttgataggctcaccccaaaatatgcttttggggactgatttagcacctgcatattctgcgtgaatctctttaattggttgcagttgagctaatggtggagccaaaatgctattgccctgtcttcatcaacatttaatcaagtgttgcggagataggaacatgggagagaaacaatctgggtaacatgaaagtgatgctggttgctaagggaaggcaacttgattctgtgggaagggctgtagctgatccatccgttgtctagatttgagtatgagcacagtggaagaggattctgacacagtaacagtagaaactgtgaactctgtgactttgactcaggacacagaagggaatctcattcttcactgccctcagaatgaagcggatgaaatagactcagaagatagtattgaacctccacataaaaggctttgtttgtcctctgaggatgatcagagtattgatgattctactccttgcatatcagttgttgcacttccactttcagaaaatgatcagagctttgaagtgaccatgactgcaaccacagaagtagcagatgatgaggttactgaggggactgtgacacagatacagattttgcagaatgagcaactagatgaaatatctcccttgggtaacgaggaagtttcagcagttagccaagcatggtttacaactaaagaagataaggattctctgactaataaaggacataaatggaagcaggggatgtggtccaaggaagaaattgatattttgatgaacaatattgaacgctatcttaaggcacgcggaataaaagatgctacagaaatcatctttgagatgtcaaaagacgaaagaaaagatttctacaggactatagcatggggtctgaaccggcctttgtttgcagtttatagaagagtgcttcgcatgtatgatgacagaaaccatgtgggaaaatatacacctgaagaaattgagaagctcaaggagctccggataaagcatggcaatgactgggcaacaataggggcggcgctaggaagaagtgcatcttctgtcaaagatcggtgccgactgatgaaggatacttgcaacacagggaagtggacagaagaagaagaaaagagacttgcagaagtggttcatgagttgacaagcactgagccaggtgacatagtcacacagggtgtgtcttgggcagctgtggctgaacgagtcggtacccgctcagaaaagcaatgtcgttctaaatggctcaactacctgaattggaaacagagtgggggtactgaatggaccaaggaagatgaaatcaatctcatcctcaggatagcagaacttgatgtagctgatgaaaatgacattaactgggatctgttagctgagggatggagtagtgtccgttcaccacaatggctacgaagtaaatggtggaccatcaaaaggcaaattgcaaaccataaggatgtttcgttccctgtcttaataaaaggtcttaaacagttacatgagaaccaaaaaaacaacccaacgcttttggagaataaatcaggatctggagttccaaacagtaataccaattccagtgtgcagcatgttcagataagagttgcccgcttggaagataatacagccatctcttctagccccatggcagcattgcagattccagtccagatcacccatgtttcttcagcagactctcctgctaccgttgactcagaaacaataacactaaacagtggaacactacagacatttgagattcttccctctttccatctacagcccactggcactccaggcacctacctacttcaaacaagctcaagccaaggccttcccctaactctgactgctagtcccacagtaaccctgacagctgctgctcctgcttctcctgaacagattattgttcatgctttatccccagaacatttgttgaacacaagtgataatgttacagtgcagtgtcacacaccaagagtcatcattcagactgttgccacagaggacatcacttcttccatatcccaagcagaactgacagtcgatagtgatattcagtcatctgattttcctgagcctccagacgccctagaagcagacactttcccagatgaaattcatcaccctaagatgactgtggagccatcatttaatgatgctcatgtatccaaattcagtgaccaaaatagcacagaactgatgaatagtgttatggtcagaacagaagaagaaatctctgacaccgaccttaaacaagaggaatcaccctctgatttagccagtgcttatgttactgagggtttagagtctcccactatagaagaacaagttgatcaaacaattgatgatgaaacaatacttatcgttccttcaccacatggctttatccaggcatctgatgttatagatactgaatctgtcttgcctttgacaacactaacagatcccatactccaacatcatcaggaagaatcaaatatcattggatcatccttgggcagtcctgtttcagaagattcaaaggatgtcgaagatttggtaaactgtcattagaataattcttagaaataggcagttcaagcaaagaaggcacactgttaattacaacctcttcaaagaaataggagcaacccccaagaggcttaatttaccaatttaaatagccacagtccttaagccacacacattgttgctgctatgactttttacctcctttaaacacatcatctgaggttgagttttatgacagtatgtagttgagtggaggctgggagttttaagcataaatccctgtttagtgttacatgggaataaggaatttcattcacttcagccactaagaaaagtttagaatcacgaaagcttaactgctgtggtttaaagtacagtttctctaaagatcagacatggcactgtctcctctcaagcctggttgtagttcagatgagtcttttcaacatggtcttcaacatggtctagagcttaccagtgatcttctgatcttcaagaagactaagtttgagacttgaccagcatacaagtatagagacctaggaggtggtcttgtggtggtacatttggttaacccattgctggcagtgggagctgatttaggcagggtaaacaggaaagcattaaaagttaaaattcactacaggttttttgttacttttaaagggaatatggataagcatagtaacaaaacccaccagaatctaagcagttttcaccccctcagaaaccactgtcattagtttacaaagttagcactttgaagtaaaactaaatgaggaaggaagtaatgttacctatccttgataccatgaccatttattagatgttttgctatataaattaccgagagaatagtttgtcatccacttagtgtgttagctggtggggtacaatataacctctcatctcaggctattttaaaaaaacaatatttgcttctataacaaaaggaaacaaatctaagaatcattcctgtactacagaagggttaaggcaaaggtagccttttgggctttttaatgaatatgacccctatagaaaagtcaagaaaaaaaaacccttgtataaattattttatttattattgtaattagatcttcacaaagttgtcttttcactgtgttttgtcaacgtgaaattaaattgtagttataagcaaaagttggttgcctagggaacaattgtatattcagtttaacagaaataaaagaatatttgtcttaagatgcaa

SEQ ID NO: 123455 - DNA, 783 bp, Homo sapiens
  Payload ID: 4242
  Gene Symbol: DMTF1
  Gene Name: cyclin D binding myb-like transcription factor 1
  ENST ID: ENST00000449088
  CDS Start-End: 374-783
actccagctgcagccactctcgcccgtggctgcttcctccatcctggtattttttggagcttccatcctggttcttccaaagtgcccggacccaaaacaggaattgataggctcaccccaaaatatgcttttggggactgatttagcacctgcatattctgcgtgaatctctttaattggttgcagttgagctaatggtggagccaaaatgctattgccctgtcttcatcaacatttaatcaagtgttgcggagataggaacatgggagagaaacaatctgggtaacatgaaagtgatgctggttgctaagggaaggcaacttgattctgtgggaagggctgtagctgatccatccgttgtctagatttgagtatgagcacagtggaagaggattctgacacagtaacagtagaaactgtgaactctgtgactttgactcaggacacagaagggaatctcattcttcactgccctcagaatgaagcggatgaaatagactcagaagatagtattgaacctccacataaaaggctttgtttgtcctctgaggatgatcagagtattgatgattctactccttgcatatcagttgttgcacttccactttcagaaaatgatcagagctttgaagtgaccatgactgcaaccacagaagtagcagatgatgaggttactgaggggactgtgacacagatacagattttgcagaatgagcaactagatgaaatatctcccttgggtaacgaggaagtttcagcagttagccaagcatggtttacaac

SEQ ID NO: 123456 - DNA, 3954 bp, Homo sapiens
  Payload ID: 4242
  Gene Symbol: DMTF1
  Gene Name: cyclin D binding myb-like transcription factor 1
  Uniprot ID: Q9Y222
  ENST ID: ENST00000447863
  CDS Start-End: 276-1133
gcggccgcagctccgtttccggtggctcgtcgcgctcgctcactccagctgcagccactctcgcccgtggctgcttcctccatcctggtattttttggagcttccatcctggttcttccaaagtgcccggacccaaaacaggaaagtgttgcggagataggaacatgggagagaaacaatctgggtaacatgaaagtgatgctggttgctaagggaaggcaacttgattctgtgggaagggctgtagctgatccatccgttgtctagatttgagtatgagcacagtggaagaggattctgacacagtaacagtagaaactgtgaactctgtgactttgactcaggacacagaagggaatctcattcttcactgccctcagaatgaagcggatgaaatagactcagaagatagtattgaacctccacataaaaggctttgtttgtcctctgaggatgatcagagtattgatgattctactccttgcatatcagttgttgcacttccactttcagaaaatgatcagagctttgaagtgaccatgactgcaaccacagaagtagcagatgatgaggttactgaggggactgtgacacagatacagattttgcagaatgagcaactagatgaaatatctcccttgggtaacgaggaagtttcagcagttagccaagcatggtttacaactaaagaagataaggattctctgactaataaaggacataaatggaagcaggggatgtggtccaaggaagaaattgatattttgatgaacaatattgaacgctatcttaaggcacgcggaataaaagatgctacagaaatcatctttgagatgtcaaaagacgaaagaaaagatttctacaggactatagcatggggtctgaaccggcctttgtttgcagtttatagaagagtgcttcgcatgtatgatgacagaaaccatgtgggaaaatatacacctgaagaaattgagaagctcaaggagaaaaaggcaattgctgcctgtttttttttcacccacagacaactgtggaccccaaaaaaaggccacactttcaaactttggctctcaaagtattgctgcccacaacttccaaaccagtcaaatgggaagaagaagaatgaagaataaatgatgaaattaaaagggagaaaacaattgaaccaaatgctgattggcagactcttgttttaggctccggataaagcatggcaatgactgggcaacaataggggcggcgctaggaagaagtgcatcttctgtcaaagatcggtgccgactgatgaaggatacttgcaacacagggaagtggacagaagaagaagaaaagagacttgcagaagtggttcatgagttgacaagcactgagccaggtgacatagtcacacagggtgtgtcttgggcagctgtggctgaacgagtcggtacccgctcagaaaagcaatgtcgttctaaatggctcaactacctgaattggaaacagagtgggggtactgaatggaccaaggaagatgaaatcaatctcatcctcaggatagcagaacttgatgtagctgatgaaaatgacattaactgggatctgttagctgagggatggagtagtgtccgttcaccacaatggctacgaagtaaatggtggaccatcaaaaggcaaattgcaaaccataaggatgtttcgttccctgtcttaataaaaggtcttaaacagttacatgagaaccaaaaaaacaacccaacgcttttggagaataaatcaggatctggagttccaaacagtaataccaattccagtgtgcagcatgttcagataagagttgcccgcttggaagataatacagccatctcttctagccccatggcagcattgcagattccagtccagatcacccatgtttcttcagcagactctcctgctaccgttgactcagaaacaataacactaaacagtggaacactacagacatttgagattcttccctctttccatctacagcccactggcactccaggcacctacctacttcaaacaagctcaagccaaggccttcccctaactctgactgctagtcccacagtaaccctgacagctgctgctcctgcttctcctgaacagattattgttcatgctttatccccagaacatttgttgaacacaagtgataatgttacagtgcagtgtcacacaccaagagtcatcattcagactgttgccacagaggacatcacttcttccatatcccaagcagaactgacagtcgatagtgatattcagtcatctgattttcctgagcctccagacgccctagaagcagacactttcccagatgaaattcatcaccctaagatgactgtggagccatcatttaatgatgctcatgtatccaaattcagtgaccaaaatagcacagaactgatgaatagtgttatggtcagaacagaagaagaaatctctgacaccgaccttaaacaagaggaatcaccctctgatttagccagtgcttatgttactgagggtttagagtctcccactatagaagaacaagttgatcaaacaattgatgatgaaacaatacttatcgttccttcaccacatggctttatccaggcatctgatgttatagatactgaatctgtcttgcctttgacaacactaacagatcccatactccaacatcatcaggaagaatcaaatatcattggatcatccttgggcagtcctgtttcagaagattcaaaggatgtcgaagatttggtaaactgtcattagaataattcttagaaataggcagttcaagcaaagaaggcacactgttaattacaacctcttcaaagaaataggagcaacccccaagaggcttaatttaccaatttaaatagccacagtccttaagccacacacattgttgctgctatgactttttacctcctttaaacacatcatctgaggttgagttttatgacagtatgtagttgagtggaggctgggagttttaagcataaatccctgtttagtgttacatgggaataaggaatttcattcacttcagccactaagaaaagtttagaatcacgaaagcttaactgctgtggtttaaagtacagtttctctaaagatcagacatggcactgtctcctctcaagcctggttgtagttcagatgagtcttttcaacatggtcttcaacatggtctagagcttaccagtgatcttctgatcttcaagaagactaagtttgagacttgaccagcatacaagtatagagacctaggaggtggtcttgtggtggtacatttggttaacccattgctggcagtgggagctgatttaggcagggtaaacaggaaagcattaaaagttaaaattcactacaggttttttgttacttttaaagggaatatggataagcatagtaacaaaacccaccagaatctaagcagttttcaccccctcagaaaccactgtcattagtttacaaagttagcactttgaagtaaaactaaatgaggaaggaagtaatgttacctatccttgataccatgaccatttattagatgttttgctatataaattaccgagagaatagtttgtcatccacttagtgtgttagctggtggggtacaatataacctctcatctcaggctattttaaaaaaacaatatttgcttctataacaaaaggaaacaaatctaagaatcattcctgtactacagaagggttaaggcaaaggtagccttttgggctttttaatgaatatgacccctatagaaaagtcaagaaaaaaaaacccttgtataaattattttatttattattgtaattagatcttcacaaagttgtcttttcactgtgttttgtcaacgtgaaattaaattgtagttataagcaaaagttggttgcctagggaacaattgtatattcagtttaacagaaataaaagaatatttgtcttaa

SEQ ID NO: 123457 - DNA, 581 bp, Homo sapiens
  Payload ID: 4242
  Gene Symbol: DMTF1
  Gene Name: cyclin D binding myb-like transcription factor 1
  ENST ID: ENST00000434534
  CDS Start-End: 293-581
gctgcccgctagctcccgccggctggcgcaagctgtcggcgccggggcactgcgggcggggtcggagcctggccttcctgacgttgcagctgccgtccccgcacgttccggccagggcctccctcttagggccgggcggtgcccgtggctcaggctgcagaagtgttgcggagataggaacatgggagagaaacaatctgggtaacatgaaagtgatgctggttgctaagggaaggcaacttgattctgtgggaagggctgtagctgatccatccgttgtctagatttgagtatgagcacagtggaagaggattctgacacagtaacagtagaaactgtgaactctgtgactttgactcaggacacagaagggaatctcattcttcactgccctcagaatgaagcggatgaaatagactcagaagatagtattgaacctccacataaaaggctttgtttgtcctctgaggatgatcagagtattgatgattctactccttgcatatcagttgttgcacttccactttcagaaaatgatcagagctttgaagtgaccatgactgcaaccacagaagtagcag

SEQ ID NO: 123458 - DNA, 585 bp, Homo sapiens
  Payload ID: 4242
  Gene Symbol: DMTF1
  Gene Name: cyclin D binding myb-like transcription factor 1
  ENST ID: ENST00000453049
  CDS Start-End: 314-585
cactccagctgcagccactctcgcccgtggctgcttcctccatcctggtattttttggagcttccatcctggttcttccaaagtgcccggacccaaaacaggaaagtgttgcggagataggaacatgggagagaaacaatctgggtaacatgaaagtgatgctggttgctaagggaaggcaacttgattctgtgggaagggctgtagctgatccatccgttgtctagccatgagatgctatattctgagactagttattccatctgtctgaacaagaggaaaataatatttgtgtaaaatagcagatttgagtatgagcacagtggaagaggattctgacacagtaacagtagaaactgtgaactctgtgactttgactcaggacacagaagggaatctcattcttcactgccctcagaatgaagcggatgaaatagactcagaagatagtattgaacctccacataaaaggctttgtttgtcctctgaggatgatcagagtattgatgattctactccttgcatatcagttgttgcacttccactttcagaaaatgatcagagctttgaagtgaccatgactgc

SEQ ID NO: 123459 - DNA, 610 bp, Homo sapiens
  Payload ID: 4242
  Gene Symbol: DMTF1
  Gene Name: cyclin D binding myb-like transcription factor 1
  ENST ID: ENST00000446796
  CDS Start-End: 356-610
gtttccggtggctcgtcgcgctcgctcactccagctgcagccactctcgcccgtggctgcttcctccatcctggtattttttggagcttccatcctggttcttccaaagtgcccggacccaaaacaggaaagaacgtttgtctgcctgatgagagccacttgggttaagaaactacctgtgaatagtcatcatttctgtccttcattggggaatacttttagagagtgttgcggagataggaacatgggagagaaacaatctgggtaacatgaaagtgatgctggttgctaagggaaggcaacttgattctgtgggaagggctgtagctgatccatccgttgtctagatttgagtatgagcacagtggaagaggattctgacacagtaacagtagaaactgtgaactctgtgactttgactcaggacacagaagggaatctcattcttcactgccctcagaatgaagcggatgaaatagactcagaagatagtattgaacctccacataaaaggctttgtttgtcctctgaggatgatcagagtattgatgattctactccttgcatatcagttgttgcacttccactttcagaaaatgatcagagcttt

SEQ ID NO: 123460 - DNA, 3548 bp, Homo sapiens
  Payload ID: 4242
  Gene Symbol: DMTF1
  Gene Name: cyclin D binding myb-like transcription factor 1
  ENST ID: ENST00000413276
  CDS Start-End: 279-2351
ggcgcggccgcagctccgtttccggtggctcgtcgcgctcgctcactccagctgcagccactctcgcccgtggctgcttcctccatcctggtattttttggagcttccatcctggttcttccaaagtgcccggacccaaaacaggaaagtgttgcggagataggaacatgggagagaaacaatctgggtaacatgaaagtgatgctggttgctaagggaaggcaacttgattctgtgggaagggctgtagctgatccatccgttgtctagatttgagtatgagcacagtggaagaggattctgacacagtaacagtagaaactgtgaactctgtgactttgactcaggacacagaagggaatctcattcttcactgccctcagaatgaagcggatgaaatagactcagaagatagtattgaacctccacataaaaggctttgtttgtcctctgaggatgatcagagtattgatgattctactccttgcatatcagttgttgcacttccactttcagaaaatgatcagagctttgaagtgaccatgactgcaaccacagaagtagcagatgatgaggttactgaggggactgtgacacagatacagattttgcagaatgagcaactagatgaaatatctcccttgggtaacgaggaagtttcagcagttagccaagcatggtttacaactaaagaagataaggattctctgactaataaaggacataaatggaagcaggggatgtggtccaaggaagaaattgatattttgatgaacaatattgaacgctatcttaaggcacgcggaataaaagatgctacagaaatcatctttgagatgtcaaaagacgaaagaaaagatttctacaggactatagcatggggtctgaaccggcctttgtttgcagtttatagaagagtgcttcgcatgtatgatgacagaaaccatgtgggaaaatatacacctgaagaaattgagaagctcaaggagctccggataaagcatggcaatgactgggcaacaataggggcggcgctaggaagaagtgcatcttctgtcaaagatcggtgccgactgatgaaggatacttgcaacacagggaagtggacagaagaagaagaaaagagacttgcagaagtggttcatgagttgacaagcactgagccaggtgacatagtcacacagggtgtgtcttgggcagctgtggctgaacgagtcggtacccgctcagaaaagcaatgtcgttctaaatggctcaactacctgaattggaaacagagtgggggtactgaatggaccaaggaagatgaaatcaatctcatcctcaggatagcagaacttgatgtagctgatgaaaatgacattaactgggatctgttagctgagggatggagtagtgtccgttcaccacaatggctacgaagtaaatggtggaccatcaaaaggcaaattgcaaaccataaggatgtttcgttccctgcttcagcagactctcctgctaccgttgactcagaaacaataacactaaacagtggaacactacagacatttgagattcttccctctttccatctacagcccactggcactccaggcacctacctacttcaaacaagctcaagccaaggccttcccctaactctgactgctagtcccacagtaaccctgacagctgctgctcctgcttctcctgaacagattattgttcatgctttatccccagaacatttgttgaacacaagtgataatgttacagtgcagtgtcacacaccaagagtcatcattcagactgttgccacagaggacatcacttcttccatatcccaagcagaactgacagtcgatagtgatattcagtcatctgattttcctgagcctccagacgccctagaagcagacactttcccagatgaaattcatcaccctaagatgactgtggagccatcatttaatgatgctcatgtatccaaattcagtgaccaaaatagcacagaactgatgaatagtgttatggtcagaacagaagaagaaatctctgacaccgaccttaaacaagaggaatcaccctctgatttagccagtgcttatgttactgagggtttagagtctcccactatagaagaacaagttgatcaaacaattgatgatgaaacaatacttatcgttccttcaccacatggctttatccaggcatctgatgttatagatactgaatctgtcttgcctttgacaacactaacagatcccatactccaacatcatcaggaagaatcaaatatcattggatcatccttgggcagtcctgtttcagaagattcaaaggatgtcgaagatttggtaaactgtcattagaataattcttagaaataggcagttcaagcaaagaaggcacactgttaattacaacctcttcaaagaaataggagcaacccccaagaggcttaatttaccaatttaaatagccacagtccttaagccacacacattgttgctgctatgactttttacctcctttaaacacatcatctgaggttgagttttatgacagtatgtagttgagtggaggctgggagttttaagcataaatccctgtttagtgttacatgggaataaggaatttcattcacttcagccactaagaaaagtttagaatcacgaaagcttaactgctgtggtttaaagtacagtttctctaaagatcagacatggcactgtctcctctcaagcctggttgtagttcagatgagtcttttcaacatggtcttcaacatggtctagagcttaccagtgatcttctgatcttcaagaagactaagtttgagacttgaccagcatacaagtatagagacctaggaggtggtcttgtggtggtacatttggttaacccattgctggcagtgggagctgatttaggcagggtaaacaggaaagcattaaaagttaaaattcactacaggttttttgttacttttaaagggaatatggataagcatagtaacaaaacccaccagaatctaagcagttttcaccccctcagaaaccactgtcattagtttacaaagttagcactttgaagtaaaactaaatgaggaaggaagtaatgttacctatccttgataccatgaccatttattagatgttttgctatataaattaccgagagaatagtttgtcatccacttagtgtgttagctggtggggtacaatataacctctcatctcaggctattttaaaaaaacaatatttgcttctataacaaaaggaaacaaatctaagaatcattcctgtactacagaagggttaaggcaaaggtagccttttgggctttttaatgaatatgacccctatagaaaagtcaagaaaaaaaaacccttgtataaattattttatttattattgtaattagatcttcacaaagttgtcttttcactgtgttttgtcaacgtgaaattaaattgtagttataagcaaaagttggttgcctagggaacaattgtatattcagtttaacagaaataaaagaatatttgtcttaagatgcaagattt

SEQ ID NO: 123461 - DNA, 568 bp, Homo sapiens
  Payload ID: 4242
  Gene Symbol: DMTF1
  Gene Name: cyclin D binding myb-like transcription factor 1
  ENST ID: ENST00000420131
  CDS Start-End: 538-568
gctcgtcgcgctcgctcactccagctgcagccactctcgcccgtggctgcttcctccatcctggtattttttggagcttccatcctggttcttccaaagtgcccggacccaaaacaggaattgataggctcaccccaaaatatgcttttggggactgatttagcacctgcatattctgcgtgaatctctttaattggttgcagttgagctaatggtggagccaaaatgctattgccctgtcttcatcaacatttaatcaagtgttgcggagataggaacatgggagagaaacaatctgggtaacatgaaagtgatgctggttgctaagggaaggcaacttgattctgtgggaagggctgtagctgatccatccgttgtctagaagcggatgaaatagactcagaagatagtattgaacctccacataaaaggctttgtttgtcctctgaggatgatcagagtattgatgattctactccttgcatatcagttgttgcacttccactttcagaaaatgatcagagctttgaagtgaccatgactgcaaccacagaagtagcagatgatg

SEQ ID NO: 123462 - DNA, 4460 bp, Homo sapiens
  Payload ID: 4242
  Gene Symbol: DMTF1
  Gene Name: cyclin D binding myb-like transcription factor 1
  Uniprot ID: Q9Y222
  ENST ID: ENST00000412139
  CDS Start-End: 823-1641
ctttaaaaaccatttcatatttcataaagtttcacattgctttcaagagcttgtaatttgtcttttctggcctaattgtttaaggttttgtttttgttttttccacagattcctagatagggttgttcatctgtcatcttaaaagggttttctggatgaatagggtactatataatttttaatgctttaagataaaacataaagaggtgttaataattataaaggaaaactatagttactaataatatttatggtgctgtattgattgatatacacatcatgttacataatggtaccacagtctacagttcatagaatcactagcatagctgagcctgttttttttttttttttcagagaacgtttgtctgcctgatgagagccacttgggttaagaaactacctgtgaatagtcatcatttctgtccttcattggggaatacttttagaggccagtttccaaaaattctgcttaaaaaagaattctggttttgtcttactcttccagatgagatatcacagaggcttgggcctagattgtcatcagcatactgctatactattcgtttgttcttattaagccttattgtgtgtaatgctgttactttttcagagtgttgcggagataggaacatgggagagaaacaatctgggtaacatgaaagtgatgctggttgctaagggaaggcaacttgattctgtgggaagggctgtagctgatccatccgttgtctagccatgagatgctatattctgagactagttattccatctgtctgaacaagaggaaaataatatttgtgtaaaatagcagatttgagtatgagcacagtggaagaggattctgacacagtaacagtagaaactgtgaactctgtgactttgactcaggacacagaagggaatctcattcttcactgccctcagaatgaagcggatgaaatagactcagaagatagtattgaacctccacataaaaggctttgtttgtcctctgaggatgatcagagtattgatgattctactccttgcatatcagttgttgcacttccactttcagaaaatgatcagagctttgaagtgaccatgactgcaaccacagaagtagcagatgatgaggttactgaggggactgtgacacagatacagattttgcagaatgagcaactagatgaaatatctcccttgggtaacgaggaagtttcagcagttagccaagcatggtttacaactaaagaagataaggattctctgactaataaaggacataaatggaagcaggggatgtggtccaaggaagaaattgatattttgatgaacaatattgaacgctatcttaaggcacgcggaataaaagatgctacagaaatcatctttgagatgtcaaaagacgaaagaaaagatttctacaggactatagcatggggtctgaaccggcctttgtttgcagtttatagaagagtgcttcgcatgtatgatgacagaaaccatgtgggaaaatatacacctgaagaaattgagaagctcaaggaacaactgtggaccccaaaaaaaggccacactttcaaactttggctctcaaagtattgctgcccacaacttccaaaccagtcaaatgggaagaagaagaatgaagaataaatgatgaaattaaaagggagaaaacaattgaaccaaatgctgattggcagactcttgttttaggctccggataaagcatggcaatgactgggcaacaataggggcggcgctaggaagaagtgcatcttctgtcaaagatcggtgccgactgatgaaggatacttgcaacacagggaagtggacagaagaagaagaaaagagacttgcagaagtggttcatgagttgacaagcactgagccaggtgacatagtcacacagggtgtgtcttgggcagctgtggctgaacgagtcggtacccgctcagaaaagcaatgtcgttctaaatggctcaactacctgaattggaaacagagtgggggtactgaatggaccaaggaagatgaaatcaatctcatcctcaggatagcagaacttgatgtagctgatgaaaatgacattaactgggatctgttagctgagggatggagtagtgtccgttcaccacaatggctacgaagtaaatggtggaccatcaaaaggcaaattgcaaaccataaggatgtttcgttccctgtcttaataaaaggtcttaaacagttacatgagaaccaaaaaaacaacccaacgcttttggagaataaatcaggatctggagttccaaacagtaataccaattccagtgtgcagcatgttcagataagagttgcccgcttggaagataatacagccatctcttctagccccatggcagcattgcagattccagtccagatcacccatgtttcttcagcagactctcctgctaccgttgactcagaaacaataacactaaacagtggaacactacagacatttgagattcttccctctttccatctacagcccactggcactccaggcacctacctacttcaaacaagctcaagccaaggccttcccctaactctgactgctagtcccacagtaaccctgacagctgctgctcctgcttctcctgaacagattattgttcatgctttatccccagaacatttgttgaacacaagtgataatgttacagtgcagtgtcacacaccaagagtcatcattcagactgttgccacagaggacatcacttcttccatatcccaagcagaactgacagtcgatagtgatattcagtcatctgattttcctgagcctccagacgccctagaagcagacactttcccagatgaaattcatcaccctaagatgactgtggagccatcatttaatgatgctcatgtatccaaattcagtgaccaaaatagcacagaactgatgaatagtgttatggtcagaacagaagaagaaatctctgacaccgaccttaaacaagaggaatcaccctctgatttagccagtgcttatgttactgagggtttagagtctcccactatagaagaacaagttgatcaaacaattgatgatgaaacaatacttatcgttccttcaccacatggctttatccaggcatctgatgttatagatactgaatctgtcttgcctttgacaacactaacagatcccatactccaacatcatcaggaagaatcaaatatcattggatcatccttgggcagtcctgtttcagaagattcaaaggatgtcgaagatttggtaaactgtcattagaataattcttagaaataggcagttcaagcaaagaaggcacactgttaattacaacctcttcaaagaaataggagcaacccccaagaggcttaatttaccaatttaaatagccacagtccttaagccacacacattgttgctgctatgactttttacctcctttaaacacatcatctgaggttgagttttatgacagtatgtagttgagtggaggctgggagttttaagcataaatccctgtttagtgttacatgggaataaggaatttcattcacttcagccactaagaaaagtttagaatcacgaaagcttaactgctgtggtttaaagtacagtttctctaaagatcagacatggcactgtctcctctcaagcctggttgtagttcagatgagtcttttcaacatggtcttcaacatggtctagagcttaccagtgatcttctgatcttcaagaagactaagtttgagacttgaccagcatacaagtatagagacctaggaggtggtcttgtggtggtacatttggttaacccattgctggcagtgggagctgatttaggcagggtaaacaggaaagcattaaaagttaaaattcactacaggttttttgttacttttaaagggaatatggataagcatagtaacaaaacccaccagaatctaagcagttttcaccccctcagaaaccactgtcattagtttacaaagttagcactttgaagtaaaactaaatgaggaaggaagtaatgttacctatccttgataccatgaccatttattagatgttttgctatataaattaccgagagaatagtttgtcatccacttagtgtgttagctggtggggtacaatataacctctcatctcaggctattttaaaaaaacaatatttgcttctataacaaaaggaaacaaatctaagaatcattcctgtactacagaagggttaaggcaaaggtagccttttgggctttttaatgaatatgacccctatagaaaagtcaagaaaaaaaaacccttgtataaattattttatttattattgtaattagatcttcacaaagttgtcttttcactgtgttttgtcaacgtgaaattaaattgtagttataagcaaaagttggttgcctagggaacaattgtatattcagtttaacagaaataaaagaatatttgtctt

SEQ ID NO: 123463 - DNA, 1158 bp, Homo sapiens
  Payload ID: 4242
  Gene Symbol: DMTF1
  Gene Name: cyclin D binding myb-like transcription factor 1
  ENST ID: ENST00000454008
  CDS Start-End: 1-530
tgacagctgctgctcctgcttctcctgaacagattattgttcatgctttatccccagaacatttgttgaacacaagtgataatgttacagtgcagtgtcacacaccaagagtcatcattcagactgttgccacagaggacatcacttcttccatatcccaagcagaactgacagtcgatagtgatattcagtcatctgattttcctgagcctccagacgccctagaagcagacactttcccagatgaaattcatcaccctaagatgactgtggagccatcatttaatgatgctcatgtatccaaattcagtgaccaaaatagcacagaactgatgaatagtgttatggtcagaacagaagaagaaatctctgacaccgaccttaaacaagaggaatcaccctctgatttagccagtgcttatgttactgagatcccatactccaacatcatcaggaagaatcaaatatcattggatcatccttgggcagtcctgtttcagaagattcaaaggatgtcgaagatttggtaaactgtcattagaataattcttagaaataggcagttcaagcaaagaaggcacactgttaattacaacctcttcaaagaaataggagcaacccccaagaggcttaatttaccaatttaaatagccacagtccttaagccacacacattgttgctgctatgactttttacctcctttaaacacatcatctgaggttgagttttatgacagtatgtagttgagtggaggctgggagttttaagcataaatccctgtttagtgttacatgggaataaggaatttcattcacttcagccactaagaaaagtttagaatcacgaaagcttaactgctgtggtttaaagtacagtttctctaaagatcagacatggcactgtctcctctcaagcctggttgtagttcagatgagtcttttcaacatggtcttcaacatggtctagagcttaccagtgatcttctgatcttcaagaagactaagtttgagacttgaccagcatacaagtatagagacctaggaggtggtcttgtggtggtacatttggttaacccattgctggcagtgggagctgatttaggcagggtaaacaggaaagcattaaaagttaaaattcactacaggttttttgttact

SEQ ID NO: 123464 - DNA, 627 bp, Homo sapiens
  Payload ID: 4242
  Gene Symbol: DMTF1
  Gene Name: cyclin D binding myb-like transcription factor 1
  ENST ID: ENST00000414630
  CDS Start-End: 481-627
gtcgcgctcgctcactccagctgcagccactctcgcccgtggctgcttcctccatcctggtattttttggagcttccatcctggttcttccaaagtgcccggacccaaaacaggaattgataggctcaccccaaaatatgcttttggggactgatttagcacctgcatattctgcgtgaatctctttaattggttgcagttgagctaatggtggagccaaaatgctattgccctgtcttcatcaacatttaatcaagaacgtttgtctgcctgatgagagccacttgggttaagaaactacctgtgaatagtcatcatttctgtccttcattggggaatacttttagagagtgttgcggagataggaacatgggagagaaacaatctgggtaacatgaaagtgatgctggttgctaagggaaggcaacttgattctgtgggaagggctgtagctgatccatccgttgtctagatttgagtatgagcacagtggaagaggattctgacacagtaacagtagaaactgtgaactctgtgactttgactcaggacacagaagggaatctcattcttcactgccctcagaatgaagcggatgaaatagactcagaagatagtattgaacct

SEQ ID NO: 123465 - DNA, 3868 bp, Homo sapiens
  Payload ID: 4242
  Gene Symbol: DMTF1
  Gene Name: cyclin D binding myb-like transcription factor 1
  Uniprot ID: Q9Y222
  ENST ID: ENST00000425406
  CDS Start-End: 262-996
gtttccggtggctcgtcgcgctcgctcactccagctgcagccactctcgcccgtggctgcttcctccatcctggtattttttggagcttccatcctggttcttccaaagtgcccggacccaaaacaggaaagtgttgcggagataggaacatgggagagaaacaatctgggtaacatgaaagtgatgctggttgctaagggaaggcaacttgattctgtgggaagggctgtagctgatccatccgttgtctagatttgagtatgagcacagtggaagaggattctgacacagtaacagtagaaactgtgaactctgtgactttgactcaggacacagaagggaatctcattcttcactgccctcagaatgtttcagaaaatgatcagagctttgaagtgaccatgactgcaaccacagaagtagcagatgatgaggttactgaggggactgtgacacagatacagattttgcagaatgagcaactagatgaaatatctcccttgggtaacgaggaagtttcagcagttagccaagcatggtttacaactaaagaagataaggattctctgactaataaaggacataaatggaagcaggggatgtggtccaaggaagaaattgatattttgatgaacaatattgaacgctatcttaaggcacgcggaataaaagatgctacagaaatcatctttgagatgtcaaaagacgaaagaaaagatttctacaggactatagcatggggtctgaaccggcctttgtttgcagtttatagaagagtgcttcgcatgtatgatgacagaaaccatgtgggaaaatatacacctgaagaaattgagaagctcaaggagaaaaaggcaattgctgcctgtttttttttcacccacagacaactgtggaccccaaaaaaaggccacactttcaaactttggctctcaaagtattgctgcccacaacttccaaaccagtcaaatgggaagaagaagaatgaagaataaatgatgaaattaaaagggagaaaacaattgaaccaaatgctgattggcagactcttgttttaggctccggataaagcatggcaatgactgggcaacaataggggcggcgctaggaagaagtgcatcttctgtcaaagatcggtgccgactgatgaaggatacttgcaacacagggaagtggacagaagaagaagaaaagagacttgcagaagtggttcatgagttgacaagcactgagccaggtgacatagtcacacagggtgtgtcttgggcagctgtggctgaacgagtcggtacccgctcagaaaagcaatgtcgttctaaatggctcaactacctgaattggaaacagagtgggggtactgaatggaccaaggaagatgaaatcaatctcatcctcaggatagcagaacttgatgtagctgatgaaaatgacattaactgggatctgttagctgagggatggagtagtgtccgttcaccacaatggctacgaagtaaatggtggaccatcaaaaggcaaattgcaaaccataaggatgtttcgttccctgatggtggtctgtcggagaatcaatgttctttttgtctacccatctcccttcagtcttaataaaaggtcttaaacagttacatgagaaccaaaaaaacaacccaacgcttttggagaataaatcaggatctggagttccaaacagtaataccaattccagtgtgcagcatgttcagataagagttgcccgcttggaagataatacagccatctcttctagccccatggcagcattgcagattccagtccagatcacccatgtttcttcagcagactctcctgctaccgttgactcagaaacaataacactaaacagtggaacactacagacatttgagattcttccctctttccatctacagcccactggcactccaggcacctacctacttcaaacaagctcaagccaaggccttcccctaactctgactgctagtcccacagtaaccctgacagctgctgctcctgcttctcctgaacagattattgttcatgctttatccccagaacatttgttgaacacaagtgataatgttacagtgcagtgtcacacaccaagagtcatcattcagactgttgccacagaggacatcacttcttccatatcccaagcagaactgacagtcgatagtgatattcagtcatctgattttcctgagcctccagacgccctagaagcagacactttcccagatgaaattcatcaccctaagatgactgtggagccatcatttaatgatgctcatgtatccaaattcagtgaccaaaatagcacagaactgatgaatagtgttatggtcagaacagaagaagaaatctctgacaccgaccttaaacaagaggaatcaccctctgatttagccagtgcttatgttactgagggtttagagtctcccactatagaagaacaagttgatcaaacaattgatgatgaaacaatacttatcgttccttcaccacatggctttatccaggcatctgatgttatagatactgaatctgtcttgcctttgacaacactaacagatcccatactccaacatcatcaggaagaatcaaatatcattggatcatccttgggcagtcctgtttcagaagattcaaaggatgtcgaagatttggtaaactgtcattagaataattcttagaaataggcagttcaagcaaagaaggcacactgttaattacaacctcttcaaagaaataggagcaacccccaagaggcttaatttaccaatttaaatagccacagtccttaagccacacacattgttgctgctatgactttttacctcctttaaacacatcatctgaggttgagttttatgacagtatgtagttgagtggaggctgggagttttaagcataaatccctgtttagtgttacatgggaataaggaatttcattcacttcagccactaagaaaagtttagaatcacgaaagcttaactgctgtggtttaaagtacagtttctctaaagatcagacatggcactgtctcctctcaagcctggttgtagttcagatgagtcttttcaacatggtcttcaacatggtctagagcttaccagtgatcttctgatcttcaagaagactaagtttgagacttgaccagcatacaagtatagagacctaggaggtggtcttgtggtggtacatttggttaacccattgctggcagtgggagctgatttaggcagggtaaacaggaaagcattaaaagttaaaattcactacaggttttttgttacttttaaagggaatatggataagcatagtaacaaaacccaccagaatctaagcagttttcaccccctcagaaaccactgtcattagtttacaaagttagcactttgaagtaaaactaaatgaggaaggaagtaatgttacctatccttgataccatgaccatttattagatgttttgctatataaattaccgagagaatagtttgtcatccacttagtgtgttagctggtggggtacaatataacctctcatctcaggctattttaaaaaaacaatatttgcttctataacaaaaggaaacaaatctaagaatcattcctgtactacagaagggttaaggcaaaggtagccttttgggctttttaatgaatatgacccctatagaaaagtcaagaaaaaaaaacccttgtataaattattttatttattattgtaattagatcttcacaaagttgtcttttcactgtgttttgtcaacgtgaaattaaattgtagttataagcaaaagttggttgcctagggaacaattgtatattcagtttaacagaaataaaagaatatttgtctt

SEQ ID NO: 123466 - DNA, 2411 bp, Homo sapiens
  Payload ID: 4242
  Gene Symbol: DMTF1
  Gene Name: cyclin D binding myb-like transcription factor 1
  Uniprot ID: Q9Y222
  ENST ID: ENST00000432937
  CDS Start-End: 367-2385
actctcgcccgtggctgcttcctccatcctggtattttttggagcttccatcctggttcttccaaagtgcccggacccaaaacaggaaagtgttgcggagataggaacatgggagagaaacaatctgggtaacatgaaagtgatgctggttgctaagggaaggcaacttgattctgtgggaagggctgtagctgatccatccgttgtctagaagcggatgaaatagactcagaagatagtattgaacctccacataaaaggctttgtttgtcctctgaggatgatcagagtattgatgattctactccttgcatatcagttgttgcacttccactttcagaaaatgatcagagctttgaagtgaccatgactgcaaccacagaagtagcagatgatgaggttactgaggggactgtgacacagatacagattttgcagaatgagcaactagatgaaatatctcccttgggtaacgaggaagtttcagcagttagccaagcatggtttacaactaaagaagataaggattctctgactaataaaggacataaatggaagcaggggatgtggtccaaggaagaaattgatattttgatgaacaatattgaacgctatcttaaggcacgcggaataaaagatgctacagaaatcatctttgagatgtcaaaagacgaaagaaaagatttctacaggactatagcatggggtctgaaccggcctttgtttgcagtttatagaagagtgcttcgcatgtatgatgacagaaaccatgtgggaaaatatacacctgaagaaattgagaagctcaaggagctccggataaagcatggcaatgactgggcaacaataggggcggcgctaggaagaagtgcatcttctgtcaaagatcggtgccgactgatgaaggatacttgcaacacagggaagtggacagaagaagaagaaaagagacttgcagaagtggttcatgagttgacaagcactgagccaggtgacatagtcacacagggtgtgtcttgggcagctgtggctgaacgagtcggtacccgctcagaaaagcaatgtcgttctaaatggctcaactacctgaattggaaacagagtgggggtactgaatggaccaaggaagatgaaatcaatctcatcctcaggatagcagaacttgatgtagctgatgaaaatgacattaactgggatctgttagctgagggatggagtagtgtccgttcaccacaatggctacgaagtaaatggtggaccatcaaaaggcaaattgcaaaccataaggatgtttcgttccctgtcttaataaaaggtcttaaacagttacatgagaaccaaaaaaacaacccaacgcttttggagaataaatcaggatctggagttccaaacagtaataccaattccagtgtgcagcatgttcagataagagttgcccgcttggaagataatacagccatctcttctagccccatggcagcattgcagattccagtccagatcacccatgtttcttcagcagactctcctgctaccgttgactcagaaacaataacactaaacagtggaacactacagacatttgagattcttccctctttccatctacagcccactggcactccaggcacctacctacttcaaacaagctcaagccaaggccttcccctaactctgactgctagtcccacagtaaccctgacagctgctgctcctgcttctcctgaacagattattgttcatgctttatccccagaacatttgttgaacacaagtgataatgttacagtgcagtgtcacacaccaagagtcatcattcagactgttgccacagaggacatcacttcttccatatcccaagcagaactgacagtcgatagtgatattcagtcatctgattttcctgagcctccagacgccctagaagcagacactttcccagatgaaattcatcaccctaagatgactgtggagccatcatttaatgatgctcatgtatccaaattcagtgaccaaaatagcacagaactgatgaatagtgttatggtcagaacagaagaagaaatctctgacaccgaccttaaacaagaggaatcaccctctgatttagccagtgcttatgttactgagggtttagagtctcccactatagaagaacaagttgatcaaacaattgatgatgaaacaatacttatcgttccttcaccacatggctttatccaggcatctgatgttatagatactgaatctgtcttgcctttgacaacactaacagatcccatactccaacatcatcaggaagaatcaaatatcattggatcatccttgggcagtcctgtttcagaagattcaaaggatgtcgaagatttggtaaactgtcattagaataattcttagaaataggcagttca

SEQ ID NO: 123467 - DNA, 572 bp, Homo sapiens
  Payload ID: 4242
  Gene Symbol: DMTF1
  Gene Name: cyclin D binding myb-like transcription factor 1
  ENST ID: ENST00000448598
  CDS Start-End: 425-572
actccagctgcagccactctcgcccgtggctgcttcctccatcctggtattttttggagcttccatcctggttcttccaaagtgcccggacccaaaacaggaaaaagcacaaaaaccagcctgattgtatctggaaaaaaccattatgttacagttgataggctcaccccaaaatatgcttttggggactgatttagcacctgcatattctgcgtgaatctctttaattggttgcagttgagctaatggtggagccaaaatgctattgccctgtcttcatcaacatttaatcaagtgttgcggagataggaacatgggagagaaacaatctgggtaacatgaaagtgatgctggttgctaagggaaggcaacttgattctgtgggaagggctgtagctgatccatccgttgtctagatttgagtatgagcacagtggaagaggattctgacacagtaacagtagaaactgtgaactctgtgactttgactcaggacacagaagggaatctcattcttcactgccctcagaatgaagcggatgaaatagactcagaagatagtattgaacctc

SEQ ID NO: 123468 - DNA, 533 bp, Homo sapiens
  Payload ID: 4242
  Gene Symbol: DMTF1
  Gene Name: cyclin D binding myb-like transcription factor 1
  ENST ID: ENST00000428819
  CDS Start-End: 452-533
actccagctgcagccactctcgcccgtggctgcttcctccatcctggtattttttggagcttccatcctggttcttccaaagtgcccggacccaaaacaggaattgataggctcaccccaaaatatgcttttggggactgatttagcacctgcatattctgcgtgaatctctttaattggttgcagttgagctaatggtggagccaaaatgctattgccctgtcttcatcaacatttaatcaagtgttgcggagataggaacatgggagagaaacaatctgggtaacatgaaagtgatgctggttgctaagggaaggcaacttgattctgtgggaagggctgtagctgatccatccgttgtctagccatgagatgctatattctgagactagttattccatctgtctgaacaagaggaaaataatatttgtgtaaaatagcagatttgagtatgagcacagtggaagaggattctgacacagtaacagtagaaactgtgaactctgtgactttgactcaggacacagaaggga

SEQ ID NO: 123469 - DNA, 545 bp, Homo sapiens
  Payload ID: 4242
  Gene Symbol: DMTF1
  Gene Name: cyclin D binding myb-like transcription factor 1
  ENST ID: ENST00000423590
  CDS Start-End: 426-545
aaaacaggaaaaagcacaaaaaccagcctgattgtatctggaaaaaaccattatgttacagttgataggctcaccccaaaatatgcttttggggactgatttagcacctgcatattctgcgtgaatctctttaattggttgcagttgagctaatggtggagccaaaatgctattgccctgtcttcatcaacatttaatcaagaacgtttgtctgcctgatgagagccacttgggttaagaaactacctgtgaatagtcatcatttctgtccttcattggggaatacttttagagagtgttgcggagataggaacatgggagagaaacaatctgggtaacatgaaagtgatgctggttgctaagggaaggcaacttgattctgtgggaagggctgtagctgatccatccgttgtctagatttgagtatgagcacagtggaagaggattctgacacagtaacagtagaaactgtgaactctgtgactttgactcaggacacagaagggaatctcattcttcactgccctcagaatgaagcggatgaa

SEQ ID NO: 123470 - DNA, 557 bp, Homo sapiens
  Payload ID: 4242
  Gene Symbol: DMTF1
  Gene Name: cyclin D binding myb-like transcription factor 1
  ENST ID: ENST00000432366
  CDS Start-End: 339-557
aaagtgcccggacccaaaacaggaattgataggctcaccccaaaatatgcttttggggactgatttagcacctgcatattctgcgtgaatctctttaattggttgcagttgagctaatggtggagccaaaatgctattgccctgtcttcatcaacatttaatcactcctttatgtctccaaatgatacaagaagacccgagaaagtgagtgttgcggagataggaacatgggagagaaacaatctgggtaacatgaaagtgatgctggttgctaagggaaggcaacttgattctgtgggaagggctgtagctgatccatccgttgtctagatttgagtatgagcacagtggaagaggattctgacacagtaacagtagaaactgtgaactctgtgactttgactcaggacacagaagggaatctcattcttcactgccctcagaatgaagcggatgaaatagactcagaagatagtattgaacctccacataaaaggctttgtttgtcctctgaggatgatcagagtattgatgattctactccttgcatatcagtt

SEQ ID NO: 123471 - DNA, 637 bp, Homo sapiens
  Payload ID: 4242
  Gene Symbol: DMTF1
  Gene Name: cyclin D binding myb-like transcription factor 1
  ENST ID: ENST00000430405
  CDS Start-End: 112-637
actccagctgcagccactctcgcccgtggctgcttcctccatcctggtattttttggagcttccatcctggttcttccaaagtgcccggacccaaaacaggaaatttgagtatgagcacagtggaagaggattctgacacagtaacagtagaaactgtgaactctgtgactttgactcaggacacagaagggaatctcattcttcactgccctcagaatgaagcggatgaaatagactcagaagatagtattgaacctccacataaaaggctttgtttgtcctctgaggatgatcagagtattgatgattctactccttgcatatcagttgttgcacttccactttcagaaaatgatcagagctttgaagtgaccatgactgcaaccacagaagtagcagatgatgaggttactgaggggactgtgacacagatacagattttgcagaatgagcaactagatgaaatatctcccttgggtaacgaggaagtttcagcagttagccaagcatggtttacaactaaagaagataaggattctctgactaataaaggacataaatggaagcaggggatgtggtccaaggaagaaattgatattttgatgaacaatattgaacgctatcttaaggcacgcg

SEQ ID NO: 123472 - DNA, 980 bp, Homo sapiens
  Payload ID: 4242
  Gene Symbol: DMTF1
  Gene Name: cyclin D binding myb-like transcription factor 1
  ENST ID: ENST00000425705
  CDS Start-End: 407-980
ttttttttttttttttcagagaacgtttgtctgcctgatgagagccacttgggttaagaaactacctgtgaatagtcatcatttctgtccttcattggggaatacttttagaggccagtttccaaaaattctgcttaaaaaagaattctggttttgtcttactcttccagatgagatatcacagaggcttgggcctagattgtcatcagcatactgctatactattcgtttgttcttattaagccttattgtgtgtaatgctgttactttttcagagtgttgcggagataggaacatgggagagaaacaatctgggtaacatgaaagtgatgctggttgctaagggaaggcaacttgattctgtgggaagggctgtagctgatccatccgttgtctagatttgagtatgagcacagtggaagaggattctgacacagtaacagtagaaactgtgaactctgtgactttgactcaggacacagaagggaatctcattcttcactgccctcagaatgaagcggatgaaatagactcagaagatagtattgaacctccacataaaaggctttgtttgtcctctgaggatgatcagagtattgatgattctactccttgcatatcagttgttgcacttccactttcagaaaatgatcagagctttgaagtgaccatgactgcaaccacagaagtagcagatgatgaggttactgaggggactgtgacacagatacagattttgcagaatgagcaactagatgaaatatctcccttgggtaacgaggaagtttcagcagttagccaagcatggtttacaactaaagaagataaggattctctgactaataaaggacataaatggaagcaggggatgtggtccaaggaagaaattgatattttgatgaacaatattgaacgctatcttaaggcacgcggaataaaagatgctacagaaatcatctttgagatgtcaaaagacgaaa

SEQ ID NO: 123473 - DNA, 3657 bp, Homo sapiens
  Payload ID: 4242
  Gene Symbol: DMTF1
  Gene Name: cyclin D binding myb-like transcription factor 1
  ENST ID: ENST00000547146
  CDS Start-End: 117-1253
cgctcactccagctgcagccactctcgcccgtggctgcttcctccatcctggtattttttggagcttccatcctggttcttccaaagtgcccggacccaaaacaggaaatttgagtatgagcacagtggaagaggattctgacacagtaacagtagaaactgtgaactctgtgactttgactcaggacacagaagggaatctcattcttcactgccctcagaatgaagcggatgaaatagactcagaagatagtattgaacctccacataaaaggctttgtttgtcctctgaggatgatcagagtattgatgattctactccttgcatatcagttgttgcacttccactttcagaaaatgatcagagctttgaagtgaccatgactgcaaccacagaagtagcagatgatgaggttactgaggggactgtgacacagatacagattttgcagaatgagcaactagatgaaatatctcccttgggtaacgaggaagtttcagcagttagccaagcatggtttacaactaaagaagataaggattctctgactaataaaggacataaatggaagcaggggatgtggtccaaggaagaaattgatattttgatgaacaatattgaacgctatcttaaggcacgcggaataaaagatgctacagaaatcatctttgagatgtcaaaagacgaaagaaaagatttctacaggactatagcatggggtctgaaccggcctttgtttgcagtttatagaagagtgcttcgcatgtatgatgacagaaaccatgtgggaaaatatacacctgaagaaattgagaagctcaaggagctccggataaagcatggcaatgactgggcaacaataggggcggcgctaggaagaagtgcatcttctgtcaaagatcggtgccgactgatgaaggatacttgcaacacagggaagtggacagaagaagaagaaaagagacttgcagaagtggttcatgagttgacaagcactgagccaggtgacatagtcacacagggtgtgtcttgggcagctgtggctgaacgagtcggtacccgctcagaaaagcaatgtcgttctaaatggctcaactacctgaattggaaacagagtgggggtactgaatggaccaaggaagatgaaatcaatctcatcctcagtgggtttagtgctcatgcaaagtaccagattgaaggcgtggagactgaagtcctctctatatccacagaacaggatagcagaacttgatgtagctgatgaaaatgacattaactgggatctgttagctgagggatggagtagtgtccgttcaccacaatggctacgaagtaaatggtggaccatcaaaaggcaaattgcaaaccataaggatgtttcgttccctgtcttaataaaaggtcttaaacagttacatgagaaccaaaaaaacaacccaacgcttttggagaataaatcaggatctggagttccaaacagtaataccaattccagtgtgcagcatgttcagataagagttgcccgcttggaagataatacagccatctcttctagccccatggcagcattgcagattccagtccagatcacccatgtttcttcagcagactctcctgctaccgttgactcagaaacaataacactaaacagtggaacactacagacatttgagattcttccctctttccatctacagcccactggcactccaggcacctacctacttcaaacaagctcaagccaaggccttcccctaactctgactgctagtcccacagtaaccctgacagctgctgctcctgcttctcctgaacagattattgttcatgctttatccccagaacatttgttgaacacaagtgataatgttacagtgcagtgtcacacaccaagagtcatcattcagactgttgccacagaggacatcacttcttccatatcccaagcagaactgacagtcgatagtgatattcagtcatctgattttcctgagcctccagacgccctagaagcagacactttcccagatgaaattcatcaccctaagatgactgtggagccatcatttaatgatgctcatgtatccaaattcagtgaccaaaatagcacagaactgatgaatagtgttatggtcagaacagaagaagaaatctctgacaccgaccttaaacaagaggaatcaccctctgatttagccagtgcttatgttactgagggtttagagtctcccactatagaagaacaagttgatcaaacaattgatgatgaaacaatacttatcgttccttcaccacatggctttatccaggcatctgatgttatagatactgaatctgtcttgcctttgacaacactaacagatcccatactccaacatcatcaggaagaatcaaatatcattggatcatccttgggcagtcctgtttcagaagattcaaaggatgtcgaagatttggtaaactgtcattagaataattcttagaaataggcagttcaagcaaagaaggcacactgttaattacaacctcttcaaagaaataggagcaacccccaagaggcttaatttaccaatttaaatagccacagtccttaagccacacacattgttgctgctatgactttttacctcctttaaacacatcatctgaggttgagttttatgacagtatgtagttgagtggaggctgggagttttaagcataaatccctgtttagtgttacatgggaataaggaatttcattcacttcagccactaagaaaagtttagaatcacgaaagcttaactgctgtggtttaaagtacagtttctctaaagatcagacatggcactgtctcctctcaagcctggttgtagttcagatgagtcttttcaacatggtcttcaacatggtctagagcttaccagtgatcttctgatcttcaagaagactaagtttgagacttgaccagcatacaagtatagagacctaggaggtggtcttgtggtggtacatttggttaacccattgctggcagtgggagctgatttaggcagggtaaacaggaaagcattaaaagttaaaattcactacaggttttttgttacttttaaagggaatatggataagcatagtaacaaaacccaccagaatctaagcagttttcaccccctcagaaaccactgtcattagtttacaaagttagcactttgaagtaaaactaaatgaggaaggaagtaatgttacctatccttgataccatgaccatttattagatgttttgctatataaattaccgagagaatagtttgtcatccacttagtgtgttagctggtggggtacaatataacctctcatctcaggctattttaaaaaaacaatatttgcttctataacaaaaggaaacaaatctaagaatcattcctgtactacagaagggttaaggcaaaggtagccttttgggctttttaatgaatatgacccctatagaaaagtcaagaaaaaaaaacccttgtataaattattttatttattattgtaattagatcttcacaaagttgtcttttcactgtgttttgtcaacgtgaaattaaattgtagttataagcaaaagttggttgcctagggaacaattgtatattcagtttaacagaaataaaagaatatttgtcttaa

SEQ ID NO: 123474 - DNA, 770 bp, Homo sapiens
  Payload ID: 4242
  Gene Symbol: DMTF1
  Gene Name: cyclin D binding myb-like transcription factor 1
  ENST ID: ENST00000582925
  CDS Start-End: 667-770
aacctcaaatcatgtgcttttttttttttttaaggtctttggttggcttttgaggataaagatgagaagcttattgaaagaaacctttaaaaaccatttcatatttcataaagtttcacattgctttcaagagcttgtaatttgtcttttctggcctaattgtttaaggttttgtttttgttttttccacagattcctagatagggttgttcatctgtcatcttaaaagggttttctggatgaatagggtactatataatttttaatgctttaagataaaacataaagaggtgttaataattataaaggaaaactatagttactaataatatttatggtgctgtattgattgatatacacatcatgttacataatggtaccacagtctacagttcatagaatcactagcatagctgagcctgttttttttttttttttcagagaacgtttgtctgcctgatgagagccacttgggttaagaaactacctgtgaatagtcatcatttctgtccttcattggggaatacttttagagagtgttgcggagataggaacatgggagagaaacaatctgggtaacatgaaagtgatgctggttgctaagggaaggcaacttgattctgtgggaagggctgtagctgatccatccgttgtctagatttgagtatgagcacagtggaagaggattctgacacagtaacagtagaaactgtgaactctgtgactttgactcaggacacagaagggaatctcattcttcactgccctca

SEQ ID NO: 123475 - DNA, 587 bp, Homo sapiens
  Payload ID: 4242
  Gene Symbol: DMTF1
  Gene Name: cyclin D binding myb-like transcription factor 1
  ENST ID: ENST00000582204
  CDS Start-End: 1-537
ccagaacatttgttgaacacaagtgataatgttacagtgcagtgtcacacaccaagagtcatcattcagactgttgccacagaggacatcacttcttccatatcccaagcagaactgacagtcgatagtgatattcagtcatctgattttcctgagcctccagacgccctagaagcagacactttcccagatgaaattcatcaccctaagatgactgtggagccatcatttaatgatgctcatgtatccaaattcagtgaccaaaatagcacagaactgatgaatagtgttatggtcagaacagaagaagaaatctctgacaccgaccttaaacaagaggaatcaccctctgatttagccagtgcttatgttactgagggtttagagtctcccactatagaagaacaagttgatcaaacaattgatgatgaaacaatacttatcgttccttcaccacatggctttatccaggcatctgatgttatagatactgaatctgtcttgcctttgacaacactaacaggtactgtaatataatacttactatgtgcctgataaattttagatggaaaaaaacagacatttaa

SEQ ID NO: 123476 - DNA, 3483 bp, Homo sapiens
  Payload ID: 4242
  Gene Symbol: DMTF1
  Gene Name: cyclin D binding myb-like transcription factor 1
  ENST ID: ENST00000579850
  CDS Start-End: 238-1335
ctcactccagctgcagccactctcgcccgtggctgcttcctccatcctggtattttttggagcttccatcctggttcttccaaagtgcccggacccaaaacaggaaagtgttgcggagataggaacatgggagagaaacaatctgggtaacatgaaagtgatgctggttgctaagggaaggcaacttgattctgtgggaagggctgtagctgatccatccgttgtctagatttgagtatgagcacagtggaagaggattctgacacagtaacagtagaaactgtgaactctgtgactttgactcaggacacagaagggaatctcattcttcactgccctcagaatgtttcagaaaatgatcagagctttgaagtgaccatgactgcaaccacagaagtagcagatgatgaggttactgaggggactgtgacacagatacagattttgcagaatgagcaactagatgaaatatctcccttgggtaacgaggaagtttcagcagttagccaagcatggtttacaactaaagaagataaggattctctgactaataaaggacataaatggaagcaggggatgtggtccaaggaagaaattgatattttgatgaacaatattgaacgctatcttaaggcacgcggaataaaagatgctacagaaatcatctttgagatgtcaaaagacgaaagaaaagatttctacaggactatagcatggggtctgaaccggcctttgtttgcagtttatagaagagtgcttcgcatgtatgatgacagaaaccatgtgggaaaatatacacctgaagaaattgagaagctcaaggagctccggataaagcatggcaatgactgggcaacaataggggcggcgctaggaagaagtgcatcttctgtcaaagatcggtgccgactgatgaaggatacttgcaacacagggaagtggacagaagaagaagaaaagagacttgcagaagtggttcatgagttgacaagcactgagccaggtgacatagtcacacagggtgtgtcttgggcagctgtggctgaacgagtcggtacccgctcagaaaagcaatgtcgttctaaatggctcaactacctgaattggaaacagagtgggggtactgaatggaccaaggaagatgaaatcaatctcatcctcaggatagcagaacttgatgtagctgatgaaaatgacattaactgggatctgttagctgagggatggagtagtgtccgttcaccacaatggctacgaagtaaatggtggaccatcaaaaggcaaattgcaaaccataaggatgtttcgttccctgtgtgcagcatgttcagataagagttgcccgcttggaagataatacagccatctcttctagccccatggcagcattgcagattccagtccagatcacccatgtttcttcagcagactctcctgctaccgttgactcagaaacaataacactaaacagtggaacactacagacatttgagattcttccctctttccatctacagcccactggcactccaggcacctacctacttcaaacaagctcaagccaaggccttcccctaactctgactgctagtcccacagtaaccctgacagctgctgctcctgcttctcctgaacagattattgttcatgctttatccccagaacatttgttgaacacaagtgataatgttacagtgcagtgtcacacaccaagagtcatcattcagactgttgccacagaggacatcacttcttccatatcccaagcagaactgacagtcgatagtgatattcagtcatctgattttcctgagcctccagacgccctagaagcagacactttcccagatgaaattcatcaccctaagatgactgtggagccatcatttaatgatgctcatgtatccaaattcagtgaccaaaatagcacagaactgatgaatagtgttatggtcagaacagaagaagaaatctctgacaccgaccttaaacaagaggaatcaccctctgatttagccagtgcttatgttactgagggtttagagtctcccactatagaagaacaagttgatcaaacaattgatgatgaaacaatacttatcgttccttcaccacatggctttatccaggcatctgatgttatagatactgaatctgtcttgcctttgacaacactaacagatcccatactccaacatcatcaggaagaatcaaatatcattggatcatccttgggcagtcctgtttcagaagattcaaaggatgtcgaagatttggtaaactgtcattagaataattcttagaaataggcagttcaagcaaagaaggcacactgttaattacaacctcttcaaagaaataggagcaacccccaagaggcttaatttaccaatttaaatagccacagtccttaagccacacacattgttgctgctatgactttttacctcctttaaacacatcatctgaggttgagttttatgacagtatgtagttgagtggaggctgggagttttaagcataaatccctgtttagtgttacatgggaataaggaatttcattcacttcagccactaagaaaagtttagaatcacgaaagcttaactgctgtggtttaaagtacagtttctctaaagatcagacatggcactgtctcctctcaagcctggttgtagttcagatgagtcttttcaacatggtcttcaacatggtctagagcttaccagtgatcttctgatcttcaagaagactaagtttgagacttgaccagcatacaagtatagagacctaggaggtggtcttgtggtggtacatttggttaacccattgctggcagtgggagctgatttaggcagggtaaacaggaaagcattaaaagttaaaattcactacaggttttttgttacttttaaagggaatatggataagcatagtaacaaaacccaccagaatctaagcagttttcaccccctcagaaaccactgtcattagtttacaaagttagcactttgaagtaaaactaaatgaggaaggaagtaatgttacctatccttgataccatgaccatttattagatgttttgctatataaattaccgagagaatagtttgtcatccacttagtgtgttagctggtggggtacaatataacctctcatctcaggctattttaaaaaaacaatatttgcttctataacaaaaggaaacaaatctaagaatcattcctgtactacagaagggttaaggcaaaggtagccttttgggctttttaatgaatatgacccctatagaaaagtcaagaaaaaaaaacccttgtataaattattttatttattattgtaattagatcttcacaaagttgtcttttcactgtgttttgtcaacgtgaaattaaattgtagttataagcaaaagttggttgcctagggaacaattgtatattcagtttaacagaaataaaagaatatttgtcttaagatgcaa

SEQ ID NO: 123477 - DNA, 579 bp, Homo sapiens
  Payload ID: 4242
  Gene Symbol: DMTF1
  Gene Name: cyclin D binding myb-like transcription factor 1
  ENST ID: ENST00000579592
  CDS Start-End: 532-579
ttgctgcccgctagctcccgccggctggcgcaagctgtcggcgccggggcactgcgggcggggtcggagcctggccttcctgacgttgcagctgccgtccccgcacgttccggccagggcctccctcttagggccgggcggtgcccgtggctcaggctgcagagtagttgataggctcaccccaaaatatgcttttggggactgatttagcacctgcatattctgcgtgaatctctttaattggttgcagttgagctaatggtggagccaaaatgctattgccctgtcttcatcaacatttaatcaagaacgtttgtctgcctgatgagagccacttgggttaagaaactacctgtgaatagtcatcatttctgtccttcattggggaatacttttagagagtgttgcggagataggaacatgggagagaaacaatctgggtaacatgaaagtgatgctggttgctaagggaaggcaacttgattctgtgggaagggctgtagctgatccatccgttgtctagatttgagtatgagcacagtggaagaggattctgacacagtaacagtagaaactgtg

SEQ ID NO: 123478 - DNA, 1645 bp, Homo sapiens
  Payload ID: 4242
  Gene Symbol: DMTF1
  Gene Name: cyclin D binding myb-like transcription factor 1
  Uniprot ID: Q9Y222
  ENST ID: ENST00000584619
  CDS Start-End: 190-1008
ggtattttttggagcttccatcctggttcttccaaagtgcccggacccaaaacaggaaagtgttgcggagataggaacatgggagagaaacaatctgggtaacatgaaagtgatgctggttgctaagggaaggcaacttgattctgtgggaagggctgtagctgatccatccgttgtctagatttgagtatgagcacagtggaagaggattctgacacagtaacagtagaaactgtgaactctgtgactttgactcaggacacagaagggaatctcattcttcactgccctcagaatgaagcggatgaaatagactcagaagatagtattgaacctccacataaaaggctttgtttgtcctctgaggatgatcagagtattgatgattctactccttgcatatcagttgttgcacttccactttcagaaaatgatcagagctttgaagtgaccatgactgcaaccacagaagtagcagatgatgaggttactgaggggactgtgacacagatacagattttgcagaatgagcaactagatgaaatatctcccttgggtaacgaggaagtttcagcagttagccaagcatggtttacaactaaagaagataaggattctctgactaataaaggacataaatggaagcaggggatgtggtccaaggaagaaattgatattttgatgaacaatattgaacgctatcttaaggcacgcggaataaaagatgctacagaaatcatctttgagatgtcaaaagacgaaagaaaagatttctacaggactatagcatggggtctgaaccggcctttgtttgcagtttatagaagagtgcttcgcatgtatgatgacagaaaccatgtgggaaaatatacacctgaagaaattgagaagctcaaggaacaactgtggaccccaaaaaaaggccacactttcaaactttggctctcaaagtattgctgcccacaacttccaaaccagtcaaatgggaagaagaagaatgaagaataaatgatgaaattaaaagggagaaaacaattgaaccaaatgctgattggcagactcttgttttaggctccggataaagcatggcaatgactgggcaacaataggggcggcgctaggaagaagtgcatcttctgtcaaagatcggtgccgactgatgaaggatacttgcaacacagggaagtggacagaagaagaagaaaagagacttgcagaagtggttcatgagttgacaagcactgagccaggtgacatagtcacacagggtgtgtcttgggcagctgtggctgaacgagtcggtacccgctcagaaaagcaatgtcgttctaaatggctcaactacctgaattggaaacagagtgggggtactgaatggaccaaggaagatgaaatcaatctcatcctcaggatagcagaacttgatgtagctgatgaaaatgacattaactgggatctgttagctgagggatggagtagtgtccgttcaccacaatggctacgaagtaaatggtggaccatcaaaaggcaaattgcaaaccataaggatgtttcgttccctgcttcagcagactctcctgctaccgttgactcagaaacaataacactaaacagtggaacactacagacatttgagattcttccc

SEQ ID NO: 123479 - DNA, 3915 bp, Homo sapiens
  Payload ID: 4242
  Gene Symbol: DMTF1
  Gene Name: cyclin D binding myb-like transcription factor 1
  Uniprot ID: Q9Y222
  ENST ID: ENST00000579677
  CDS Start-End: 276-1094
gcggccgcagctccgtttccggtggctcgtcgcgctcgctcactccagctgcagccactctcgcccgtggctgcttcctccatcctggtattttttggagcttccatcctggttcttccaaagtgcccggacccaaaacaggaaagtgttgcggagataggaacatgggagagaaacaatctgggtaacatgaaagtgatgctggttgctaagggaaggcaacttgattctgtgggaagggctgtagctgatccatccgttgtctagatttgagtatgagcacagtggaagaggattctgacacagtaacagtagaaactgtgaactctgtgactttgactcaggacacagaagggaatctcattcttcactgccctcagaatgaagcggatgaaatagactcagaagatagtattgaacctccacataaaaggctttgtttgtcctctgaggatgatcagagtattgatgattctactccttgcatatcagttgttgcacttccactttcagaaaatgatcagagctttgaagtgaccatgactgcaaccacagaagtagcagatgatgaggttactgaggggactgtgacacagatacagattttgcagaatgagcaactagatgaaatatctcccttgggtaacgaggaagtttcagcagttagccaagcatggtttacaactaaagaagataaggattctctgactaataaaggacataaatggaagcaggggatgtggtccaaggaagaaattgatattttgatgaacaatattgaacgctatcttaaggcacgcggaataaaagatgctacagaaatcatctttgagatgtcaaaagacgaaagaaaagatttctacaggactatagcatggggtctgaaccggcctttgtttgcagtttatagaagagtgcttcgcatgtatgatgacagaaaccatgtgggaaaatatacacctgaagaaattgagaagctcaaggaacaactgtggaccccaaaaaaaggccacactttcaaactttggctctcaaagtattgctgcccacaacttccaaaccagtcaaatgggaagaagaagaatgaagaataaatgatgaaattaaaagggagaaaacaattgaaccaaatgctgattggcagactcttgttttaggctccggataaagcatggcaatgactgggcaacaataggggcggcgctaggaagaagtgcatcttctgtcaaagatcggtgccgactgatgaaggatacttgcaacacagggaagtggacagaagaagaagaaaagagacttgcagaagtggttcatgagttgacaagcactgagccaggtgacatagtcacacagggtgtgtcttgggcagctgtggctgaacgagtcggtacccgctcagaaaagcaatgtcgttctaaatggctcaactacctgaattggaaacagagtgggggtactgaatggaccaaggaagatgaaatcaatctcatcctcaggatagcagaacttgatgtagctgatgaaaatgacattaactgggatctgttagctgagggatggagtagtgtccgttcaccacaatggctacgaagtaaatggtggaccatcaaaaggcaaattgcaaaccataaggatgtttcgttccctgtcttaataaaaggtcttaaacagttacatgagaaccaaaaaaacaacccaacgcttttggagaataaatcaggatctggagttccaaacagtaataccaattccagtgtgcagcatgttcagataagagttgcccgcttggaagataatacagccatctcttctagccccatggcagcattgcagattccagtccagatcacccatgtttcttcagcagactctcctgctaccgttgactcagaaacaataacactaaacagtggaacactacagacatttgagattcttccctctttccatctacagcccactggcactccaggcacctacctacttcaaacaagctcaagccaaggccttcccctaactctgactgctagtcccacagtaaccctgacagctgctgctcctgcttctcctgaacagattattgttcatgctttatccccagaacatttgttgaacacaagtgataatgttacagtgcagtgtcacacaccaagagtcatcattcagactgttgccacagaggacatcacttcttccatatcccaagcagaactgacagtcgatagtgatattcagtcatctgattttcctgagcctccagacgccctagaagcagacactttcccagatgaaattcatcaccctaagatgactgtggagccatcatttaatgatgctcatgtatccaaattcagtgaccaaaatagcacagaactgatgaatagtgttatggtcagaacagaagaagaaatctctgacaccgaccttaaacaagaggaatcaccctctgatttagccagtgcttatgttactgagggtttagagtctcccactatagaagaacaagttgatcaaacaattgatgatgaaacaatacttatcgttccttcaccacatggctttatccaggcatctgatgttatagatactgaatctgtcttgcctttgacaacactaacagatcccatactccaacatcatcaggaagaatcaaatatcattggatcatccttgggcagtcctgtttcagaagattcaaaggatgtcgaagatttggtaaactgtcattagaataattcttagaaataggcagttcaagcaaagaaggcacactgttaattacaacctcttcaaagaaataggagcaacccccaagaggcttaatttaccaatttaaatagccacagtccttaagccacacacattgttgctgctatgactttttacctcctttaaacacatcatctgaggttgagttttatgacagtatgtagttgagtggaggctgggagttttaagcataaatccctgtttagtgttacatgggaataaggaatttcattcacttcagccactaagaaaagtttagaatcacgaaagcttaactgctgtggtttaaagtacagtttctctaaagatcagacatggcactgtctcctctcaagcctggttgtagttcagatgagtcttttcaacatggtcttcaacatggtctagagcttaccagtgatcttctgatcttcaagaagactaagtttgagacttgaccagcatacaagtatagagacctaggaggtggtcttgtggtggtacatttggttaacccattgctggcagtgggagctgatttaggcagggtaaacaggaaagcattaaaagttaaaattcactacaggttttttgttacttttaaagggaatatggataagcatagtaacaaaacccaccagaatctaagcagttttcaccccctcagaaaccactgtcattagtttacaaagttagcactttgaagtaaaactaaatgaggaaggaagtaatgttacctatccttgataccatgaccatttattagatgttttgctatataaattaccgagagaatagtttgtcatccacttagtgtgttagctggtggggtacaatataacctctcatctcaggctattttaaaaaaacaatatttgcttctataacaaaaggaaacaaatctaagaatcattcctgtactacagaagggttaaggcaaaggtagccttttgggctttttaatgaatatgacccctatagaaaagtcaagaaaaaaaaacccttgtataaattattttatttattattgtaattagatcttcacaaagttgtcttttcactgtgttttgtcaacgtgaaattaaattgtagttataagcaaaagttggttgcctagggaacaattgtatattcagtttaacagaaataaaagaatatttgtcttaa

SEQ ID NO: 123480 - DNA, 4307 bp, Homo sapiens
  Payload ID: 4243
  Gene Symbol: CCND1
  Gene Name: cyclin D1
  Uniprot ID: P24385
  ENST ID: ENST00000227507
  CDS Start-End: 228-1115
gcttaacaacagtaacgtcacacggactacaggggagttttgttgaagttgcaaagtcctggagcctccagagggctgtcggcgcagtagcagcgagcagcagagtccgcacgctccggcgaggggcagaagagcgcgagggagcgcggggcagcagaagcgagagccgagcgcggacccagccaggacccacagccctccccagctgcccaggaagagccccagccatggaacaccagctcctgtgctgcgaagtggaaaccatccgccgcgcgtaccccgatgccaacctcctcaacgaccgggtgctgcgggccatgctgaaggcggaggagacctgcgcgccctcggtgtcctacttcaaatgtgtgcagaaggaggtcctgccgtccatgcggaagatcgtcgccacctggatgctggaggtctgcgaggaacagaagtgcgaggaggaggtcttcccgctggccatgaactacctggaccgcttcctgtcgctggagcccgtgaaaaagagccgcctgcagctgctgggggccacttgcatgttcgtggcctctaagatgaaggagaccatccccctgacggccgagaagctgtgcatctacaccgacaactccatccggcccgaggagctgctgcaaatggagctgctcctggtgaacaagctcaagtggaacctggccgcaatgaccccgcacgatttcattgaacacttcctctccaaaatgccagaggcggaggagaacaaacagatcatccgcaaacacgcgcagaccttcgttgccctctgtgccacagatgtgaagttcatttccaatccgccctccatggtggcagcggggagcgtggtggccgcagtgcaaggcctgaacctgaggagccccaacaacttcctgtcctactaccgcctcacacgcttcctctccagagtgatcaagtgtgacccggactgcctccgggcctgccaggagcagatcgaagccctgctggagtcaagcctgcgccaggcccagcagaacatggaccccaaggccgccgaggaggaggaagaggaggaggaggaggtggacctggcttgcacacccaccgacgtgcgggacgtggacatctgagggcgccaggcaggcgggcgccaccgccacccgcagcgagggcggagccggccccaggtgctcccctgacagtccctcctctccggagcattttgataccagaagggaaagcttcattctccttgttgttggttgttttttcctttgctctttcccccttccatctctgacttaagcaaaagaaaaagattacccaaaaactgtctttaaaagagagagagagaaaaaaaaaatagtatttgcataaccctgagcggtgggggaggagggttgtgctacagatgatagaggattttataccccaataatcaactcgtttttatattaatgtacttgtttctctgttgtaagaataggcattaacacaaaggaggcgtctcgggagaggattaggttccatcctttacgtgtttaaaaaaaagcataaaaacattttaaaaacatagaaaaattcagcaaaccatttttaaagtagaagagggttttaggtagaaaaacatattcttgtgcttttcctgataaagcacagctgtagtggggttctaggcatctctgtactttgcttgctcatatgcatgtagtcactttataagtcattgtatgttattatattccgtaggtagatgtgtaacctcttcaccttattcatggctgaagtcacctcttggttacagtagcgtagcgtgcccgtgtgcatgtcctttgcgcctgtgaccaccaccccaacaaaccatccagtgacaaaccatccagtggaggtttgtcgggcaccagccagcgtagcagggtcgggaaaggccacctgtcccactcctacgatacgctactataaagagaagacgaaatagtgacataatatattctatttttatactcttcctatttttgtagtgacctgtttatgagatgctggttttctacccaacggccctgcagccagctcacgtccaggttcaacccacagctacttggtttgtgttcttcttcatattctaaaaccattccatttccaagcactttcagtccaataggtgtaggaaatagcgctgtttttgttgtgtgtgcagggagggcagttttctaatggaatggtttgggaatatccatgtacttgtttgcaagcaggactttgaggcaagtgtgggccactgtggtggcagtggaggtggggtgtttgggaggctgcgtgccagtcaagaagaaaaaggtttgcattctcacattgccaggatgataagttcctttccttttctttaaagaagttgaagtttaggaatcctttggtgccaactggtgtttgaaagtagggacctcagaggtttacctagagaacaggtggtttttaagggttatcttagatgtttcacaccggaaggtttttaaacactaaaatatataatttatagttaaggctaaaaagtatatttattgcagaggatgttcataaggccagtatgatttataaatgcaatctccccttgatttaaacacacagatacacacacacacacacacacacacaaaccttctgcctttgatgttacagatttaatacagtttatttttaaagatagatccttttataggtgagaaaaaaacaatctggaagaaaaaaaccacacaaagacattgattcagcctgtttggcgtttcccagagtcatctgattggacaggcatgggtgcaaggaaaattagggtactcaacctaagttcggttccgatgaattcttatcccctgccccttcctttaaaaaacttagtgacaaaatagacaatttgcacatcttggctatgtaattcttgtaatttttatttaggaagtgttgaagggaggtggcaagagtgtggaggctgacgtgtgagggaggacaggcgggaggaggtgtgaggaggaggctcccgaggggaaggggcggtgcccacaccggggacaggccgcagctccattttcttattgcgctgctaccgttgacttccaggcacggtttggaaatattcacatcgcttctgtgtatctctttcacattgtttgctgctattggaggatcagttttttgttttacaatgtcatatactgccatgtactagttttagttttctcttagaacattgtattacagatgccttttttgtagttttttttttttttatgtgatcaattttgacttaatgtgattactgctctattccaaaaaggttgctgtttcacaatacctcatgcttcacttagccatggtggacccagcgggcaggttctgcctgctttggcgggcagacacgcgggcgcgatcccacacaggctggcgggggccggccccgaggccgcgtgcgtgagaaccgcgccggtgtccccagagaccaggctgtgtccctcttctcttccctgcgcctgtgatgctgggcacttcatctgatcgggggcgtagcatcatagtagtttttacagctgtgttattctttgcgtgtagctatggaagttgcataattattattattattattataacaagtgtgtcttacgtgccaccacggcgttgtacctgtaggactctcattcgggatgattggaatagcttctggaatttgttcaagttttgggtatgtttaatctgttatgtactagtgttctgtttgttattgttttgttaattacaccataatgctaatttaaagagactccaaatctcaatgaagccagctcacagtgctgtgtgccccggtcacctagcaagctgccgaaccaaaagaatttgcaccccgctgcgggcccacgtggttggggccctgccctggcagggtcatcctgtgctcggaggccatctcgggcacaggcccaccccgccccacccctccagaacacggctcacgcttacctcaaccatcctggctgcggcgtctgtctgaaccacgcgggggccttgagggacgctttgtctgtcgtgatggggcaagggcacaagtcctggatgttgtgtgtatcgagaggccaaaggctggtggcaagtgcacggggcacagcggagtctgtcctgtgacgcgcaagtctgagggtctgggcggcgggcggctgggtctgtgcatttctggttgcaccgcggcgcttcccagcaccaacatgtaaccggcatgtttccagcagaagacaaaaagacaaacatgaaagtctagaaataaaactggtaaaacccca

SEQ ID NO: 123481 - DNA, 553 bp, Homo sapiens
  Payload ID: 4243
  Gene Symbol: CCND1
  Gene Name: cyclin D1
  ENST ID: ENST00000536559
  CDS Start-End: 109-312
cgaggggcagaagagcgcgagggagcgcggggcagcagaagcgagagccgagcgcggacccagccaggacccacagccctccccagctgcccaggaagagccccagccatggaacaccagctcctgtgctgcgaagtggaaaccatccgccgcgcgtaccccgatgccaacctcctcaacgaccgggtgctgcgggccatgctgaaggcggaggagacctgcgcgccctcggtgtcctacttcaaatgtgtgcagaaggaggtcctgccgtccatgcggaagatcgtcgccacctggatgctggagatgtgaagttcatttccaatccgccctccatggtggcagcggggagcgtggtggccgcagtgcaaggcctgaacctgaggagccccaacaacttcctgtcctactaccgcctcacacgcttcctctccagagtgatcaagtgtgacccggtaagtgagggtgatgtcccaggcagccttgccggggcttacagggggagacacctagtgccacggaaatgccgaggctggtgccaaggcccccaagg

SEQ ID NO: 123482 - DNA, 6480 bp, Homo sapiens
  Payload ID: 4244
  Gene Symbol: CCND2
  Gene Name: cyclin D2
  Uniprot ID: P30279
  ENST ID: ENST00000261254
  CDS Start-End: 270-1139
agagcgagcaggggagagcgagaccagttttaaggggaggaccggtgcgagtgaggcagccccgaggctctgctcgcccaccacccaatcctcgcctcccttctgctccaccttctctctctgccctcacctctcccccgaaaaccccctatttagccaaaggaaggaggtcaggggaacgctctcccctccccttccaaaaaacaaaaacagaaaaacctttttccaggccggggaaagcaggagggagaggggccgccgggctggccatggagctgctgtgccacgaggtggacccggtccgcagggccgtgcgggaccgcaacctgctccgagacgaccgcgtcctgcagaacctgctcaccatcgaggagcgctaccttccgcagtgctcctacttcaagtgcgtgcagaaggacatccaaccctacatgcgcagaatggtggccacctggatgctggaggtctgtgaggaacagaagtgcgaagaagaggtcttccctctggccatgaattacctggaccgtttcttggctggggtcccgactccgaagtcccatctgcaactcctgggtgctgtctgcatgttcctggcctccaaactcaaagagaccagcccgctgaccgcggagaagctgtgcatttacaccgacaactccatcaagcctcaggagctgctggagtgggaactggtggtgctggggaagttgaagtggaacctggcagctgtcactcctcatgacttcattgagcacatcttgcgcaagctgccccagcagcgggagaagctgtctctgatccgcaagcatgctcagaccttcattgctctgtgtgccaccgactttaagtttgccatgtacccaccgtcgatgatcgcaactggaagtgtgggagcagccatctgtgggctccagcaggatgaggaagtgagctcgctcacttgtgatgccctgactgagctgctggctaagatcaccaacacagacgtggattgtctcaaagcttgccaggagcagattgaggcggtgctcctcaatagcctgcagcagtaccgtcaggaccaacgtgacggatccaagtcggaggatgaactggaccaagccagcacccctacagacgtgcgggatatcgacctgtgaggatgccagttgggccgaaagagagagacgcgtccataatctggtctcttcttctttctggttgtttttgttctttgtgttttagggtgaaacttaaaaaaaaaattctgcccccacctagatcatatttaaagatcttttagaagtgagagaaaaaggtcctacgaaaacggaataataaaaagcatttggtgcctatttgaagtacagcataagggaatcccttgtatatgcgaacagttattgtttgattatgtaaaagtaatagtaaaatgcttacaggaaaacctgcagagtagttagagaatatgtatgcctgcaatatgggaacaaattagaggagacttttttttttcatgttatgagctagcacatacacccccttgtagtataatttcaaggaactgtgtacgccatttatggcatgattagattgcaaagcaatgaactcaagaaggaattgaaataaggagggacatgatggggaaggagtacaaaacaatctctcaacatgattgaaccatttgggatggagaagcacctttgctctcagccacctgttactaagtcaggagtgtagttggatctctacattaatgtcctcttgctgtctacagtagctgctacctaaaaaaagatgttttattttgccagttggacacaggtgattggctcctgggtttcatgttctgtgacatcctgcttcttcttccaaatgcagttcattgcagacaccaccatattgctatctaatggggaaatgtagctatgggccataaccaaaactcacatgaaacggaggcagatggagaccaagggtgggatccagaatggagtcttttctgttattgtatttaaaagggtaatgtggccttggcatttcttcttagaaaaaaactaatttttggtgctgattggcatgtctggttcacagtttagcattgttataaaccattccattcgaaaagcactttgaaaaattgttcccgagcgatagatgggatggtttatgcaagtcatgctgaatactcctcccctcttctcttttgccccctcccttcctgcccccagtctgggttactcttcgcttctggtatctggcgttctttggtacacagttctggtgttcctaccaggactcaagagacaccccttcctgctgacattcccatcacaacattcctcagacaagcctgtaaactaaaatctgttaccattctgatggcacagaaggatcttaattcccatctctatacttctcctttggacatggaaagaaaagttattgctggtgcaaagatagatggctgaacatcagggtgtggcattttgttcccttttccgtttttttttttttattgttgttgttaattttattgcaaagttgtattcagcgtacttgaatttttcttcctctccacttcttagaggcattcagttagcaaagaggttggagcaacaacttttttttttttttttgcacaattgtaattgacaggtaatgaagctatttgttaaaatatttgcctttttaagtaaaaaagaaaaatcagaacagggctatttgaagaattattttatacacagattctgccttgtttcatagtatgagggttgaagacggaaaacaatctaagggtctctcatttttttaattttgttttgttcagtttggtttttttttttttttgcgctgctaagaagctaaagtcatccatccttattcacgttgacagtacctagctgtaatgtttcacagagtgtgctgctattttataaacatttttataatatattattttactgcttaaattccaagtcctgaagtagatggttgagatatgagttcttcgtactggaaaagcccttccgtagtttgttttcttctggtagcatattcatggttgtttttttttttcttttttggttttttggttttttttttttcctctgatcacattcttcaaagacggagtattctttacctcaggtttactggacaaaatcaataactacaaaaggcaatgattcacgcttttgttttcataatacctcacaaccgtacagtttctgcttgggagcccattcgcatgaggaatacagaagcagtgtgagcagggctgactccctctcaggtggaaggcagggcggtctcactcccagggacctttttggtcatggaggccatcgggctcccagttagaccctggtatcctcatcatgatggaaaaaatacattgaaccaagggatcctccctccccttcaaggcagacgttcagtacaaacatttatgcggtaggctcagatgtcgtaatttgcacttaggtaccaggtgtcaggaaacagactaaaaagaattccaccaggctgtttggagatcctcatcttggagctttttcaaaagcggggcttcatctgcaaagggccctttcatcttgaagtttttcccctccgtctttcccctcccctggcatggacaccttgtgtttaggatcatctctgcaggtttcctaggtctgaatctgcgagtagatgaacctgcagcaagcagcgtttatggtgcttccttctccctcctctgtctcaaactgcgcaggcaagcactatgcaagcccaggccctctgctgagcggtactaaacggtcgggttttcaatcacactgaattggcaggataagaaaaataggtcagataagtatgggatgatagttgaagggaggtgaagaggctgcttctctacagaggtgaaattccagatgagtcagtctcttgggaagtgtgtttagaagggttcaggactttgtgagttagcatgaccctaaaattctaggggatttctggtgggacaatgggtggtgaattctgaagttttggagagggaagtggagcagccagcaagtaagctagccagagttttctcaagagccagctttgctcagcacactctcctgggccccaaggagtcccacggaatggggaaagcgggaaccctggagttcttgggaatcttggagcctaaagagaaaccgaggtgcaaattcatttcatggtgactgacccttgagcttaaacagaagcagcaaatgaaagaaccggacaaataaggaagggcacaagcctacccgactctatttacagtctgtaactttccactcttcctgtagtcccgaggcccctgggtccttctagcttttctctttcccatccttggggccttgtgtgatgatgggtgtggggctgccgatgggaaagtcgggggttgttaggcttttctgcctgctcctgcttaaacacaagaaggaatcctggattttgccctctccttagctcttagtctctttggtaggagttttgttccagaggagctctcccccttggatttgaacttgctctttttgttgttgttgttctttctcttctttttcttacctcccactaaaggggttccaaattatcctggtctttttctaccttgttgtgtttctatctcgtctttacttccatctgtttgtttttttctccatcagtgggggccgagttgttcccccagcctgccaaattttgatccttcccctcttttggccaaatcctagggggaagaaatcctagtatgccaaaaatatatgctaagcataattaaactccatgcgggtccataacagccaagaagcctgcaggagaaagccaagggcagttccctccgcagaacaccccatgcgtgctgagaggcgagctccttgaagaaggggctgttcttccaggaggccttattttgaactgcctcaggaccccactggagagcacagcatgccttactactgggtcatccttggtctatgtgctctgtactggaggctctgttctgcctcttatcagccaggtcaggggcacacatggcttaagtgacaaagccagaggagaagacaaccctgacagcatcacgctgcatcccattgctagcaggattggcaactcttcagacggagctgcgcttccctgcagtctagcacctctagggcctctccagactgtgccctgggagctctgggactgaaaggttaagaacataaggcaggatcagatgactctctccaagagggcaggggaattttctctccatgggccacaggggacagggctgggagaagaaatagacttgcaccttatgtcatgtaaataattgattttctagttcaagaagataatattggtagtgtgggaattggaggtaggaaggggaggaagtctgagtaagccagttggcttctaagccaaaaggattcctctttgtttatctctgagacagtccaaccttgagaatagctttaaaagggaaattaatgctgagatgataaagtccccttaagccaacaaaccctctgtagctatagaatgagtgcaggtttctattggtgtggactcagagcaatttacaagagctgttcatgcagccatccatttgtgcaaaatagggtaagaagattcaagaggatatttattacttcctcataccacatggcttttgatgattctggattctaaacaacccagaatggtcatttcaggcacaacgatactacattcgtgtgtgtctgcttttaaacttggctgggctatcagaccctattctcggctcaggttttgagaagccatcagcaaatgtgtacgtgcatgctgtagctgcagcctgcatcccttcgcctgcagcctactttggggaaataaagtgccttactgactgtagccattacagtatccaatgtcttttgacaggtgcctgtccttgaaaaacaaagtttctatttttatttttaattggtttagttcttaactgctggccaactcttacatccccagcaaatcatcgggccattggattttttccattatgttcatcacccttatatcatgtacctcagatctctctctctctcctctctctcagttatgtagtttcttgtcttggacttttttttttcttttctttttctttttttttttgctttaaaacaagtgtgatgccatatcaagtccatgttattctctcacagtgtactctataagaggtgtgggtgtctgtttggtcaggatgttagaaagtgctgataagtagcatgatcagtgtatgcgaaaaggtttttaggaagtatggcaaaaatgttgtattggctatgatggtgacatgatatagtcagctgccttttaagaggtcttatctgttcagtgttaagtgatttaaaaaaataataacctgttttctgactagtttaaagatggatttgaaaatggttttgaatgcaattaggttatgctatttggacaataaactcaccttgacct

SEQ ID NO: 123483 - DNA, 529 bp, Homo sapiens
  Payload ID: 4244
  Gene Symbol: CCND2
  Gene Name: cyclin D2
  ENST ID: ENST00000536537
  CDS Start-End: 1-511
ccgtttcttggctggggtcccgactccgaagtcccatctgcaactcctgggtgctgtctgcatgttcctggcctccaaactcaaagagaccagcccgctgaccgcggagaagctgtgcatttacaccgacaactccatcaagcctcaggagctgctggagtgggaactggtggtgctggggaagttgaagtggaacctggcagctgtcactcctcatgacttcattgagcacatcttgcgcaagctgccccagcagcgggagaagctgtctctgatccgcaagcatgctcagaccttcattgctctgtgtgccaccgctcaacaggtcggacagggtaagggtaagggatgtaaccaggagatgccacaggaacgtctgagaggtgttagcaagtcccagaggccagcgcccgactccatttcagcctcgttcagggtggcacggagactcctgctgctgcgtcacgtctgtcatgttcagcactcttcccagacacacagtcttgactaaagattgtcaggatcttga

SEQ ID NO: 123484 - DNA, 2233 bp, Homo sapiens
  Payload ID: 4245
  Gene Symbol: CCND3
  Gene Name: cyclin D3
  ENST ID: ENST00000372987
  CDS Start-End: 521-1249
acttccagtgcgtgcagcgggagatcaagccgcacatgcggaagatgctggcttactggatgctggaggtaccgcccggacgcgtccccctcccccaccgctcccgggtctggacacaccggggccgccctgtcgggacatcccggtccccacagcaatctgcaggatgctccgaggctaagactcccggggcctggcctttcactagggcacccacgccagctgcctcccttgctttcccgagccctaatcggctcctcccgacagtgactgccagtcacttggcaccctaactgtgcctctcttcgggccgagcaaacgggaccaaggacactctctccccttcggcttctcacagcgtctcccgcttccctccgcctcccggccttctccggagagcgcgcctggaaaaccctgggctcggccgcccccgcccgggagccggttcctgtgtctttcgcggggttctggcggggaaggcgatgggggtggcgcgcgccctgttccggccgacagggaaatgaaaagtgcaggaggcagcggcaggagcctcctcccttcccctcgggtatgtgaggagcagcgctgtgaggaggaagtcttccccctggccatgaactacctggatcgctacctgtcttgcgtccccacccgaaaggcgcagttgcagctcctgggtgcggtctgcatgctgctggcctccaagctgcgcgagaccacgcccctgaccatcgaaaaactgtgcatctacaccgaccacgctgtctctccccgccagttgcgggactgggaggtgctggtcctagggaagctcaagtgggacctggctgctgtgattgcacatgatttcctggccttcattctgcaccggctctctctgccccgtgaccgacaggccttggtcaaaaagcatgcccagacctttttggccctctgtgctacagattatacctttgccatgtacccgccatccatgatcgccacgggcagcattggggctgcagtgcaaggcctgggtgcctgctccatgtccggggatgagctcacagagctgctggcagggatcactggcactgaagtggactgcctgcgggcctgtcaggagcagatcgaagctgcactcagggagagcctcagggaagcctctcagaccagctccagcccagcgcccaaagccccccggggctccagcagccaagggcccagccagaccagcactcctacagatgtcacagccatacacctgtagccctggagaggccctctggagtggccactaagcagaggaggggccgctgccacccacctccctgcctccaggaaccacaccacatctaagcctgaaggggcgtctgttcccccttcacaaagcccaagggatctggtcctacccatccccgcagtgtgcactaaggggcccggccagccatgtctgcatttcggtggctagtcaagctcctcctccctgcatctgaccagcagcgcctttcccaactctagctgggggtgggccaggctgatgggacagaattggatacatacaccagcattccttttgaacgcccccccccacccctgggggctctcatgttttcaactgccaaaatgctctagtgccttctaaaggtgttgtcccttctagggttattgcatttggattggggtccctctaaaatttaatgcatgatagacacatatgagggggaatagtctagatggctcctctcagtactttggaggcccctatgtagtccgtgctgacagctgctcctagagggaggggcctaggcctcagccagagaagctataaattcctctttgctttgctttctgctcagcttctcctgtgtgattgacagctttgctgctgaaggctcattttaatttattaattgctttgagcacaactttaagaggacataatggggtcctggccatcccacaagtggtggtaaccctggtggttgctgttttcctcccttctgctactggcaaaaggatctttgtggccaaggagctgctatagcctggggtggggtcatgccctcctctcccattgtccctctgccccatcctccagcagggaaaatgcagcagggatgccctggaggtggctgagcccctgtctagagagggaggcaagccctgttgacacaggtctttcctaaggctgcaaggtttaggctggtggcccaggaccatcatcctactgtaataaagatgattgtgaaat

SEQ ID NO: 123485 - DNA, 2133 bp, Homo sapiens
  Payload ID: 4245
  Gene Symbol: CCND3
  Gene Name: cyclin D3
  Uniprot ID: P30281
  ENST ID: ENST00000372988
  CDS Start-End: 514-1149
ggcagcggtccgggaacccgtgctgccccggccccgccgcccacacctgagcctccgtggcgccccgcccccgcacctatgccgcgtggggcgggggctgcgggcgggggtgcgcggcgccggatgagcctcctggcctcgccgagggtgtacagggggtgggagagtcaggccggggaccgaaacttggctgagcagagcaccagcccctttgtctcctccgccccctcttccccacttcctgcccagctctggatcggcggcgcggcgcggactttgtaaacacttcgccactgcaggggtggagactggctctgttcggatgccggccgggggggagaggtgcaatcctctcctcgcggctggtggttgcgaccacccccactccccaaaggcaggctccggaggcggcgggacagagcgcctgcgaccccagtcggtgctccggggaggtcacctgacgaggaggtatgtgaggagcagcgctgtgaggaggaagtcttccccctggccatgaactacctggatcgctacctgtcttgcgtccccacccgaaaggcgcagttgcagctcctgggtgcggtctgcatgctgctggcctccaagctgcgcgagaccacgcccctgaccatcgaaaaactgtgcatctacaccgaccacgctgtctctccccgccagttgcgggactgggaggtgctggtcctagggaagctcaagtgggacctggctgctgtgattgcacatgatttcctggccttcattctgcaccggctctctctgccccgtgaccgacaggccttggtcaaaaagcatgcccagacctttttggccctctgtgctacagattatacctttgccatgtacccgccatccatgatcgccacgggcagcattggggctgcagtgcaaggcctgggtgcctgctccatgtccggggatgagctcacagagctgctggcagggatcactggcactgaagtggactgcctgcgggcctgtcaggagcagatcgaagctgcactcagggagagcctcagggaagcctctcagaccagctccagcccagcgcccaaagccccccggggctccagcagccaagggcccagccagaccagcactcctacagatgtcacagccatacacctgtagccctggagaggccctctggagtggccactaagcagaggaggggccgctgccacccacctccctgcctccaggaaccacaccacatctaagcctgaaggggcgtctgttcccccttcacaaagcccaagggatctggtcctacccatccccgcagtgtgcactaaggggcccggccagccatgtctgcatttcggtggctagtcaagctcctcctccctgcatctgaccagcagcgcctttcccaactctagctgggggtgggccaggctgatgggacagaattggatacatacaccagcattccttttgaacgcccccccccacccctgggggctctcatgttttcaactgccaaaatgctctagtgccttctaaaggtgttgtcccttctagggttattgcatttggattggggtccctctaaaatttaatgcatgatagacacatatgagggggaatagtctagatggctcctctcagtactttggaggcccctatgtagtccgtgctgacagctgctcctagagggaggggcctaggcctcagccagagaagctataaattcctctttgctttgctttctgctcagcttctcctgtgtgattgacagctttgctgctgaaggctcattttaatttattaattgctttgagcacaactttaagaggacataatggggtcctggccatcccacaagtggtggtaaccctggtggttgctgttttcctcccttctgctactggcaaaaggatctttgtggccaaggagctgctatagcctggggtggggtcatgccctcctctcccattgtccctctgccccatcctccagcagggaaaatgcagcagggatgccctggaggtggctgagcccctgtctagagagggaggcaagccctgttgacacaggtctttcctaaggctgcaaggtttaggctggtggcccaggaccatcatcctactgtaataaagatgattgtgaaat

SEQ ID NO: 123486 - DNA, 2085 bp, Homo sapiens
  Payload ID: 4245
  Gene Symbol: CCND3
  Gene Name: cyclin D3
  Uniprot ID: P30281
  ENST ID: ENST00000372991
  CDS Start-End: 200-1078
attccacggttgctacatcgtcgcgaggggcggggcgcctgtcagggaagcggcgcgcgcgcgcgggcggcgggcgggctggggatccgccgcgcagtgccagcgccagcgccagacccgcgccccgcgctctccggcccgtcgcctgccttgggactcgcgagcccgcactcccgccctgcctgttcgctgcccgagtatggagctgctgtgttgcgaaggcacccggcacgcgccccgggccgggccggacccgcggctgctgggggaccagcgtgtcctgcagagcctgctccgcctggaggagcgctacgtaccccgcgcctcctacttccagtgcgtgcagcgggagatcaagccgcacatgcggaagatgctggcttactggatgctggaggtatgtgaggagcagcgctgtgaggaggaagtcttccccctggccatgaactacctggatcgctacctgtcttgcgtccccacccgaaaggcgcagttgcagctcctgggtgcggtctgcatgctgctggcctccaagctgcgcgagaccacgcccctgaccatcgaaaaactgtgcatctacaccgaccacgctgtctctccccgccagttgcgggactgggaggtgctggtcctagggaagctcaagtgggacctggctgctgtgattgcacatgatttcctggccttcattctgcaccggctctctctgccccgtgaccgacaggccttggtcaaaaagcatgcccagacctttttggccctctgtgctacagattatacctttgccatgtacccgccatccatgatcgccacgggcagcattggggctgcagtgcaaggcctgggtgcctgctccatgtccggggatgagctcacagagctgctggcagggatcactggcactgaagtggactgcctgcgggcctgtcaggagcagatcgaagctgcactcagggagagcctcagggaagcctctcagaccagctccagcccagcgcccaaagccccccggggctccagcagccaagggcccagccagaccagcactcctacagatgtcacagccatacacctgtagccctggagaggccctctggagtggccactaagcagaggaggggccgctgccacccacctccctgcctccaggaaccacaccacatctaagcctgaaggggcgtctgttcccccttcacaaagcccaagggatctggtcctacccatccccgcagtgtgcactaaggggcccggccagccatgtctgcatttcggtggctagtcaagctcctcctccctgcatctgaccagcagcgcctttcccaactctagctgggggtgggccaggctgatgggacagaattggatacatacaccagcattccttttgaacgcccccccccacccctgggggctctcatgttttcaactgccaaaatgctctagtgccttctaaaggtgttgtcccttctagggttattgcatttggattggggtccctctaaaatttaatgcatgatagacacatatgagggggaatagtctagatggctcctctcagtactttggaggcccctatgtagtccgtgctgacagctgctcctagagggaggggcctaggcctcagccagagaagctataaattcctctttgctttgctttctgctcagcttctcctgtgtgattgacagctttgctgctgaaggctcattttaatttattaattgctttgagcacaactttaagaggacataatggggtcctggccatcccacaagtggtggtaaccctggtggttgctgttttcctcccttctgctactggcaaaaggatctttgtggccaaggagctgctatagcctggggtggggtcatgccctcctctcccattgtccctctgccccatcctccagcagggaaaatgcagcagggatgccctggaggtggctgagcccctgtctagagagggaggcaagccctgttgacacaggtctttcctaaggctgcaaggtttaggctggtggcccaggaccatcatcctactgtaataaagatgattgtgaaataaaactggctttggcttcttgga

SEQ ID NO: 123487 - DNA, 1724 bp, Homo sapiens
  Payload ID: 4245
  Gene Symbol: CCND3
  Gene Name: cyclin D3
  Uniprot ID: P30281
  ENST ID: ENST00000414200
  CDS Start-End: 107-769
gcagtgccagcgccagcgccagacccgcgccccgcgctctccggcccgtcgcctgccttgggactcgcgagcccgcactcccgccctgcctgttcgctgcccgagtatggagctgctgtgttgcgaaggcacccggcacgcgccccgggccgggccggacccgcggctgctgggggaccagcgtgtcctgcagagcctgctccgcctggaggagcgctacgtaccccgcgcctcctacttccagtgcgtgcagcgggagatcaagccgcacatgcggaagatgctggcttactggatgctggaggactgggaggtgctggtcctagggaagctcaagtgggacctggctgctgtgattgcacatgatttcctggccttcattctgcaccggctctctctgccccgtgaccgacaggccttggtcaaaaagcatgcccagacctttttggccctctgtgctacagattatacctttgccatgtacccgccatccatgatcgccacgggcagcattggggctgcagtgcaaggcctgggtgcctgctccatgtccggggatgagctcacagagctgctggcagggatcactggcactgaagtggactgcctgcgggcctgtcaggagcagatcgaagctgcactcagggagagcctcagggaagcctctcagaccagctccagcccagcgcccaaagccccccggggctccagcagccaagggcccagccagaccagcactcctacagatgtcacagccatacacctgtagccctggagaggccctctggagtggccactaagcagaggaggggccgctgccacccacctccctgcctccaggaaccacaccacatctaagcctgaaggggcgtctgttcccccttcacaaagcccaagggatctggtcctacccatccccgcagtgtgcactaaggggcccggccagccatgtctgcatttcggtggctagtcaagctcctcctccctgcatctgaccagcagcgcctttcccaactctagctgggggtgggccaggctgatgggacagaattggatacatacaccagcattccttttgaacgcccccccccacccctgggggctctcatgttttcaactgccaaaatgctctagtgccttctaaaggtgttgtcccttctagggttattgcatttggattggggtccctctaaaatttaatgcatgatagacacatatgagggggaatagtctagatggctcctctcagtactttggaggcccctatgtagtccgtgctgacagctgctcctagagggaggggcctaggcctcagccagagaagctataaattcctctttgctttgctttctgctcagcttctcctgtgtgattgacagctttgctgctgaaggctcattttaatttattaattgctttgagcacaactttaagaggacataatggggtcctggccatcccacaagtggtggtaaccctggtggttgctgttttcctcccttctgctactggcaaaaggatctttgtggccaaggagctgctatagcctggggtggggtcatgccctcctctcccattgtccctctgccccatcctccagcagggaaaatgcagcagggatgccctggaggtggctgagcccctgtctagagagggaggcaagccctgttgacacaggtctttcctaaggctgcaaggtttaggctggtggcccaggaccatca

SEQ ID NO: 123488 - DNA, 1843 bp, Homo sapiens
  Payload ID: 4245
  Gene Symbol: CCND3
  Gene Name: cyclin D3
  Uniprot ID: P30281
  ENST ID: ENST00000415497
  CDS Start-End: 569-859
acctatgccgcgtggggcgggggctgcgggcgggggtgcgcggcgccggatgagcctcctggcctcgccgagggtgtacagggggtgggagagtcaggccggggaccgaaacttggctgagcagagcaccagcccctttgtctcctccgccccctcttccccacttcctgcccagctctggatcggcggcgcggcgcggactttgtaaacacttcgccactgcaggggtggagactggctctgttcggatgccggccgggggggagaggtgcaatcctctcctcgcggctggtggttgcgaccacccccactccccaaaggcaggctccggaggcggcgggacagagcgcctgcgaccccagtcggtgctccggggaggtcacctgacgaggaggactgggaggtgctggtcctagggaagctcaagtgggacctggctgctgtgattgcacatgatttcctggccttcattctgcaccggctctctctgccccgtgaccgacaggccttggtcaaaaagcatgcccagacctttttggccctctgtgctacagattatacctttgccatgtacccgccatccatgatcgccacgggcagcattggggctgcagtgcaaggcctgggtgcctgctccatgtccggggatgagctcacagagctgctggcagggatcactggcactgaagtggactgcctgcgggcctgtcaggagcagatcgaagctgcactcagggagagcctcagggaagcctctcagaccagctccagcccagcgcccaaagccccccggggctccagcagccaagggcccagccagaccagcactcctacagatgtcacagccatacacctgtagccctggagaggccctctggagtggccactaagcagaggaggggccgctgccacccacctccctgcctccaggaaccacaccacatctaagcctgaaggggcgtctgttcccccttcacaaagcccaagggatctggtcctacccatccccgcagtgtgcactaaggggcccggccagccatgtctgcatttcggtggctagtcaagctcctcctccctgcatctgaccagcagcgcctttcccaactctagctgggggtgggccaggctgatgggacagaattggatacatacaccagcattccttttgaacgcccccccccacccctgggggctctcatgttttcaactgccaaaatgctctagtgccttctaaaggtgttgtcccttctagggttattgcatttggattggggtccctctaaaatttaatgcatgatagacacatatgagggggaatagtctagatggctcctctcagtactttggaggcccctatgtagtccgtgctgacagctgctcctagagggaggggcctaggcctcagccagagaagctataaattcctctttgctttgctttctgctcagcttctcctgtgtgattgacagctttgctgctgaaggctcattttaatttattaattgctttgagcacaactttaagaggacataatggggtcctggccatcccacaagtggtggtaaccctggtggttgctgttttcctcccttctgctactggcaaaaggatctttgtggccaaggagctgctatagcctggggtggggtcatgccctcctctcccattgtccctctgccccatcctccagcagggaaaatgcagcagggatgccctggaggtggctgagcccctgtctagagagggaggcaagccctgttgacacaggtctttcctaaggctgcaaggtttaggctggtggcccaggaccatcatcctactgtaataaagatgattgtgaaat

SEQ ID NO: 123489 - DNA, 490 bp, Homo sapiens
  Payload ID: 4245
  Gene Symbol: CCND3
  Gene Name: cyclin D3
  ENST ID: ENST00000514588
  CDS Start-End: 351-490
aaacacttcgccactgcaggggtggagactggctctgttcggatgccggccgggggggagaggtgcaatcctctcctcgcggctggtggttgcgaccacccccactccccaaaggcaggctccggaggcggcgggacagagcgcctgcgaccccagtcggtgctccggggaggtcacctgacgaggagcgtctcccgcttccctccgcctcccggccttctccggagagcgcgcctggaaaaccctgggctcggccgcccccgcccgggagccggttcctgtgtctttcgcggggttctggcggggaaggcgatgggggtggcgcgcgccctgttccggccgacagggaaatgaaaagtgcaggaggcagcggcaggagcctcctcccttcccctcgggtatgtgaggagcagcgctgtgaggaggaagtcttccccctggccatgaactacctggatcgctacctgtcttgcgtccccacccgaaaggc

SEQ ID NO: 123490 - DNA, 876 bp, Homo sapiens
  Payload ID: 4245
  Gene Symbol: CCND3
  Gene Name: cyclin D3
  ENST ID: ENST00000512426
  CDS Start-End: 1-528
gtatgtgaggagcagcgctgtgaggaggaagtcttccccctggccatgaactacctggatcgctacctgtcttgcgtccccacccgaaaggcgcagttgcagctcctgggtgcggtctgcatgctgctggcctccaagctgcgcgagaccacgcccctgaccatcgaaaaactgtgcatctacaccgaccacgctgtctctccccgccagttgcgggactgggaggtgctggtcctagggaagctcaagtgggacctggctgctgtgattgcacatgatttcctggccttcattctgcaccggctctctctgccccgtgaccgacaggccttggtcaaaaagcatgcccagacctttttggccctctgtgctacagattatacctttgccatgtacccgccatccatgatcgccacgggcagcattggggctgcagtgcaaggcctgggtgcctgctccatgtccggggatgagctcacagagctgctggcagggatcactggcactgaagtggtgagtgctgggtagctgggcagcagcctctccattcataaagtagtgctatgccctgagcctccagtagagggaaacctccaaccccaacctggtcccaagtcctggtttcacaaccttggggctttgtggctttttatctcctgccttggtctggggaagagcaagtatcttgggtggggtgaagggcactggccctaggggttcttttcttgccaagtggtgtgctggagtgggggtggggggtttggtgtcagatgcagggctgctctcacactcccttgccacatcctcttgctagtttctgagaactaaagagcgattcctggggccgggctgtggcctaacctccccagacttccc

SEQ ID NO: 123491 - DNA, 574 bp, Homo sapiens
  Payload ID: 4245
  Gene Symbol: CCND3
  Gene Name: cyclin D3
  ENST ID: ENST00000508143
  CDS Start-End: 545-574
aaacacttcgccactgcaggggtggagactggctctgttcggatgccggccgggggggagaggtgcaatcctctcctcgcggctggtggttgcgaccacccccactccccaaaggcaggctccggaggcggcgggacagagcgcctgcgaccccagtcggtgctccggggaggtcacctgacgaggagctccaacctgagcggcaagacccagatggacatgggcacctaggggctttggggcagcactggtttaccacgtgtccctccatatcctgaagatgtaggcctccgtggacacacctgtattcctgagctgtgcatggcctctgtcctggttgcacagaggattggacccacagggcagatgggactgggaggtgctggtcctagggaagctcaagtgggacctggctgctgtgattgcacatgatttcctggccttcattctgcaccggctctctctgccccgtgaccgacaggccttggtcaaaaagcatgcccagacctttttggccctctgtgctacagattatacctttgccatgtacccgccatccatgatcgccacgggc

SEQ ID NO: 123492 - DNA, 544 bp, Homo sapiens
  Payload ID: 4245
  Gene Symbol: CCND3
  Gene Name: cyclin D3
  ENST ID: ENST00000502771
  CDS Start-End: 414-544
acacttcgccactgcaggggtggagactggctctgttcggatgccggccgggggggagaggtgcaatcctctcctcgcggctggtggttgcgaccacccccactccccaaaggcaggctccggaggcggcgggacagagcgcctgcgaccccagtcggtgctccggggaggtcacctgacgaggagctccaacctgagcggcaagacccagatggacatgggcacctaggggctttggggcagcactggtttaccacgtgtccctccatatcctgaagatgtaggcctccgtggacacacctgtattcctgagctgtgcatggcctctgtcctggttgcacagaggattggacccacagggcagatgggtatgtgaggagcagcgctgtgaggaggaagtcttccccctggccatgaactacctggatcgctacctgtcttgcgtccccacccgaaaggcgcagttgcagctcctgggtgcggtctgcatgctgctggcctccaagctgcgcgagaccacgcccctgaccatcgaaaaactgtg

SEQ ID NO: 123493 - DNA, 540 bp, Homo sapiens
  Payload ID: 4245
  Gene Symbol: CCND3
  Gene Name: cyclin D3
  ENST ID: ENST00000505064
  CDS Start-End: 187-540
tttattggtccttgtctctctaagtagcttaccctctctgccgtttttgctccctatcccacctcacttcagcgctcccacccccccgctgctgtgttccccacgctccagacccagcagtgactgtgcgccctcccccaggtatgtgaggagcagcgctgtgaggaggaagtcttccccctggccatgaactacctggatcgctacctgtcttgcgtccccacccgaaaggcgcagttgcagctcctgggtgcggtctgcatgctgctggcctccaagctgcgcgagaccacgcccctgaccatcgaaaaactgtgcatctacaccgaccacgctgtctctccccgccagttgcgggactgggaggtgctggtcctagggaagctcaagtgggacctggctgctgtgattgcacatgatttcctggccttcattctgcaccggctctctctgccccgtgaccgacaggccttggtcaaaaagcatgcccagacctttttggccctctgtgctacagattatacctttgccatgtacccg

SEQ ID NO: 123494 - DNA, 1257 bp, Homo sapiens
  Payload ID: 4245
  Gene Symbol: CCND3
  Gene Name: cyclin D3
  ENST ID: ENST00000510503
  CDS Start-End: 254-841
cggcgcggcgcggactttgtaaacacttcgccactgcaggggtggagactggctctgttcggatgccggccgggggggagaggtgcaatcctctcctcgcggctggtggttgcgaccacccccactccccaaaggcaggctccggaggcggcgggacagagcgcctgcgaccccagtcggtgctccggggaggtcacctgacgaggaggtatgtgaggagcagcgctgtgaggaggaagtcttccccctggccatgaactacctggatcgctacctgtcttgcgtccccacccgaaaggcgcagttgcagctcctgggtgcggtctgcatgctgctggcctccaagctgcgcgagaccacgcccctgaccatcgaaaaactgtgcatctacaccgaccacgctgtctctccccgccagttgcgggactgggaggtgctggtcctagggaagctcaagtgggacctggctgctgtgattgcacatgatttcctggccttcattctgcaccggctctctctgccccgtgaccgacaggccttggtcaaaaagcatgcccagacctttttggccctctgtgctacaggactgcctgcgggcctgtcaggagcagatcgaagctgcactcagggagagcctcagggaagcctctcagaccagctccagcccagcgcccaaagccccccggggctccagcagccaagggcccagccagaccagcactcctacagatgtcacagccatacacctgtagccctggagaggccctctggagtggccactaagcagaggaggggccgctgccacccacctccctgcctccaggaaccacaccacatctaagcctgaaggggcgtctgttcccccttcacaaagcccaagggatctggtcctacccatccccgcagtgtgcactaaggggcccggccagccatgtctgcatttcggtggctagtcaagctcctcctccctgcatctgaccagcagcgcctttcccaactctagctgggggtgggccaggctgatgggacagaattggatacatacaccagcattccttttgaacgcccccccccacccctgggggctctcatgttttcaactgccaaaatgctctagtgccttctaaaggtgttgtcccttctagggttattgcatttggattggggtccctctaaaatttaatgcatgatagacacatatgagggggaatagtctagatggctcctctcagtactttggaggcccctatgtagtcc

SEQ ID NO: 123495 - DNA, 2394 bp, Homo sapiens
  Payload ID: 4245
  Gene Symbol: CCND3
  Gene Name: cyclin D3
  Uniprot ID: P30281
  ENST ID: ENST00000511642
  CDS Start-End: 753-1388
cacaggctagagtgcaatggcgcgatctcggttcactgcaacctccacctcccaggctcaagcgatcctcccgcctcagcctccggagtagctgggattacaggcgggcaccaccacgccccgctagtttttgtatttttagtagagaccgagtttcgccatgttggccaggctggtctcgaacacctaagctcaagcagtccgcggcctcggcctcacaaggtgctgggattacaggcgtgagctaccgcgccagcctcacgtgaccttttgagagtgaagtgttctggggccttcagtggcttggttgtgggccaggaaaacgcgcccggtttcactgagttaaaagaaacctattttaatatgaaaatcggttcttataaagagcataccaggagatcatctacactcgcagggttttccaaacttgtcttattattagtaacacctggctgggcccagcccaatcccagtgacttcactctctggaagaggggcttgggaatctttctcattaaggagctccccagatgattcttctgagcgagtaatgttgggaaaccctggagcatccagcctggtgattttgtgctgagggccgccccgcctgtcaatggcccacttggaagtagagcctggaccacctagtccaagtctatcgctgcatcctgctgccttcgcgccctcgacccgcaagtatttgcgaggtatgtgaggagcagcgctgtgaggaggaagtcttccccctggccatgaactacctggatcgctacctgtcttgcgtccccacccgaaaggcgcagttgcagctcctgggtgcggtctgcatgctgctggcctccaagctgcgcgagaccacgcccctgaccatcgaaaaactgtgcatctacaccgaccacgctgtctctccccgccagttgcgggactgggaggtgctggtcctagggaagctcaagtgggacctggctgctgtgattgcacatgatttcctggccttcattctgcaccggctctctctgccccgtgaccgacaggccttggtcaaaaagcatgcccagacctttttggccctctgtgctacagattatacctttgccatgtacccgccatccatgatcgccacgggcagcattggggctgcagtgcaaggcctgggtgcctgctccatgtccggggatgagctcacagagctgctggcagggatcactggcactgaagtggactgcctgcgggcctgtcaggagcagatcgaagctgcactcagggagagcctcagggaagcctctcagaccagctccagcccagcgcccaaagccccccggggctccagcagccaagggcccagccagaccagcactcctacagatgtcacagccatacacctgtagccctggagaggccctctggagtggccactaagcagaggaggggccgctgccacccacctccctgcctccaggaaccacaccacatctaagcctgaaggggcgtctgttcccccttcacaaagcccaagggatctggtcctacccatccccgcagtgtgcactaaggggcccggccagccatgtctgcatttcggtggctagtcaagctcctcctccctgcatctgaccagcagcgcctttcccaactctagctgggggtgggccaggctgatgggacagaattggatacatacaccagcattccttttgaacgcccccccccacccctgggggctctcatgttttcaactgccaaaatgctctagtgccttctaaaggtgttgtcccttctagggttattgcatttggattggggtccctctaaaatttaatgcatgatagacacatatgagggggaatagtctagatggctcctctcagtactttggaggcccctatgtagtccgtgctgacagctgctcctagagggaggggcctaggcctcagccagagaagctataaattcctctttgctttgctttctgctcagcttctcctgtgtgattgacagctttgctgctgaaggctcattttaatttattaattgctttgagcacaactttaagaggacataatggggtcctggccatcccacaagtggtggtaaccctggtggttgctgttttcctcccttctgctactggcaaaaggatctttgtggccaaggagctgctatagcctggggtggggtcatgccctcctctcccattgtccctctgccccatcctccagcagggaaaatgcagcagggatgccctggaggtggctgagcccctgtctagagagggaggcaagccctgttgacacaggtctttcctaaggctgcaaggtttaggctggtggcccaggaccatcatcctactgtaataaagatgattgtgaaataaaactggctttggcttcttgg

SEQ ID NO: 123496 - DNA, 2047 bp, Homo sapiens
  Payload ID: 4245
  Gene Symbol: CCND3
  Gene Name: cyclin D3
  Uniprot ID: P30281
  ENST ID: ENST00000616010
  CDS Start-End: 751-1041
acctatgccgcgtggggcgggggctgcgggcgggggtgcgcggcgccggatgagcctcctggcctcgccgagggtgtacagggggtgggagagtcaggccggggaccgaaacttggctgagcagagcaccagcccctttgtctcctccgccccctcttccccacttcctgcccagctctggatcggcggcgcggcgcggactttgtaaacacttcgccactgcaggggtggagactggctctgttcggatgccggccgggggggagaggtgcaatcctctcctcgcggctggtggttgcgaccacccccactccccaaaggcaggctccggaggcggcgggacagagcgcctgcgaccccagtcggtgctccggggaggtcacctgacgaggagctccaacctgagcggcaagacccagatggacatgggcacctaggggctttggggcagcactggtttaccacgtgtccctccatatcctgaagatgtaggcctccgtggacacacctgtattcctgagctgtgcatggcctctgtcctggttgcacagaggattggacccacagggcagatgggactgggaggtgctggtcctagggaagctcaagtgggacctggctgctgtgattgcacatgatttcctggccttcattctgcaccggctctctctgccccgtgaccgacaggccttggtcaaaaagcatgcccagacctttttggccctctgtgctacagattatacctttgccatgtacccgccatccatgatcgccacgggcagcattggggctgcagtgcaaggcctgggtgcctgctccatgtccggggatgagctcacagagctgctggcagggatcactggcactgaagtggactgcctgcgggcctgtcaggagcagatcgaagctgcactcagggagagcctcagggaagcctctcagaccagctccagcccagcgcccaaagccccccggggctccagcagccaagggcccagccagaccagcactcctacagatgtcacagccatacacctgtagccctggagaggccctctggagtggccactaagcagaggaggggccgctgccacccacctccctgcctccaggaaccacaccacatctaagcctgaaggggcgtctgttcccccttcacaaagcccaagggatctggtcctacccatccccgcagtgtgcactaaggggcccggccagccatgtctgcatttcggtggctagtcaagctcctcctccctgcatctgaccagcagcgcctttcccaactctagctgggggtgggccaggctgatgggacagaattggatacatacaccagcattccttttgaacgcccccccccacccctgggggctctcatgttttcaactgccaaaatgctctagtgccttctaaaggtgttgtcccttctagggttattgcatttggattggggtccctctaaaatttaatgcatgatagacacatatgagggggaatagtctagatggctcctctcagtactttggaggcccctatgtagtccgtgctgacagctgctcctagagggaggggcctaggcctcagccagagaagctataaattcctctttgctttgctttctgctcagcttctcctgtgtgattgacagctttgctgctgaaggctcattttaatttattaattgctttgagcacaactttaagaggacataatggggtcctggccatcccacaagtggtggtaaccctggtggttgctgttttcctcccttctgctactggcaaaaggatctttgtggccaaggagctgctatagcctggggtggggtcatgccctcctctcccattgtccctctgccccatcctccagcagggaaaatgcagcagggatgccctggaggtggctgagcccctgtctagagagggaggcaagccctgttgacacaggtctttcctaaggctgcaaggtttaggctggtggcccaggaccatcatcctactgtaataaagatgattgtgaaataaaactggctttggcttcttgg

SEQ ID NO: 123497 - DNA, 3660 bp, Homo sapiens
  Payload ID: 4246
  Gene Symbol: CCNDBP1
  Gene Name: cyclin D-type binding-protein 1
  Uniprot ID: O95273
  ENST ID: ENST00000300213
  CDS Start-End: 243-1325
cggggcgggaggaggcggggccaggcctggtctctgataacgggatgggtggtgctggacctcgggcggggccgggcctcgtggcgggaggaggcagggcagggcctctgggacggggctggacggcttgttgacggaaacgagcccttgacgctgtggcccggaagtggagcggctgtcgcagtgcggctccggcagtggcagcggaggcctgtgtttgcggccttcggcaagcgactgagatggcgagcgcaactgcacctgcagccgcagtccccaccctggcttcgcctttggagcagctccggcacttggcggaggagctgcggttgctcctgcctcgagtgcgggtcggcgaagcccaggagaccaccgaggagtttaatcgagagatgttctggagaagactcaatgaggcagctgtgactgtgtcaagggaagccacgactctgaccatagtcttctctcagcttccactgccgtctccacaggaaacccagaagttctgtgaacaagtccatgctgccatcaaggcatttattgcagtgtactatttgcttccaaaggatcaggggatcaccctgagaaagctggtacggggcgccaccctggacatcgtggatggcatggctcagctcatggaagtactttccgtcactccaactcagagccctgagaacaatgaccttatttcctacaacagtgtctgggttgcgtgccagcagatgcctcagataccaagagataacaaagctgcagctcttttgatgctgaccaagaatgtggattttgtgaaggatgcacatgaagaaatggagcaggctgtggaagaatgtgacccttactctggcctcttgaatgatactgaggagaacaactctgacaaccacaatcatgaggatgatgtgttggggtttcccagcaatcaggacttgtattggtcagaggacgatcaagagctcataatcccatgccttgcgctggtgagagcatccaaagcctgcctgaagaaaattcggatgttagtggcagagaatgggaagaaggatcaggtggcacagctggatgacattgtggatatttctgatgaaatcagccctagtgtggatgatttggctctgagcatatatccacctatgtgtcacctgaccgtgcgaatcaattctgcgaaacttgtatctgttttaaagaaggcacttgaaattacaaaagcaagtcatgtgacccctcagccagaagatagttggatccctttacttattaatgccattgatcattgcatgaatagaatcaaggagctcactcagagtgaacttgaattatgacttttcaggctcatttgtactctcttcccctctcatcgtcatggtcaggctctgatacctgcttttaaaatggagctagaatgcttgctggattgaaagggagtgcctatctatatttagcaagagacactattaccaaagattgttggttaggccagattgacacctatttataaaccatatgcgtatatttttctgtgctatatatgaaaaataattgcatgatttctcattcctgagtcatttctcagagattcctaggaaagctgccttattctctttttgcagtaaagtatgttgttttcattgtaaagatgttgatggtctcaataaaatgctaacttgccagtgattaaatgagtgcccttccaaagtttctttttaccagaaatacagtggattgagactagaacattgctttcatttgggtttgtaggtttaaaaatctgattctaatcagaagtatatttagaacaaaacactttatttataaaagatgactccaaaattcatcttagtatttcaccatgttatatattattatcagcaagtccttctgaatattatcacagattactccatgtctctaaaatatattggcattgagctcatttgttaggtttgcccaccttattgaacagatttattttccttatacatacttgtgttgtccttggttacgtgtgtccccaaatgtaaataccaaatttttataaatcaaaaattttttagtgtgtaagagattttatgtaattttaagggccttttcagttcatccttttgcaaaaccatcaccacttaattatacttttgcatcagtctagaagactgcatattggaaagcagtgtaaatctataatgatgtatattctggtgagctgaatagggcattatgcatgtcctacaggtctccgccacctctcatgcccatcatcttccttttgtaggtgtaattcataacatatgcctttctgctgtctttaggtataatcagcaacagcagtcattctttgagtgactaatgtatacttggggttggggttgaaattccttaagccaaatgagttttagcttactgttttgaagtgccattttgtattgttaacaagtgtcatgaagggaaggaactaaaatcaaactgacagagtgtcaaggcaacaaaataacataaacaaaataataacattgtacaacagtctagttcttttatcctttcatatagagcctattttttatatacttttatatttctctactggaccaaattcatgttattaacatcagactttaattgtgggatacttaatgaatatagaactctaatataaagacttacctctagctgaattattctctcaggtcctgtattgtataacttcgttcagtcatgtttggatctttaaggataatgatcagggaaagcactgatcaatgtaatttttttttttttttttttttttttgagatggagtcttgctctgtcccccaagctggagtgcagtggcacactctcggctcactgcaacctccgcctcccaggttctcaagcaattctctggcttcagcctctcaagtagctgggactacagatgcacaccaccatgtccagctaatttttgtatttttagtagagatggggtttcaccatgttggccaggctggtctcaaactcctgacctcaggtgatctgcccacgtcagcctcccaaagtgctgggattacagatgtgagccaccgagcccagcttgatcaatgtaattttaagattacctaaaaattccattttgggataatatcccacttcatcagaaatattagaatgatttaagtgttaggtcctttcccttatctgtaagttaatgaatgtattaatgagcagtaaaatggttgcaaaaaacctgaacctgaacaatctgaatgtactccttaaaggtatctgagcaccttttcaacctgaatgactactcatttatctgataaagtgatgtagtttggatattcaaccctgcaaacctcatgctgaaattggattcccagtgttggaggtggggcctaatgggaggtgtttggatccctcatgaatggcttcgttccattggtggggtaatgagtaagttctcgctctatatgtccctcccccaccccagagctggctgttaaaacgaggctggcacctggcacttacccctacccctcaacccattcttgccctgtgatctctgctcacgttgcctcccttcatcttcctgcataagtggaagcagcctgaagccctcactgtttcttgtacagcctgcagagccgtgagccaaataaagctcttttcttttaaact

SEQ ID NO: 123498 - DNA, 736 bp, Homo sapiens
  Payload ID: 4246
  Gene Symbol: CCNDBP1
  Gene Name: cyclin D-type binding-protein 1
  ENST ID: ENST00000562553
  CDS Start-End: 54-242
ctccggcagtggcagcggaggcctgtgtttgcggccttcggcaagcgactgagatggcgagcgcaactgcacctgcagccgcagtccccaccctggcttcgcctttggagcagctccggcacttggcggaggagctgcggttgctcctgcctcgagtgcgggtcggcgaagcccaggagaccaccgaggagtttaatcgagagatgttctggagaagactcagaaacccagaagttctgtgaacaagtccatgctgccatcaaggcatttattgcagtgtactatttgcttccaaaggatcaggccctgagaacaatgaccttatttcctacaacagtgtctgggttgcgtgccagcagatgcctcagataccaagagataacaaagctgcagctcttttgatgctgaccaagaatgtggattttgtgaaggatgcacatgaagaaatggagcaggctgtggaagaatgtgacccttactctggcctcttgaatgatactgaggagaacaactctgacaaccacaatcatgaggatgatgtgttggggtttcccagcaatcaggacttgtattggtcagaggacgatcaagagctcataatcccatgccttgcgctggtgagagcatccaaagcctgcctgaagaaaattcggatgttagtggcagagaatgggaagaaggatcaggtggcacagctggatgacattgtggatatttctgatgaaatcagccctag

SEQ ID NO: 123499 - DNA, 1831 bp, Homo sapiens
  Payload ID: 4246
  Gene Symbol: CCNDBP1
  Gene Name: cyclin D-type binding-protein 1
  Uniprot ID: O95273
  ENST ID: ENST00000565296
  CDS Start-End: 61-990
agtgcggctccggcagtggcagcggaggcctgtgtttgcggccttcggcaagcgactgagatggcgagcgcaactgcacctgcagccgcagtccccaccctggcttcgcctttggagcagctccggcacttggcggaggagctgcggttgctcctgcctcgagtgcgggtcggcgaagcccaggagaccaccgaggagtttaatcgagagatgttctggagaagactcaatgaggcagctgtgactgtgtcaagggaagccacgactctgaccatagtcttctctcagcttccactgccgtctccacaggaaacccagaagttctgtgaacaagtccatgctgccatcaaggcatttattgcagtgtactatttgcttccaaaggatcaggggatcaccctgagaaagctggtacggggcgccaccctggacatcgtggatggcatggctcagctcatggaagtactttccgtcactccaactcagagccctgagaacaatgaccttatttcctacaacagtgtctgggttgcgtgccagcagatgcctcagataccaagagataacaaagctgcagctcttttgatgctgaccaagaatgtggattttgtgaaggatgcacatgaagaaatggagcaggctgtggaagaatgtgacccttactctggcctcttgaatgatactgaggagaacaactctgacaaccacaatcatgaggatgatgtgttggggtttcccagcaatcaggacttgtattggtcagaggacgatcaagagctcataatcccatgccttgcgctggtgagagcatccaaagcctgcctgaagaaaattcggatgttagtggcagagaatgggaagaaggatcaggtggcacagctggatgacattgtggatatttctgatgaaatcagccctagtgtggatgatttggctctgagcatatatccacctatgtgtcacctgaccgtgcgaatcaatgaaccttagtcatttctgctttatattttgagctatcagcatttgggaccaattcaggttacattttcctttttctgtccttttttaaattgaaaatattttagatctaaaaaatcttattaaaatgttatagcaatagtattaataagatcttgctaaatagaaaagaacccgtaatcctgccaccctaacctaatcagcattttaaattttgcatacttccttcaggtcctttttctaaataatttttttattacttgggtctttaaaaatatttgaactcacctttttatggtagggctcagggtgaataacttctgtgtttcttttctagtctgcgaaacttgtatctgttttaaagaaggcacttgaaattacaaaagcaagtcatgtgacccctcagccagaagatagttggatccctttacttattaatgccattgatcattgcatgaatagaatcaaggagctcactcagagtgaacttgaattatgacttttcaggctcatttgtactctcttcccctctcatcgtcatggtcaggctctgatacctgcttttaaaatggagctagaatgcttgctggattgaaagggagtgcctatctatatttagcaagagacactattaccaaagattgttggttaggccagattgacacctatttataaaccatatgcgtatatttttctgtgctatatatgaaaaataattgcatgatttctcattcctgagtcatttctcagagattcctaggaaagctgccttattctctttttgcagtaaagtatgttgttttcattgtaaagatgttgatggtctcaataaaatgctaacttgccagtgatt

SEQ ID NO: 123500 - DNA, 1450 bp, Homo sapiens
  Payload ID: 4246
  Gene Symbol: CCNDBP1
  Gene Name: cyclin D-type binding-protein 1
  ENST ID: ENST00000563065
  CDS Start-End: 94-282
gacgctgtggcccggaagtggagcggctgtcgcagtgcggctccggcagtggcagcggaggcctgtgtttgcggccttcggcaagcgactgagatggcgagcgcaactgcacctgcagccgcagtccccaccctggcttcgcctttggagcagctccggcacttggcggaggagctgcggttgctcctgcctcgagtgcgggtcggcgaagcccaggagaccaccgaggagtttaatcgagagatgttctggagaagactcagaaacccagaagttctgtgaacaagtccatgctgccatcaaggcatttattgcagtgtactatttgcttccaaaggatcaggggatcaccctgagaaagctggtacggggcgccaccctggacatcgtggatggcatggctcagctcatggaagtactttccgtcactccaactcagagccctgagaacaatgaccttatttcctacaacagtgtctgggttgcgtgccagcagatgcctcagataccaagagataacaaagctgcagctcttttgatgctgaccaagaatgtggattttgtgaaggatgcacatgaagaaatggagcaggctgtggaagaatgtgacccttactctggcctcttgaatgatactgaggagaacaactctgacaaccacaatcatgaggatgatgtgttggggtttcccagcaatcaggacttgtattggtcagaggacgatcaagagctcataatcccatgccttgcgctggtgagagcatccaaagcctgcctgaagaaaattcggatgttagtggcagagaatgggaagaaggatcaggtggcacagctggatgacattgtggatatttctgatgaaatcagccctagtgtggatgatttggctctgagcatatatccacctatgtgtcacctgaccgtgcgaatcaattctgcgaaacttgtatctgttttaaagaaggcacttgaaattacaaaagcaagtcatgtgacccctcagccagaagatagttggatccctttacttattaatgccattgatcattgcatgaatagaatcaaggagctcactcagagtgaacttgaattatgacttttcaggctcatttgtactctcttcccctctcatcgtcatggtcaggctctgatacctgcttttaaaatggagctagaatgcttgctggattgaaagggagtgcctatctatatttagcaagagacactattaccaaagattgttggttaggccagattgacacctatttataaaccatatgcgtatatttttctgtgctatatatgaaaaataattgcatgatttctcattcctgagtcatttctcagagattcctaggaaagctgccttattctctttttgcagtaaagtatgttgttttcattgtaaagatgttgatggtctcaataaaatgctaacttgccagtgatt

SEQ ID NO: 123501 - DNA, 1385 bp, Homo sapiens
  Payload ID: 4246
  Gene Symbol: CCNDBP1
  Gene Name: cyclin D-type binding-protein 1
  ENST ID: ENST00000568507
  CDS Start-End: 61-489
agtgcggctccggcagtggcagcggaggcctgtgtttgcggccttcggcaagcgactgagatggcgagcgcaactgcacctgcagccgcagtccccaccctggcttcgcctttggagcagctccggcacttggcggaggagctgcggttgctcctgcctcgagtgcgggtcggcgaagcccaggagaccaccgaggagtttaatcgagagatgttctggagaagactcaatgaggcagctgtgactgtgtcaagggaagccacgactctgaccatagtcttctctcagcttccactgccgtctccacaggaaacccagaagttctgtgaacaagtccatgctgccatcaaggcatttattgcagtgtactatttgcttccaaaggatcaggccctgagaacaatgaccttatttcctacaacagtgtctgggttgcgtgccagcagatgcctcagataccaagagataacaaagctgcagctcttttgatgctgaccaagaatgtggattttgtgaaggatgcacatgaagaaatggagcaggctgtggaagaatgtgacccttactctggcctcttgaatgatactgaggagaacaactctgacaaccacaatcatgaggatgatgtgttggggtttcccagcaatcaggacttgtattggtcagaggacgatcaagagctcataatcccatgccttgcgctggtgagagcatccaaagcctgcctgaagaaaattcggatgttagtggcagagaatgggaagaaggatcaggtggcacagctggatgacattgtggatatttctgatgaaatcagccctagtgtggatgatttggctctgagcatatatccacctatgtgtcacctgaccgtgcgaatcaattctgcgaaacttgtatctgttttaaagaaggcacttgaaattacaaaagcaagtcatgtgacccctcagccagaagatagttggatccctttacttattaatgccattgatcattgcatgaatagaatcaaggagctcactcagagtgaacttgaattatgacttttcaggctcatttgtactctcttcccctctcatcgtcatggtcaggctctgatacctgcttttaaaatggagctagaatgcttgctggattgaaagggagtgcctatctatatttagcaagagacactattaccaaagattgttggttaggccagattgacacctatttataaaccatatgcgtatatttttctgtgctatatatgaaaaataattgcatgatttctcattcctgagtcatttctcagagattcctaggaaagctgccttattctctttttgcagtaaagtatgttgttttcattgtaaagatgttgatggtctcaataaaatgct

SEQ ID NO: 123502 - DNA, 1634 bp, Homo sapiens
  Payload ID: 4246
  Gene Symbol: CCNDBP1
  Gene Name: cyclin D-type binding-protein 1
  Uniprot ID: O95273
  ENST ID: ENST00000566515
  CDS Start-End: 172-1101
ccgggcctcgtggcgggaggaggcagggcagggcctctgggacggggctggacggcttgttgacggaaacgagcccttgacgctgtggcccggaagtggagcggctgtcgcagtgcggctccggcagtggcagcggaggcctgtgtttgcggccttcggcaagcgactgagatggcgagcgcaactgcacctgcagccgcagtccccaccctggcttcgcctttggagcagctccggcacttggcggaggagctgcggttgctcctgcctcgagtgcgggtcggcgaagcccaggagaccaccgaggagtttaatcgagagatgttctggagaagactcaatgaggcagctgtgactgtgtcaagggaagccacgactctgaccatagtcttctctcagcttccactgccgtctccacaggaaacccagaagttctgtgaacaagtccatgctgccatcaaggcatttattgcagtgtactatttgcttccaaaggatcaggggatcaccctgagaaagctggtacggggcgccaccctggacatcgtggatggcatggctcagctcatggaagtactttccgtcactccaactcagagccctgagaacaatgaccttatttcctacaacagtgtctgggttgcgtgccagcagatgcctcagataccaagagataacaaagctgcagctcttttgatgctgaccaagaatgtggattttgtgaaggatgcacatgaagaaatggagcaggctgtggaagaatgtgacccttactctggcctcttgaatgatactgaggagaacaactctgacaaccacaatcatgaggatgatgtgttggggtttcccagcaatcaggacttgtattggtcagaggacgatcaagagctcataatcccatgccttgcgctggtgagagcatccaaagcctgcctgaagaaaattcggatgttagtggcagagaatgggaagaaggatcaggtggcacagctggatgacattgtggatatttctgatgaaatcagccctagtgtggatgatttggctctgagcatatatccacctatgtgtcacctgaccgtgcgaatcaatgaaccttagtcatttctgctttatattttgagctatcagcatttgggaccaattcagtctgcgaaacttgtatctgttttaaagaaggcacttgaaattacaaaagcaagtcatgtgacccctcagccagaagatagttggatccctttacttattaatgccattgatcattgcatgaatagaatcaaggagctcactcagagtgaacttgaattatgacttttcaggctcatttgtactctcttcccctctcatcgtcatggtcaggctctgatacctgcttttaaaatggagctagaatgcttgctggattgaaagggagtgcctatctatatttagcaagagacactattaccaaagattgttggttaggccagattgacacctatttataaaccatatgcgtatatttttctgtgctatatatgaaaaataattgcatgatttctcattcctgagtcatttctcagagattcctaggaaagctgccttattctctttttgcagtaaagtatgttgttttcattgtaaagatgttgatg

SEQ ID NO: 123503 - DNA, 1356 bp, Homo sapiens
  Payload ID: 4246
  Gene Symbol: CCNDBP1
  Gene Name: cyclin D-type binding-protein 1
  ENST ID: ENST00000569745
  CDS Start-End: 95-223
tgacgctgtggcccggaagtggagcggctgtcgcagtgcggctccggcagtggcagcggaggcctgtgtttgcggccttcggcaagcgactgagatggcgagcgcaactgcacctgcagccgcagtccccaccctggcttcgcctttggagcagctccggcacttggcggaggagctgcggttgctcctgcctcgagtgcggggaaacccagaagttctgtgaacaagtccatgctgccatcaaggcatttattgcagtgtactatttgcttccaaaggatcaggggatcaccctgagaaagctggtacggggcgccaccctggacatcgtggatggcatggctcagctcatggaagtactttccgtcactccaactcagagccctgagaacaatgaccttatttcctacaacagtgtctgggttgcgtgccagcagatgcctcagataccaagagataacaaagctgcagctcttttgatgctgaccaagaatgtggattttgtgaaggatgcacatgaagaaatggagcaggctgtggaagaatgtgacccttactctggcctcttgaatgatactgaggagaacaactctgacaaccacaatcatgaggatgatgtgttggggtttcccagcaatcaggacttgtattggtcagaggacgatcaagagctcataatcccatgccttgcgctggtgagagcatccaaagcctgcctgaagaaaattcggatgttagtggcagagaatgggaagaaggatcaggtggcacagctggatgacattgtggatatttctgatgaaatcagccctagtgtggatgatttggctctgagcatatatccacctatgtgtcacctgaccgtgcgaatcaattctgcgaaacttgtatctgttttaaagaaggcacttgaaattacaaaagcaagtcatgtgacccctcagccagaagatagttggatccctttacttattaatgccattgatcattgcatgaatagaatcaaggagctcactcagagtgaacttgaattatgacttttcaggctcatttgtactctcttcccctctcatcgtcatggtcaggctctgatacctgcttttaaaatggagctagaatgcttgctggattgaaagggagtgcctatctatatttagcaagagacactattaccaaagattgttggttaggccagattgacacctatttataaaccatatgcgtatatttttctgtgctatatatgaaaaataattgcatgatttctcattcctgagtcatttctcagagattcctaggaaagctgccttattctctttttgcagtaaagtatgttgttttcattgtaaagatgtt

SEQ ID NO: 123504 - DNA, 713 bp, Homo sapiens
  Payload ID: 4246
  Gene Symbol: CCNDBP1
  Gene Name: cyclin D-type binding-protein 1
  ENST ID: ENST00000567434
  CDS Start-End: 91-219
gctgtggcccggaagtggagcggctgtcgcagtgcggctccggcagtggcagcggaggcctgtgtttgcggccttcggcaagcgactgagatggcgagcgcaactgcacctgcagccgcagtccccaccctggcttcgcctttggagcagctccggcacttggcggaggagctgcggttgctcctgcctcgagtgcggggaaacccagaagttctgtgaacaagtccatgctgccatcaaggcatttattgcagtgtactatttgcttccaaaggatcaggccctgagaacaatgaccttatttcctacaacagtgtctgggttgcgtgccagcagatgcctcagataccaagagataacaaagctgcagctcttttgatgctgaccaagaatgtggattttgtgaaggatgcacatgaagaaatggagcaggctgtggaagaatgtgacccttactctggcctcttgaatgatactgaggagaacaactctgacaaccacaatcatgaggatgatgtgttggggtttcccagcaatcaggacttgtattggtcagaggacgatcaagagctcataatcccatgccttgcgctggtgagagcatccaaagcctgcctgaagaaaattcggatgttagtggcagagaatgggaagaaggatcaggtggcacagctggatgacattgtggatatttctgatgaaatcagccctag

SEQ ID NO: 123505 - DNA, 2043 bp, Homo sapiens
  Payload ID: 4247
  Gene Symbol: CCNE1
  Gene Name: cyclin E1
  Uniprot ID: P24864
  ENST ID: ENST00000262643
  CDS Start-End: 280-1512
gaggggctgggagccgcggcggggcggtgcgagggcgggccggggccggttccgcgcgcagggattttaaatgtcccgctctgagccgggcgcaggagcagccggcgcggccgccagcgcggtgtagggggcaggcgcggatcccgccaccgccgcgcgctcggcccgccgactcccggcgccgccgccgccactgccgtcgccgccgccgcctgccgggactggagcgcgccgtccgccgcggacaagaccctggcctcaggccggagcagccccatcatgccgagggagcgcagggagcgggatgcgaaggagcgggacaccatgaaggaggacggcggcgcggagttctcggctcgctccaggaagaggaaggcaaacgtgaccgtttttttgcaggatccagatgaagaaatggccaaaatcgacaggacggcgagggaccagtgtgggagccagccttgggacaataatgcagtctgtgcagacccctgctccctgatccccacacctgacaaagaagatgatgaccgggtttacccaaactcaacgtgcaagcctcggattattgcaccatccagaggctccccgctgcctgtactgagctgggcaaatagagaggaagtctggaaaatcatgttaaacaaggaaaagacatacttaagggatcagcactttcttgagcaacaccctcttctgcagccaaaaatgcgagcaattcttctggattggttaatggaggtgtgtgaagtctataaacttcacagggagaccttttacttggcacaagatttctttgaccggtatatggcgacacaagaaaatgttgtaaaaactcttttacagcttattgggatttcatctttatttattgcagccaaacttgaggaaatctatcctccaaagttgcaccagtttgcgtatgtgacagatggagcttgttcaggagatgaaattctcaccatggaattaatgattatgaaggcccttaagtggcgtttaagtcccctgactattgtgtcctggctgaatgtatacatgcaggttgcatatctaaatgacttacatgaagtgctactgccgcagtatccccagcaaatctttatacagattgcagagctgttggatctctgtgtcctggatgttgactgccttgaatttccttatggtatacttgctgcttcggccttgtatcatttctcgtcatctgaattgatgcaaaaggtttcagggtatcagtggtgcgacatagagaactgtgtcaagtggatggttccatttgccatggttataagggagacggggagctcaaaactgaagcacttcaggggcgtcgctgatgaagatgcacacaacatacagacccacagagacagcttggatttgctggacaaagcccgagcaaagaaagccatgttgtctgaacaaaatagggcttctcctctccccagtgggctcctcaccccgccacagagcggtaagaagcagagcagcgggccggaaatggcgtgaccaccccatccttctccaccaaagacagttgcgcgcctgctccacgttctcttctgtctgttgcagcggaggcgtgcgtttgcttttacagatatctgaatggaagagtgtttcttccacaacagaagtatttctgtggatggcatcaaacagggcaaagtgttttttattgaatgcttataggttttttttaaataagtgggtcaagtacaccagccacctccagacaccagtgcgtgctcccgatgctgctatggaaggtgctacttgacctaagggactcccacaacaacaaaagcttgaagctgtggagggccacggtggcgtggctctcctcgcaggtgttctgggctccgttgtaccaagtggagcaggtggttgcgggcaagcgttgtgcagagcccatagccagctgggcagggggctgccctctccacattatcagttgacagtgtacaatgcctttgatgaactgttttgtaagtgctgctatatctatccattttttaataaagataatactgtttttga

SEQ ID NO: 123506 - DNA, 1641 bp, Homo sapiens
  Payload ID: 4247
  Gene Symbol: CCNE1
  Gene Name: cyclin E1
  ENST ID: ENST00000357943
  CDS Start-End: 58-1110
gtgctcacccggcccggtgccacccgggtccacagggatgcgaaggagcgggacaccatgaaggaggacggcggcgcggagttctcggctcgctccaggaagaggaaggcaaacgtgaccgtttttttgcaggatccagatgaagaaatggccaaaatcgacaggacggcgagggaccagtgtgggagccagccttgggacaataatgcagtctgtgcagacccctgctccctgatccccacacctgacaaagaagatgatgaccgggtttacccaaactcaacgtgcaagcctcggattattgcaccatccagaggctccccgctgcctgtactgagctgggcaaatagagaggaagtctggaaaatcatgttaaacaaggaaaagacatacttaagggatcagcactttcttgagcaacaccctcttctgcagccaaaaatgcgagcaattcttctggattggttaatggaggtgtgtgaagtctataaacttcacagggagaccttttacttggcacaagatttctttgaccggtatatggcgacacaagaaaatgttgtaaaaactcttttacagcttattgggatttcatctttatttattgcagccaaacttgaggaaatctatcctccaaagttgcaccagtttgcgtatgtgacagatggagcttgttcaggagatgaaattctcaccatggaattaatgattatgaagctgttggatctctgtgtcctggatgttgactgccttgaatttccttatggtatacttgctgcttcggccttgtatcatttctcgtcatctgaattgatgcaaaaggtttcagggtatcagtggtgcgacatagagaactgtgtcaagtggatggttccatttgccatggttataagggagacggggagctcaaaactgaagcacttcaggggcgtcgctgatgaagatgcacacaacatacagacccacagagacagcttggatttgctggacaaagcccgagcaaagaaagccatgttgtctgaacaaaatagggcttctcctctccccagtgggctcctcaccccgccacagagcggtaagaagcagagcagcgggccggaaatggcgtgaccaccccatccttctccaccaaagacagttgcgcgcctgctccacgttctcttctgtctgttgcagcggaggcgtgcgtttgcttttacagatatctgaatggaagagtgtttcttccacaacagaagtatttctgtggatggcatcaaacagggcaaagtgttttttattgaatgcttataggttttttttaaataagtgggtcaagtacaccagccacctccagacaccagtgcgtgctcccgatgctgctatggaaggtgctacttgacctaagggactcccacaacaacaaaagcttgaagctgtggagggccacggtggcgtggctctcctcgcaggtgttctgggctccgttgtaccaagtggagcaggtggttgcgggcaagcgttgtgcagagcccatagccagctgggcagggggctgccctctccacattatcagttgacagtgtacaatgcctttgatgaactgttttgtaagtgctgctatatctatccattttttaataaagataatactgtttttga

SEQ ID NO: 123507 - DNA, 1680 bp, Homo sapiens
  Payload ID: 4247
  Gene Symbol: CCNE1
  Gene Name: cyclin E1
  Uniprot ID: P24864
  ENST ID: ENST00000444983
  CDS Start-End: 58-1245
gtgctcacccggcccggtgccacccgggtccacagggatgcgaaggagcgggacaccatgaaggaggacggcggcgcggagttctcggctcgctccaggaagaggaaggcaaacgtgaccgtttttttgcaggatccagatgaagaaatggccaaaatcgacaggacggcgagggaccagtgtgggagccagccttgggacaataatgcagtctgtgcagacccctgctccctgatccccacacctgacaaagaagatgatgaccgggtttacccaaactcaacgtgcaagcctcggattattgcaccatccagaggctccccgctgcctgtactgagctgggcaaatagagaggaagtctggaaaatcatgttaaacaaggaaaagacatacttaagggatcagcactttcttgagcaacaccctcttctgcagccaaaaatgcgagcaattcttctggattggttaatggaggtgtgtgaagtctataaacttcacagggagaccttttacttggcacaagatttctttgaccggtatatggcgacacaagaaaatgttgtaaaaactcttttacagcttattgggatttcatctttatttattgcagccaaacttgaggaaatctatcctccaaagttgcaccagtttgcgtatgtgacagatggagcttgttcaggagatgaaattctcaccatggaattaatgattatgaaggcccttaagtggcgtttaagtcccctgactattgtgtcctggctgaatgtatacatgcaggttgcatatctaaatgacttacatgaagtgctactgccgcagtatccccagcaaatctttatacagattgcagagctgttggatctctgtgtcctggatgttgactgccttgaatttccttatggtatacttgctgcttcggccttgtatcatttctcgtcatctgaattgatgcaaaaggtttcagggtatcagtggtgcgacatagagaactgtgtcaagtggatggttccatttgccatggttataagggagacggggagctcaaaactgaagcacttcaggggcgtcgctgatgaagatgcacacaacatacagacccacagagacagcttggatttgctggacaaagcccgagcaaagaaagccatgttgtctgaacaaaatagggcttctcctctccccagtgggctcctcaccccgccacagagcggtaagaagcagagcagcgggccggaaatggcgtgaccaccccatccttctccaccaaagacagttgcgcgcctgctccacgttctcttctgtctgttgcagcggaggcgtgcgtttgcttttacagatatctgaatggaagagtgtttcttccacaacagaagtatttctgtggatggcatcaaacagggcaaagtgttttttattgaatgcttataggttttttttaaataagtgggtcaagtacaccagccacctccagacaccagtgcgtgctcccgatgctgctatggaaggtgctacttgacctaagggactcccacaacaacaaaagcttgaagctgtggagggccacggtggcgtggctctcctcgcaggtgttctgggctccgttgtaccaagtggagcaggtggttgcgggcaagcgttgtgcagagcccatagccagctgggcagggggctgccctctcc

SEQ ID NO: 123508 - DNA, 820 bp, Homo sapiens
  Payload ID: 4247
  Gene Symbol: CCNE1
  Gene Name: cyclin E1
  ENST ID: ENST00000575243
  CDS Start-End: 174-820
gcggccgccagcgcggtgtagggggcaggcgcggatcccgccaccgccgcgcgctcggcccgccgactcccggcgccgccgccgccactgccgtcgccgccgccgcctgccgggactggagcgcgccgtccgccgcggacaagaccctggcctcaggccggagcagccccatcatgccgagggagcgcagggagcgggatgcgaaggagcgggacaccatgaaggaggacggcggcgcggagttctcggctcgctccaggaagaggaaggcaaacgtgaccgttgatccagatgaagaaatggccaaaatcgacaggacggcgagggaccagtgtgggagccagccttgggacaataatgcagtctgtgcagacccctgctccctgatccccacacctgacaaagaagatgatgaccgggtttacccaaactcaacgtgcaagcctcggattattgcaccatccagaggctccccgctgcctgtactgagctgggcaaatagagaggaagtctggaaaatcatgttaaacaaggaaaagacatacttaagggatcagcactttcttgagcaacaccctcttctgcagccaaaaatgcgagcaattcttctggattggttaatggaggtgtgtgaagtctataaacttcacagggagaccttttacttggcacaagatttctttgaccggtatatggcgacacaagaaaatgttgtaaaaactcttttacagcttattgggatttcatctttatttattgcagccaaacttgaggaaatctatcctccaaagttgcaccagtttgcgtatgtgacagatgg

SEQ ID NO: 123509 - DNA, 1085 bp, Homo sapiens
  Payload ID: 4247
  Gene Symbol: CCNE1
  Gene Name: cyclin E1
  ENST ID: ENST00000576532
  CDS Start-End: 1-852
gatgaccgggtttacccaaactcaacgtgcaagcctcggattattgcaccatccagaggctccccgctgcctgtactgagctgggcaaatagagaggaagtctggaaaatcatgttaaacaaggaaaagacatacttaagggatcagcactttcttgagcaacaccctcttctgcagccaaaaatgcgagcaattcttctggattggttaatggaggtgtgtgaagtctataaacttcacagggagaccttttacttggcacaagatttctttgaccggtatatggcgacacaagaaaatgttgtaaaaactcttttacagcttattgggatttcatctttatttattgcagccaaacttgaggaaatctatcctccaaagttgcaccagtttgcgtatgtgacagatggagcttgttcaggagatgaaattctcaccatggaattaatgattatgaagctgttggatctctgtgtcctggatgttgactgccttgaatttccttatggtatacttgctgcttcggccttgtatcatttctcgtcatctgaattgatgcaaaaggtttcagggtatcagtggtgcgacatagagaactgtgtcaagtggatggttccatttgccatggttataagggagacggggagctcaaaactgaagcacttcaggggcgtcgctgatgaagatgcacacaacatacagacccacagagacagcttggatttgctggacaaagcccgagcaaagaaagccatgttgtctgaacaaaatagggcttctcctctccccagtgggctcctcaccccgccacagagcggtaagaagcagagcagcgggccggaaatggcgtgaccaccccatccttctccaccaaagacagttgcgcgcctgctccacgttctcttctgtctgttgcagcggaggcgtgcgtttgcttttacagatatctgaatggaagagtgtttcttccacaacagaagtatttctgtggatggcatcaaacagggcaaagtgttttttattgaatgcttataggttttttttaaataagtgggtcaagtacaccagccacctccagacaccag

SEQ ID NO: 123510 - DNA, 2724 bp, Homo sapiens
  Payload ID: 4248
  Gene Symbol: CCNE2
  Gene Name: cyclin E2
  Uniprot ID: O96020
  ENST ID: ENST00000308108
  CDS Start-End: 105-1319
gtgcggggcgggaccggcccggcctatatattgggttggcgccggcgccagctgagccgagcggtagctggtctggcgaggttttatacacctgaaagaagagaatgtcaagacgaagtagccgtttacaagctaagcagcagccccagcccagccagacggaatccccccaagaagcccagataatccaggccaagaagaggaaaactacccaggatgtcaaaaaaagaagagaggaggtcaccaagaaacatcagtatgaaattaggaattgttggccacctgtattatctggggggatcagtccttgcattatcattgaaacacctcacaaagaaataggaacaagtgatttctccagatttacaaattacagatttaaaaatctttttattaatccttcacctttgcctgatttaagctggggatgttcaaaagaagtctggctaaacatgttaaaaaaggagagcagatatgttcatgacaaacattttgaagttctgcattctgacttggaaccacagatgaggtccatacttctagactggcttttagaggtatgtgaagtatacacacttcatagggaaacattttatcttgcacaagacttttttgatagatttatgttgacacaaaaggatataaataaaaatatgcttcaactcattggaattacctcattattcattgcttccaaacttgaggaaatctatgctcctaaactccaagagtttgcttacgtcactgatggtgcttgcagtgaagaggatatcttaaggatggaactcattatattaaaggctttaaaatgggaactttgtcctgtaacaatcatctcctggctaaatctctttctccaagttgatgctcttaaagatgctcctaaagttcttctacctcagtattctcaggaaacattcattcaaatagctcagcttttagatctgtgtattctagccattgattcattagagttccagtacagaatactgactgctgctgccttgtgccattttacctccattgaagtggttaagaaagcctcaggtttggagtgggacagtatttcagaatgtgtagattggatggtaccttttgtcaatgtagtaaaaagtactagtccagtgaagctgaagacttttaagaagattcctatggaagacagacataatatccagacacatacaaactatttggctatgctggaggaagtaaattacataaacaccttcagaaaagggggacagttgtcaccagtgtgcaatggaggcattatgacaccaccgaagagcactgaaaaaccaccaggaaaacactaaagaagataactaagcaaacaagttggaattcaccaagattgggtagaactggtatcactgaactactaaagttttacagaaagtagtgctgtgattgattgccctagccaattcacaagttacactgccattctgattttaaaacttacaattggcactaaagaatacatttaattatttcctatgttagctgttaaagaaacagcaggacttgtttacaaagatgtcttcattcccaaggttactggatagaagccaaccacagtctataccatagcaatgtttttcctttaatccagtgttactgtgtttatcttgataaactaggaattttgtcactggagttttggactggataagtgctaccttaaagggtatactaagtgatacagtactttgaatctagttgttagattctcaaaattcctacactcttgactagtgcaatttggttcttgaaaattaaatttaaacttgtttacaaaggtttagttttgtaataaggtgactaatttatctatagctgctatagcaagctattataaaacttgaatttctacaaatggtgaaatttaatgttttttaaactagtttatttgccttgccataacacattttttaactaataaggcttagatgaacatggtgttcaacctgtgctctaaacagtgggagtaccaaagaaattataaacaagataaatgctgtggctccttcctaactggggctttcttgacatgtaggttgcttggtaataacctttttgtatatcacaatttgggtgaaaaacttaagtaccctttcaaactatttatatgaggaagtcactttactactctaagatatccctaaggaatttttttttttaatttagtgtgactaaggctttatttatgtttgtgaaactgttaaggtcctttctaaattcctccattgtgagataaggacagtgtcaaagtgataaagcttaacacttgacctaaacttctattttcttaaggaagaagagtattaaatatatactgactcctagaaatctatttattaaaaaaagacatgaaaacttgctgtacataggctagctatttctaaatattttaaattagcttttctaaaaaaaaaatccagcctcataaagtagattagaaaactagattgctagtttattttgttatcagatatgtgaatctcttctccctttgaagaaactatacatttattgttacggtatgaagtcttctgtatagtttgtttttaaactaatatttgtttcagtattttgtctgaaaagaaaacaccactaattgtgtacatatgtattatataaacttaaccttttaatactgtttatttttagcccattgtttaaaaaataaaagttaaaaaaatttaactgcttaaaagt

SEQ ID NO: 123511 - DNA, 1361 bp, Homo sapiens
  Payload ID: 4248
  Gene Symbol: CCNE2
  Gene Name: cyclin E2
  ENST ID: ENST00000396133
  CDS Start-End: 105-1229
gtgcggggcgggaccggcccggcctatatattgggttggcgccggcgccagctgagccgagcggtagctggtctggcgaggttttatacacctgaaagaagagaatgtcaagacgaagtagccgtttacaagctaagcagcagccccagcccagccagacggaatccccccaagaagcccagataatccaggccaagaagaggaaaactacccaggatgtcaaaaaaagaagagaggaggtcaccaagaaacatcagtatgaaattaggaattgttggccacctgtattatctggggggatcagtccttgcattatcattgaaacacctcacaaagaaataggaacaagtgatttctccagatttacaaattacagatttaaaaatctttttattaatccttcacctttgcctgatttaagctggggatgttcaaaagaagtctggctaaacatgttaaaaaaggagagcagatatgttcatgacaaacattttgaagttctgcattctgacttggaaccacagatgaggtccatacttctagactggcttttagaggtatgtgaagtatacacacttcatagggaaacattttatcttgcacaagacttttttgatagatttatgttgacacaaaaggatataaataaaaatatgcttcaactcattggaattacctcattattcattgcttccaaacttgaggaaatctatgctcctaaactccaagagtttgcttacgtcactgatggtgcttgcagtgaagaggatatcttaaggatggaactcattatattaaaggctttaaaatgggaactttgtcctgtaacaatcatctcctggctaaatctctttctccaagttgatgctcttaaagatgctcctaaagttcttctacctcagtattctcaggaaacattcattcaaatagctcagcttttagatctgtgtattctagccattgattcattagagttccagtacagaatactgactgctgctgccttgtgccattttacctccattgaagtggttaagaaagcctcaggtttggagtgggacagtatttcagaatgtgtagattggatggtaccttttgtcaatgtagtaaaaagtactagtccagtgaagctgaagacttttaagaagattcctatggaagacagacataatatccagacacatacaaactatttggctatgctgtgcatgatttcttcccatgtataggaggaagtaaattacataaacaccttcagaaaagggggacagttgtcaccagtgtgcaatggaggcattatgacaccaccgaagagcactgaaaaaccaccaggaaaacactaaagaagataactaagcaaa

SEQ ID NO: 123512 - DNA, 592 bp, Homo sapiens
  Payload ID: 4248
  Gene Symbol: CCNE2
  Gene Name: cyclin E2
  ENST ID: ENST00000521809
  CDS Start-End: 49-276
ccgagcggtagctggtctggcgaggttttatacacctgaaagaagagaatgtcaagacgaagtagccgtttacaagctaagcagcagccccagcccagccagacggaatccccccaagaagcccagataatccaggccaagaagaggaaaactacccaggatgtcaaaaaaagaagagaggaggtcaccaagaaacatcagtatgaaattaggctggggatgttcaaaagaagtctggctaaacatgttaaaaaaggagagcagatatgttcatgacaaacattttgaagttctgcattctgacttggaaccacagatgaggtccatacttctagactggcttttagaggtatgtgaagtatacacacttcatagggaaacattttatcttgcacaagacttttttgatagatttatgttgacacaaaaggatataaataaaaatatgcttcaactcattggaattacctcattattcattgcttccaaacttgaggaaatctatgctcctaaactccaagagtttgcttacgtcactgatggtgcttgcagtgaagaggatatcttaaggatggaactcattatattaaag

SEQ ID NO: 123513 - DNA, 3330 bp, Homo sapiens
  Payload ID: 4248
  Gene Symbol: CCNE2
  Gene Name: cyclin E2
  Uniprot ID: O96020
  ENST ID: ENST00000520509
  CDS Start-End: 254-1468
ccgcgaggctccgtctccccggcgcggcccgctcgccgtccggctcgctcagggcctgggcagacgcggcccgcccgagctaccgcgggttccgagacgccttcgcactgctcctccacccgggggatctttgttcccggagctgttccccgcctcgctgctcccgccgcaaaacctgtttgcggaatacccgccgcaagtctgacttgacgatgtgcagttttgggaggttttatacacctgaaagaagagaatgtcaagacgaagtagccgtttacaagctaagcagcagccccagcccagccagacggaatccccccaagaagcccagataatccaggccaagaagaggaaaactacccaggatgtcaaaaaaagaagagaggaggtcaccaagaaacatcagtatgaaattaggaattgttggccacctgtattatctggggggatcagtccttgcattatcattgaaacacctcacaaagaaataggaacaagtgatttctccagatttacaaattacagatttaaaaatctttttattaatccttcacctttgcctgatttaagctggggatgttcaaaagaagtctggctaaacatgttaaaaaaggagagcagatatgttcatgacaaacattttgaagttctgcattctgacttggaaccacagatgaggtccatacttctagactggcttttagaggtatgtgaagtatacacacttcatagggaaacattttatcttgcacaagacttttttgatagatttatgttgacacaaaaggatataaataaaaatatgcttcaactcattggaattacctcattattcattgcttccaaacttgaggaaatctatgctcctaaactccaagagtttgcttacgtcactgatggtgcttgcagtgaagaggatatcttaaggatggaactcattatattaaaggctttaaaatgggaactttgtcctgtaacaatcatctcctggctaaatctctttctccaagttgatgctcttaaagatgctcctaaagttcttctacctcagtattctcaggaaacattcattcaaatagctcagcttttagatctgtgtattctagccattgattcattagagttccagtacagaatactgactgctgctgccttgtgccattttacctccattgaagtggttaagaaagcctcaggtttggagtgggacagtatttcagaatgtgtagattggatggtaccttttgtcaatgtagtaaaaagtactagtccagtgaagctgaagacttttaagaagattcctatggaagacagacataatatccagacacatacaaactatttggctatgctggaggaagtaaattacataaacaccttcagaaaagggggacagttgtcaccagtgtgcaatggaggcattatgacaccaccgaagagcactgaaaaaccaccaggaaaacactaaagaagataactaagcaaacaagttggaattcaccaagattgggtagaactggtatcactgaactactaaagttttacagaaagtagtgctgtgattgattgccctagccaattcacaagttacactgccattctgattttaaaacttacaattggcactaaagaatacatttaattatttcctatgttagctgttaaagaaacagcaggacttgtttacaaagatgtcttcattcccaaggttactggatagaagccaaccacagtctataccatagcaatgtttttcctttaatccagtgttactgtgtttatcttgataaactaggaattttgtcactggagttttggactggataagtgctaccttaaagggtatactaagtgatacagtactttgaatctagttgttagattctcaaaattcctacactcttgactagtgcaatttggttcttgaaaattaaatttaaacttgtttacaaaggtttagttttgtaataaggtgactaatttatctatagctgctatagcaagctattataaaacttgaatttctacaaatggtgaaatttaatgttttttaaactagtttatttgccttgccataacacattttttaactaataaggcttagatgaacatggtgttcaacctgtgctctaaacagtgggagtaccaaagaaattataaacaagataaatgctgtggctccttcctaactggggctttcttgacatgtaggttgcttggtaataacctttttgtatatcacaatttgggtgaaaaacttaagtaccctttcaaactatttatatgaggaagtcactttactactctaagatatccctaaggaatttttttttttaatttagtgtgactaaggctttatttatgtttgtgaaactgttaaggtcctttctaaattcctccattgtgagataaggacagtgtcaaagtgataaagcttaacacttgacctaaacttctattttcttaaggaagaagagtattaaatatatactgactcctagaaatctatttattaaaaaaagacatgaaaacttgctgtacataggctagctatttctaaatattttaaattagcttttctaaaaaaaaaatccagcctcataaagtagattagaaaactagattgctagtttattttgttatcagatatgtgaatctcttctccctttgaagaaactatacatttattgttacggtatgaagtcttctgtatagtttgtttttaaactaatatttgtttcagtattttgtctgaaaagaaaacaccactaattgtgtacatatgtattatataaacttaaccttttaatactgtttatttttagcccattgtttaaaaaataaaagttaaaaaaatttaactgcttaaaagtaaagttttgccattgcttggagaaacttttttttccttctctgcgctgccagctgtaacacttcttctggattgcttgcattcaactctgtctggccgatggctttgatcttccaaaacagaaaagtgatgttattagaggtgtgtcaaaaattaagttttgttggtacaagtaatataaagctacctacgtgctaacaacgatacagtttaatgattaactgaacctcttaactgtaaaacccaggagtcttggaaaaaaattaacataaagattaaccagggccactctcaaggaaagatggactgctgagccatagtttatggaattacttaagtggcattttaatatattaagtaaattcatgtaaatttatttgaaagtataagtaagctctacatggcgatttttagagttaaactagggctccacttgttaatgtgcaaaaataactggt

SEQ ID NO: 123514 - DNA, 625 bp, Homo sapiens
  Payload ID: 4248
  Gene Symbol: CCNE2
  Gene Name: cyclin E2
  ENST ID: ENST00000524224
  CDS Start-End: 1-458
tggaaccacagatgaggtccatacttctagactggcttttagaggtatgtgaagtatacacacttcatagggaaacattttatcttgcacaagacttttttgatagatttatgttgacacaaaaggatataaataaaaatatgcttcaactcattggaattacctcattattcattgcttccaaacttgaggaaatctatgctcctaaactccaagagtttgcttacgtcactgatggtgcttgcagtgaagaggatatcttaaggatggaactcattatattaaaggctttaaaatgggaactttgtcctgtaacaatcatctcctggctaaatctctttctccaagttgatgctcttaaagatgctcctaaagttcttctacctcagtattctcaggaaacattcattcaaatagctcagctcttctcccatttctcctaccttctggaccaatgaggacaaacagaattgaagtttaattccactgcacaagtatcttctcaaatctgtgaaatctaccccttttacactataccattccactgctactagttcagctcttattgcctagattatacagccttttaactaatctcactgcttaataaacatgttttcttcta

SEQ ID NO: 123515 - DNA, 434 bp, Homo sapiens
  Payload ID: 4248
  Gene Symbol: CCNE2
  Gene Name: cyclin E2
  ENST ID: ENST00000519889
  CDS Start-End: 52-237
gagccgagcggtagctggtctggcgaggttttatacacctgaaagaagagaatgtcaagacgaagtagccgtttacaagctaagcagcagccccagcccagccagacggaatccccccaagaagcccagataatccaggccaagaagaggaaaactacccagtttaccaatggtcttttctattttccaggatgtcaaaaaaagaagagaggaggtcaccaagaaacatcagtatgaaattaggaattgttggccacctgtattatctggggggatcagtccttgcattatcattgaaacacctcacaaagaaataggaacaagtgatttctccagatttacaaattacagatttaaaaatctttttattaatccttcacctttgcctgatttaagctggggatgttcaaaagaagtctggctaaacatgttaa

SEQ ID NO: 123516 - DNA, 1733 bp, Homo sapiens
  Payload ID: 4248
  Gene Symbol: CCNE2
  Gene Name: cyclin E2
  ENST ID: ENST00000611101
  CDS Start-End: 164-1054
gagccgagcggtagctggtctggcgaggttttatacacctgaaagaagagaatgtcaagacgaagtagccgtttacaagctaagcagcagccccagcccagccagacggaatccccccaagaagcccagataatccaggccaagaagaggaaaactacccaggatgtcaaaagaagtctggctaaacatgttaaaaaaggagagcagatatgttcatgacaaacattttgaagttctgcattctgacttggaaccacagatgaggtccatacttctagactggcttttagaggtatgtgaagtatacacacttcatagggaaacattttatcttgcacaagacttttttgatagatttatgttgacacaaaaggatataaataaaaatatgcttcaactcattggaattacctcattattcattgcttccaaacttgaggaaatctatgctcctaaactccaagagtttgcttacgtcactgatggtgcttgcagtgaagaggatatcttaaggatggaactcattatattaaaggctttaaaatgggaactttgtcctgtaacaatcatctcctggctaaatctctttctccaagttgatgctcttaaagatgctcctaaagttcttctacctcagtattctcaggaaacattcattcaaatagctcagcttttagatctgtgtattctagccattgattcattagagttccagtacagaatactgactgctgctgccttgtgccattttacctccattgaagtggttaagaaagcctcaggtttggagtgggacagtatttcagaatgtgtagattggatggtaccttttgtcaatgtagtaaaaagtactagtccagtgaagctgaagacttttaagaagattcctatggaagacagacataatatccagacacatacaaactatttggctatgctggaggaagtaaattacataaacaccttcagaaaagggggacagttgtcaccagtgtgcaatggaggcattatgacaccaccgaagagcactgaaaaaccaccaggaaaacactaaagaagataactaagcaaacaagttggaattcaccaagattgggtagaactggtatcactgaactactaaagttttacagaaagtagtgctgtgattgattgccctagccaattcacaagttacactgccattctgattttaaaacttacaattggcactaaagaatacatttaattatttcctatgttagctgttaaagaaacagcaggacttgtttacaaagatgtcttcattcccaaggttactggatagaagccaaccacagtctataccatagcaatgtttttcctttaatccagtgttactgtgtttatcttgataaactaggaattttgtcactggagttttggactggataagtgctaccttaaagggtatactaagtgatacagtactttgaatctagttgttagattctcaaaattcctacactcttgactagtgcaatttggttcttgaaaattaaatttaaacttgtttacaaaggtttagttttgtaataaggtgactaatttatctatagctgctatagcaagctattataaaacttgaatttctacaaatggtgaaatttaatgttttttaaactagtttatttgccttgccataacacattttttaactaataaggcttagatgaacatggtgttcaacctgtgctctaaacagtgggagtacc

SEQ ID NO: 123517 - DNA, 4173 bp, Homo sapiens
  Payload ID: 4249
  Gene Symbol: CCNF
  Gene Name: cyclin F
  ENST ID: ENST00000293968
  CDS Start-End: 89-268
ctgcgcctgcgcgagggctacgcgcgctccggccggggcgcgggcgcgctctcaggcgggctccggcggcagcgacgcgagcgcggcgatggggagcggcggcgtggtccactgtaggtgtgccaagtgtttctgttatcctacaaagcgaagaataaggaggaggccccgaaacctgaccatcttgagtctccccgaagatgtgctctttcacatcctgaaatggctttctgtagaggacatcctggccgtccgagctggctgctgaaaaggggaatttcgaagctgctgtgaagctgggcatagcctacctctacaatgaaggcctgtctgtgtctgatgaggcccgcgcagaagtgaatggcctgaaggcctctcgcttcttcagtctcgctgagcggctgaatgtgggtgccgcacctttcatctggctcttcatccgccctccgtggtcggtgagcggaagctgctgcaaggccgtggttcacgagagcctcagggcagagtgccagctgcagaggactcacaaagcatccatattgcactgcttgggcagagtgctgagtctgttcgaggatgaggagaagcagcagcaggcccatgacctgtttgaggaggctgctcatcagggatgtctgaccagctcctacctcctctgggaaagcgacaggaggacagatgtgtcagatcctgggcgatgcctccacagcttccgaaaactcagggactacgctgccaaaggctgctgggaagcgcagctgtctttagccaaagcctgtgcaaatgcaaaccagcttggactggaggtgagagcttccagtgagatcgtctgccagctatttcaggcttcccaggctgtcagtaaacaacaagtcttctccgtgcagaagggactcaatgacacaatgaggtacattctgatcgactggctggtggaagttgccaccatgaaggacttcacaagcctgtgcctgcacctgaccgtggagtgtgtggaccggtacctgcggaggaggctggtgccgcggtacaggctccagctgctgggcatcgcctgcatggtcatctgcacccggtttatcagtaaagagatcctgaccatccgggaggccgtatggctcacggacaacacttacaagtacgaggacctggtgagaatgatgggcgagatcgtctccgccttggaagggaagattcgagtccccactgtggtggattacaaggaggtcctgctgacgctagtccctgtggagctgagaacccagcacctgtgcagcttcctctgcgagctctccctgctgcacaccagcctgtccgcctacgccccagcccgcctggctgccgcagccctgctcctggccagactgacgcacgggcagacacagccctggaccactcagctgtgggacctcaccggattctcctatgaagacctcattccctgcgtcttgagcctccataagaagtgcttccatgatgacgcccccaaggactacaggcaagtctctctgaccgccgtgaagcagcggtttgaggacaagcgctatggagaaatcagccaggaagaggtgctgagctacagccagttgtgtgctgcattaggagtgacacaagacagccccgaccccccgactttcctcagcacaggggagatccacgccttcctcagctctccctcggggcggagaaccaaacggaagcgggagaacagcctccaggaagacagaggcagcttcgttaccacccccactgcggagctgtccagccaggaggagacgctgctgggcagcttcctcgactggagcctggactgctgctctggctatgaaggcgaccaggagagtgagggcgagaaggagggcgacgtgacagctcccagcggcatcctcgatgtcaccgtggtctacctgaacccagaacagcattgctgccaggaatccagtgatgaggaggcttgtccagaggacaagggaccccaggacccacaggcactggcgctggacacccagatccctgcaacccctggacccaaacccctggtccgcaccagccgggagccagggaaggacgtcacgacctcagggtactcctccgtcagcaccgcaagtcccacaagctccgtggacggtggcttgggggccctgccccaacctacctcagtgctgtccctggacagtgactcgcacacacagccctgccaccatcaggccaggaagtcatgtttacagtgtcgtcccccaagtcccccggagagcagtgttccccagcaacaggtgaagcggataaacctatgcatacacagtgaggaggaggacatgaacctgggccttgtgaggctgtaagtgtgtcagcacatttgccgcagtggatgtgtactgagggggctggaggcgaagggtgggagcatagcataggaacgctgcatagaccatggaggcctttgcgcagagagcagagaggatgacttgcggccaccaagtttctgtctccgcgggagtcccgtgcaagccatcagaatgttgaaatgagggtgaagagctcagatccctctctttggaaagtttagcctggaagcagttggccacactgtgtggagggcacctctctgtcccttccgtgtctcactgtctctggaagcttcagcccatgtgtgtcctggtgttcccagccccaccagagccccgtgccgggagctgacagctttcacgcttaaggcacgtgtgacctgggtagtcagacaccacttgagcccctgcccacatctgctggtttggggcttcagtggggagctgacagctgtgagcacaccactgtcccctcatccacctcggcctgcatggggcacccacttccttctgggtggggcttccatggtaagggggcctgcgtccctgcacactgcgaggactgccttggccacaggcccactccctacgacacgtgactcgttttagagctctgtcccagaggcgttcgtatgtgacccacagatggcgtcaatgtgaacacctctctttgtgctgaatttctgggccattcttttcctgtcttatttctaaatttccttcttccaagatgaaaacaaaagaaaaacttaaaacagaaggtattaaaaaaacaagagattcccaccattatttaggttcacctgcaaaacaaaaatcttactccagcccctcaatgccatcctgacacactttatgcaaaaagaattttcccagataggctagccagaaaaaacttcaagtcctctgtaacatctgaggtgaccaagaggcagaagagcagagcagtcgggggccgtgtcctggctgatcccaactgcagctctgctgtgggggcccgtgggagggaggcagacccctgggctttcctgctggccacggagactctgctcctgcatggaaagggagcctgggagccagcagcccacgcctggggagcctgcctggggccatgtgaccatggcctctccctgggaacgggctgaccacaacacaccctgctgccatccacttctgtttactctgcaaatgtaagaaagaaccacttggccagaagtgtcccccagatgcttttttttttttttttttggagacagttttgctcttgtctccccggctggagtgcagtggcatgatctcaactctcaactcactgtaacctccgcctcccggatactcctgcctcagcctcctgggtagctgggattacaagcacccaaccacgcccagctaatttttgtattttcggtagagacgggatttcaccatgttggccaggctagtctcgaactcatgacctcaagtgatccgcccacttcggtctcccaaagtgctgggattacaggcatgagccacggcgcctggcccccaaatgctcttgaaccggaaacccagggatgggagatgctcactgagctgctgcttttatgtgtgctggtgctatgtgtgttcatgtccgcggcagctgtctttttgctactataagggaattctggccaccctgggtggggtgtggtcggggtgagaacccaagcgttggaactgtagacccgtcctgtcgactgtgtgcccctgggcatgtgtgagcctcagtttcctcatctgtaaggggggcaatgatacctacctcacaggggtgttgtgaggattaaatgtgaggaggatagtg

SEQ ID NO: 123518 - DNA, 4283 bp, Homo sapiens
  Payload ID: 4249
  Gene Symbol: CCNF
  Gene Name: cyclin F
  Uniprot ID: P41002
  ENST ID: ENST00000397066
  CDS Start-End: 89-2449
ctgcgcctgcgcgagggctacgcgcgctccggccggggcgcgggcgcgctctcaggcgggctccggcggcagcgacgcgagcgcggcgatggggagcggcggcgtggtccactgtaggtgtgccaagtgtttctgttatcctacaaagcgaagaataaggaggaggccccgaaacctgaccatcttgagtctccccgaagatgtgctctttcacatcctgaaatggctttctgtagaggacatcctggccgtccgagctgtacactcccagctgaaggacctggtggacaaccacgccagtgtgtgggcatgtgccagcttccaggagctgtggccgtctccagggaacctgaagctctttgaaagggctgctgaaaaggggaatttcgaagctgctgtgaagctgggcatagcctacctctacaatgaaggcctgtctgtgtctgatgaggcccgcgcagaagtgaatggcctgaaggcctctcgcttcttcagtctcgctgagcggctgaatgtgggtgccgcacctttcatctggctcttcatccgccctccgtggtcggtgagcggaagctgctgcaaggccgtggttcacgagagcctcagggcagagtgccagctgcagaggactcacaaagcatccatattgcactgcttgggcagagtgctgagtctgttcgaggatgaggagaagcagcagcaggcccatgacctgtttgaggaggctgctcatcagggatgtctgaccagctcctacctcctctgggaaagcgacaggaggacagatgtgtcagatcctgggcgatgcctccacagcttccgaaaactcagggactacgctgccaaaggctgctgggaagcgcagctgtctttagccaaagcctgtgcaaatgcaaaccagcttggactggaggtgagagcttccagtgagatcgtctgccagctatttcaggcttcccaggctgtcagtaaacaacaagtcttctccgtgcagaagggactcaatgacacaatgaggtacattctgatcgactggctggtggaagttgccaccatgaaggacttcacaagcctgtgcctgcacctgaccgtggagtgtgtggaccggtacctgcggaggaggctggtgccgcggtacaggctccagctgctgggcatcgcctgcatggtcatctgcacccggtttatcagtaaagagatcctgaccatccgggaggccgtatggctcacggacaacacttacaagtacgaggacctggtgagaatgatgggcgagatcgtctccgccttggaagggaagattcgagtccccactgtggtggattacaaggaggtcctgctgacgctagtccctgtggagctgagaacccagcacctgtgcagcttcctctgcgagctctccctgctgcacaccagcctgtccgcctacgccccagcccgcctggctgccgcagccctgctcctggccagactgacgcacgggcagacacagccctggaccactcagctgtgggacctcaccggattctcctatgaagacctcattccctgcgtcttgagcctccataagaagtgcttccatgatgacgcccccaaggactacaggcaagtctctctgaccgccgtgaagcagcggtttgaggacaagcgctatggagaaatcagccaggaagaggtgctgagctacagccagttgtgtgctgcattaggagtgacacaagacagccccgaccccccgactttcctcagcacaggggagatccacgccttcctcagctctccctcggggcggagaaccaaacggaagcgggagaacagcctccaggaagacagaggcagcttcgttaccacccccactgcggagctgtccagccaggaggagacgctgctgggcagcttcctcgactggagcctggactgctgctctggctatgaaggcgaccaggagagtgagggcgagaaggagggcgacgtgacagctcccagcggcatcctcgatgtcaccgtggtctacctgaacccagaacagcattgctgccaggaatccagtgatgaggaggcttgtccagaggacaagggaccccaggacccacaggcactggcgctggacacccagatccctgcaacccctggacccaaacccctggtccgcaccagccgggagccagggaaggacgtcacgacctcagggtactcctccgtcagcaccgcaagtcccacaagctccgtggacggtggcttgggggccctgccccaacctacctcagtgctgtccctggacagtgactcgcacacacagccctgccaccatcaggccaggaagtcatgtttacagtgtcgtcccccaagtcccccggagagcagtgttccccagcaacaggtgaagcggataaacctatgcatacacagtgaggaggaggacatgaacctgggccttgtgaggctgtaagtgtgtcagcacatttgccgcagtggatgtgtactgagggggctggaggcgaagggtgggagcatagcataggaacgctgcatagaccatggaggcctttgcgcagagagcagagaggatgacttgcggccaccaagtttctgtctccgcgggagtcccgtgcaagccatcagaatgttgaaatgagggtgaagagctcagatccctctctttggaaagtttagcctggaagcagttggccacactgtgtggagggcacctctctgtcccttccgtgtctcactgtctctggaagcttcagcccatgtgtgtcctggtgttcccagccccaccagagccccgtgccgggagctgacagctttcacgcttaaggcacgtgtgacctgggtagtcagacaccacttgagcccctgcccacatctgctggtttggggcttcagtggggagctgacagctgtgagcacaccactgtcccctcatccacctcggcctgcatggggcacccacttccttctgggtggggcttccatggtaagggggcctgcgtccctgcacactgcgaggactgccttggccacaggcccactccctacgacacgtgactcgttttagagctctgtcccagaggcgttcgtatgtgacccacagatggcgtcaatgtgaacacctctctttgtgctgaatttctgggccattcttttcctgtcttatttctaaatttccttcttccaagatgaaaacaaaagaaaaacttaaaacagaaggtattaaaaaaacaagagattcccaccattatttaggttcacctgcaaaacaaaaatcttactccagcccctcaatgccatcctgacacactttatgcaaaaagaattttcccagataggctagccagaaaaaacttcaagtcctctgtaacatctgaggtgaccaagaggcagaagagcagagcagtcgggggccgtgtcctggctgatcccaactgcagctctgctgtgggggcccgtgggagggaggcagacccctgggctttcctgctggccacggagactctgctcctgcatggaaagggagcctgggagccagcagcccacgcctggggagcctgcctggggccatgtgaccatggcctctccctgggaacgggctgaccacaacacaccctgctgccatccacttctgtttactctgcaaatgtaagaaagaaccacttggccagaagtgtcccccagatgcttttttttttttttttttggagacagttttgctcttgtctccccggctggagtgcagtggcatgatctcaactctcaactcactgtaacctccgcctcccggatactcctgcctcagcctcctgggtagctgggattacaagcacccaaccacgcccagctaatttttgtattttcggtagagacgggatttcaccatgttggccaggctagtctcgaactcatgacctcaagtgatccgcccacttcggtctcccaaagtgctgggattacaggcatgagccacggcgcctggcccccaaatgctcttgaaccggaaacccagggatgggagatgctcactgagctgctgcttttatgtgtgctggtgctatgtgtgttcatgtccgcggcagctgtctttttgctactataagggaattctggccaccctgggtggggtgtggtcggggtgagaacccaagcgttggaactgtagacccgtcctgtcgactgtgtgcccctgggcatgtgtgagcctcagtttcctcatctgtaaggggggcaatgatacctacctcacaggggtgttgtgaggattaaatgtgaggaggatagtggca

SEQ ID NO: 123519 - DNA, 789 bp, Homo sapiens
  Payload ID: 4249
  Gene Symbol: CCNF
  Gene Name: cyclin F
  ENST ID: ENST00000564236
  CDS Start-End: 1-560
gagcttccagtgagatcgtctgccagctatttcaggcttcccaggctgtcagtaaacaacaagtcttctccgtgcagaagggactcaatgacacaatgaggtacattctgatcgactggctggtggaagttgccaccatgaaggacttcacaagcctgtgcctgcacctgaccgtggagtgtgtggaccggtacctgcggaggaggctggtgccgcggtacaggctccagctgctgggcatcgcctgcatggtcatctgcacccggtttatcagtaaagagatcctgaccatccgggaggccgtatggctcacggacaacacttacaagtacgaggacctggtgagaatgatgggcgagatcgtctccgccttggaagggaagattcgaccatggagcaggaggccacggttgcaccacgtcgccatctgcgctggtgcgctacgcgtgcagcatcggcgtgaacatcatccgggccagaccctgcgctgggcctgcatgcggcactgcaccaaggagcccccgagcgctgagagcccacaccccgtcccggctgtctaggtccccactgtggtggattacaaggaggtcctgctgacgctagtccctgtggagctgagaacccagcacctgtgcagcttcctctgcgagctctccctgctgcacaccagcctgtccgcctacgccccagcccgcctggctgccgcagccctgctcctggccagactgacgcacgggcagacacagccctggaccactcagctgtgggacctcaccggattctcctatg

SEQ ID NO: 123520 - DNA, 4442 bp, Homo sapiens
  Payload ID: 4250
  Gene Symbol: GAK
  Gene Name: cyclin G associated kinase
  Uniprot ID: O14976
  ENST ID: ENST00000314167
  CDS Start-End: 112-4047
gaagatggtgcacctccgggccggcggttgctgagctgacccggacggcgagggagcgggagcccgagcccgaccactccggctgccgcggggtgcggcgcagccaccgccatgtcgctgctgcagtcggcgctcgacttcttggcgggtccaggctccctgggcggtgcttccggccgcgaccagagtgacttcgtggggcagacggtggaactgggcgagctgcggctgcgggtgcggcgggtcctggccgaaggagggtttgcatttgtgtatgaagctcaagatgtggggagtggcagagagtatgcattaaagaggctattatccaatgaagaggaaaagaacagagccatcattcaagaagtttgcttcatgaaaaagctttccggccacccgaacattgtccagttttgttctgcagcgtctataggaaaagaggagtcagacacggggcaggctgagttcctcttgctcacagagctctgtaaagggcagctggtggaatttttgaagaaaatggaatctcgaggccccctttcgtgcgacacggttctgaagatcttctaccagacgtgccgcgccgtgcagcacatgcaccggcagaagccgcccatcatccacagggacctcaaggttgagaacttgttgcttagtaaccaagggaccattaagctgtgtgactttggcagtgccacgaccatctcgcactaccctgactacagctggagcgcccagaggcgagccctggtggaggaagagatcacgaggaatacaacaccaatgtatagaacaccagaaatcatagacttgtattccaacttcccgatcggcgagaagcaggatatctgggccctgggctgcatcttgtacctgctgtgcttccggcagcacccttttgaggatggagcgaaacttcgaatagtcaatgggaagtactcgatccccccgcacgacacgcagtacacggtcttccacagcctcatccgcgccatgctgcaggtgaacccggaggagcggctgtccatcgccgaggtggtgcaccagctgcaggagatcgcggccgcccgcaacgtgaaccccaagtctcccatcacagagctcctggagcagaatggaggctacgggagcgccacactgtcccgagggccaccccctcccgtgggccccgctggcagtggctacagtggaggcctggcgctggcggagtacgaccagccgtatggcggcttcctggacattctgcggggtgggacagagcggctcttcaccaacctcaaggacacctcctccaaggtcatccagtccgtcgctaattatgcaaagggtgacctggacatatcttacatcacatccagaattgcagtgatgtcattcccagcagaaggtgtggagtcagcgctcaaaaacaacatcgaagatgtgcggttgttcctggactccaagcacccagggcactatgccgtctacaacctgtccccgaggacctaccggccctccaggttccacaaccgggtctccgagtgtggctgggcagcacggcgggccccacacctgcacaccctgtacaacatctgcaggaacatgcacgcctggctgcggcaggaccacaagaacgtctgcgtcgtgcactgcatggacgggagagccgcgtctgctgtggccgtctgctccttcctgtgcttctgccgtctcttcagcaccgcggaggccgccgtgtacatgttcagcatgaagcgctgcccaccaggcatctggccatcccacaaaaggtacatcgagtacatgtgtgacatggtggcggaggagcccatcacaccccacagcaagcccatcctggtgagggccgtggtcatgacacccgtgccgctgttcagcaagcagaggagcggctgcaggcccttctgcgaggtctacgtgggggacgagcgtgtggccagcacctcccaggagtacgacaagatgcgggactttaagattgaagatggcaaagcggtgattcccctgggcgtcacggtgcaaggagacgtgctcatcgtcatctatcacgcccggtccactctgggcggccggctgcaggccaagatggcatccatgaagatgttccagattcagttccacacggggtttgtgcctcggaacgccaccactgtgaaatttgccaagtatgacctggacgcgtgtgacattcaagaaaaatacccggatttatttcaagtgaacctggaagtggaggtggagcccagggacaggccgagccgggaagccccaccatgggagaactcgagcatgagggggctgaaccccaaaatcctgttttccagccgggaggagcagcaagacattctgtctaagtttgggaagccggagcttccccggcagcctggctccacggctcagtatgatgctggggcagggtccccggaagccgaacccacagactctgactcaccgccaagcagcagcgcggacgccagtcgcttcctgcacacgctggactggcaggaagagaaggaggcagagactggtgcagaaaatgcctcttccaaggagagcgagtctgccctgatggaggacagagacgagagtgaggtgtcagatgaagggggatccccgatctccagcgagggccaggaacccagggccgacccagagccccccggcctggcagcagggctggtgcagcaggacttggtttttgaggtggagacaccggctgtgctgccagagcctgtgccacaggaagacggggtcgacctcctgggcctgcactccgaggtgggcgcagggccagctgtacccccgcaggcctgcaaggccccctccagcaacaccgacctgctcagctgcctccttgggccccctgaggccgcctcccaggggcccccggaggatctgctcagcgaggacccgctgctcctggcaagcccggcccctcccctgagcgtgcagagcaccccaagaggagggccccctgccgctgctgacccctttggcccgcttctgccgtcttcaggcaacaactcccagccctgctccaatcctgatctcttcggcgaatttctcaattcggactctgtgaccgtcccaccatccttcccgtctgcccacagtgctccgcccccatcctgcagcgccgacttcctgcacctgggggatctgccaggagagcccagcaagatgacagcctcgtccagcaacccagacctgctgggaggatgggctgcctggaccgagactgcagcatcggcagtggcccccacgccagccacagaaggccccctcttctctcctggaggtcagccggccccttgtggctctcaggccagctggaccaagtctcagaacccggacccatttgctgaccttggcgacctcagctccggcctccaaggctcaccagctggattccctcctgggggcttcattcccaaaacggccaccacgcccaaaggcagcagctcctggcagacaagtcggccgccagcccagggcgcctcatggccccctcaggccaagccgccccccaaagcctgcacacagccaaggcctaactatgcctcgaacttcagtgtgatcggggcgcgggaggagcggggggtccgcgcacccagctttgctcaaaagccaaaagtctctgagaacgactttgaagatctgttgtccaatcaaggcttctcctccaggtctgacaagaaagggccaaagaccattgcagagatgaggaagcaggacctggctaaagacacggacccactcaagctgaagctcctggactggattgagggcaaggagcggaacatccgggccctgctgtccacgctgcacacagtgctgtgggacggggagagccgctggacgcccgtgggcatggccgacctggtggctccggagcaagtgaagaagcactatcgccgcgcggtgctggctgtgcaccccgacaaggctgcggggcagccgtacgagcagcacgccaagatgatcttcatggagctgaatgacgcctggtcggagtttgagaaccagggctcccggcccctcttctgaggccgcagtggtggtggctgcgcacacagctccacaggttgggagccgtcgtgggacctgggtccccaccgtgaggaccccgtgggcgacagcaggtgtggccagggtggggctccgagccccgggtcaccgcccgcccagcgttccaggcacatgaagagaaagcattccaaagcctctgattgttgtttcctttttctcctcccgaaggaacagctgattcatgctcctcccgcaattgtcacgtctgtgatttatttggtgtttcgggcgtggcctctggagccccggcacgtggtgggccacgctgctggcgctcatgggccctggtgtttgcaccgcactttgtaatcagtcccgtggttgtctgtacagaattaaactattttccgatg

SEQ ID NO: 123521 - DNA, 1768 bp, Homo sapiens
  Payload ID: 4250
  Gene Symbol: GAK
  Gene Name: cyclin G associated kinase
  ENST ID: ENST00000511980
  CDS Start-End: 1-1403
aggtgggcgcagggccagctgtacccccgcaggcctgcaaggccccctccagcaacaccgacctgctcagctgcctccttgggccccctgaggccgcctcccaggggcccccggaggatctgctcagcgaggacccgctgctcctggcaagcccggcccctcccctgagcgtgcagagcaccccaagaggagggccccctgccgctgctgacccctttggcccgcttctgccgtcttcaggcaacaactcccagccctgctccaatcctgatctcttcggcgaatttctcaattcggactctgtgaccgtcccaccatccttcccgtctgcccacagtgctccgcccccatcctgcagcgccgacttcctgcacctgggggatctgccaggagagcccagcaagatgacagcctcgtccagcaacccagacctgctgggaggatgggctgcctggaccgagactgcagcatcggcagtggcccccacgccagccacagaaggccccctcttctctcctggaggtcagccggccccttgtggctctcaggccagctggaccaagtctcagaacccggacccatttgctgaccttggcgacctcagctccggcctccaagacccccaagcccagagcacagtgagcccaaggggacagcgtgtctgcacctgttccaggcgactgccaactggcaagctaaaaccgggagttgctgacactggcactgctgccagcccccaccggcattgtggctcaccagctggattccctcctgggggcttcattcccaaaacggccaccacgcccaaaggcagcagctcctggcagacaagtcggccgccagcccagggcgcctcatggccccctcaggccaagccgccccccaaagcctgcacacagccaaggcctaactatgcctcgaacttcagtgtgatcggggcgcgggaggagcggggggtccgcgcacccagctttgctcaaaagccaaaagtctctgagaacgactttgaagatctgttgtccaatcaaggcttctcctccaggtctgacaagaaagggccaaagaccattgcagagatgaggaagcaggacctggctaaagacacggacccactcaagctgaagctcctggactggattgagggcaaggagcggaacatccgggccctgctgtccacgctgcacacagtgctgtgggacggggagagccgctggacgcccgtgggcatggccgacctggtggctccggagcaagtgaagaagcactatcgccgcgcggtgctggctgtgcaccccgacaaggctgcggggcagccgtacgagcagcacgccaagatgatcttcatggagctgaatgacgcctggtcggagtttgagaaccagggctcccggcccctcttctgaggccgcagtggtggtggctgcgcacacagctccacaggttgggagccgtcgtgggacctgggtccccaccgtgaggaccccgtgggcgacagcaggtgtggccagggtggggctccgagccccgggtcaccgcccgcccagcgttccaggcacatgaagagaaagcattccaaagcctctgattgttgtttcctttttctcctcccgaaggaacagctgattcatgctcctcccgcaattgtcacgtctgtgatttatttggtgtttcgggcgtggcctctggagccccggcacgtggtgggccacgctgctggcgctcatgggccctggtgtttgcaccgcactttgtaatcagtcccgtggtt

SEQ ID NO: 123522 - DNA, 4280 bp, Homo sapiens
  Payload ID: 4250
  Gene Symbol: GAK
  Gene Name: cyclin G associated kinase
  Uniprot ID: O14976
  ENST ID: ENST00000511163
  CDS Start-End: 187-3885
aggggacggggctaggccgggtcgccgcctgacgcgacgcgtcctcacgggcgcctacgtcacggcgtcgaggcggaagatggtgcacctccgggccggcggttgctgagctgacccggacggcgagggagcgggagcccgagcccgaccactccggctgccgcggggtgcggcgcagccaccgccatgtcgctgctgcagtcggcgctcgacttcttggcgggtccaggctccctgggcggtgcttccggccgcgaccagagtgacttcgtggggcagacggtggaactgggcgagctgcggctgcgggtgcggcgggtcctggccgaagggcagctggtggaatttttgaagaaaatggaatctcgaggccccctttcgtgcgacacggttctgaagatcttctaccagacgtgccgcgccgtgcagcacatgcaccggcagaagccgcccatcatccacagggacctcaaggttgagaacttgttgcttagtaaccaagggaccattaagctgtgtgactttggcagtgccacgaccatctcgcactaccctgactacagctggagcgcccagaggcgagccctggtggaggaagagatcacgaggaatacaacaccaatgtatagaacaccagaaatcatagacttgtattccaacttcccgatcggcgagaagcaggatatctgggccctgggctgcatcttgtacctgctgtgcttccggcagcacccttttgaggatggagcgaaacttcgaatagtcaatgggaagtactcgatccccccgcacgacacgcagtacacggtcttccacagcctcatccgcgccatgctgcaggtgaacccggaggagcggctgtccatcgccgaggtggtgcaccagctgcaggagatcgcggccgcccgcaacgtgaaccccaagtctcccatcacagagctcctggagcagaatggaggctacgggagcgccacactgtcccgagggccaccccctcccgtgggccccgctggcagtggctacagtggaggcctggcgctggcggagtacgaccagccgtatggcggcttcctggacattctgcggggtgggacagagcggctcttcaccaacctcaaggacacctcctccaaggtcatccagtccgtcgctaattatgcaaagggtgacctggacatatcttacatcacatccagaattgcagtgatgtcattcccagcagaaggtgtggagtcagcgctcaaaaacaacatcgaagatgtgcggttgttcctggactccaagcacccagggcactatgccgtctacaacctgtccccgaggacctaccggccctccaggttccacaaccgggtctccgagtgtggctgggcagcacggcgggccccacacctgcacaccctgtacaacatctgcaggaacatgcacgcctggctgcggcaggaccacaagaacgtctgcgtcgtgcactgcatggacgggagagccgcgtctgctgtggccgtctgctccttcctgtgcttctgccgtctcttcagcaccgcggaggccgccgtgtacatgttcagcatgaagcgctgcccaccaggcatctggccatcccacaaaaggtacatcgagtacatgtgtgacatggtggcggaggagcccatcacaccccacagcaagcccatcctggtgagggccgtggtcatgacacccgtgccgctgttcagcaagcagaggagcggctgcaggcccttctgcgaggtctacgtgggggacgagcgtgtggccagcacctcccaggagtacgacaagatgcgggactttaagattgaagatggcaaagcggtgattcccctgggcgtcacggtgcaaggagacgtgctcatcgtcatctatcacgcccggtccactctgggcggccggctgcaggccaagatggcatccatgaagatgttccagattcagttccacacggggtttgtgcctcggaacgccaccactgtgaaatttgccaagtatgacctggacgcgtgtgacattcaagaaaaatacccggatttatttcaagtgaacctggaagtggaggtggagcccagggacaggccgagccgggaagccccaccatgggagaactcgagcatgagggggctgaaccccaaaatcctgttttccagccgggaggagcagcaagacattctgtctaagtttgggaagccggagcttccccggcagcctggctccacggctcagtatgatgctggggcagggtccccggaagccgaacccacagactctgactcaccgccaagcagcagcgcggacgccagtcgcttcctgcacacgctggactggcaggaagagaaggaggcagagactggtgcagaaaatgcctcttccaaggagagcgagtctgccctgatggaggacagagacgagagtgaggtgtcagatgaagggggatccccgatctccagcgagggccaggaacccagggccgacccagagccccccggcctggcagcagggctggtgcagcaggacttggtttttgaggtggagacaccggctgtgctgccagagcctgtgccacaggaagacggggtcgacctcctgggcctgcactccgaggtgggcgcagggccagctgtacccccgcaggcctgcaaggccccctccagcaacaccgacctgctcagctgcctccttgggccccctgaggccgcctcccaggggcccccggaggatctgctcagcgaggacccgctgctcctggcaagcccggcccctcccctgagcgtgcagagcaccccaagaggagggccccctgccgctgctgacccctttggcccgcttctgccgtcttcaggcaacaactcccagccctgctccaatcctgatctcttcggcgaatttctcaattcggactctgtgaccgtcccaccatccttcccgtctgcccacagtgctccgcccccatcctgcagcgccgacttcctgcacctgggggatctgccaggagagcccagcaagatgacagcctcgtccagcaacccagacctgctgggaggatgggctgcctggaccgagactgcagcatcggcagtggcccccacgccagccacagaaggccccctcttctctcctggaggtcagccggccccttgtggctctcaggccagctggaccaagtctcagaacccggacccatttgctgaccttggcgacctcagctccggcctccaaggctcaccagctggattccctcctgggggcttcattcccaaaacggccaccacgcccaaaggcagcagctcctggcagacaagtcggccgccagcccagggcgcctcatggccccctcaggccaagccgccccccaaagcctgcacacagccaaggcctaactatgcctcgaacttcagtgtgatcggggcgcgggaggagcggggggtccgcgcacccagctttgctcaaaagccaaaagtctctgagaacgactttgaagatctgttgtccaatcaaggcttctcctccaggtctgacaagaaagggccaaagaccattgcagagatgaggaagcaggacctggctaaagacacggacccactcaagctgaagctcctggactggattgagggcaaggagcggaacatccgggccctgctgtccacgctgcacacagtgctgtgggacggggagagccgctggacgcccgtgggcatggccgacctggtggctccggagcaagtgaagaagcactatcgccgcgcggtgctggctgtgcaccccgacaaggctgcggggcagccgtacgagcagcacgccaagatgatcttcatggagctgaatgacgcctggtcggagtttgagaaccagggctcccggcccctcttctgaggccgcagtggtggtggctgcgcacacagctccacaggttgggagccgtcgtgggacctgggtccccaccgtgaggaccccgtgggcgacagcaggtgtggccagggtggggctccgagccccgggtcaccgcccgcccagcgttccaggcacatgaagagaaagcattccaaagcctctgattgttgtttcctttttctcctcccgaaggaacagctgattcatgctcctcccgcaattgtcacgtctgtgatttatttggtgtttcgggcgtggcctctggagccccggcacgtggtgggccacgctgctggcgctcatgggccctggtgtttgcaccgcactttgtaatcagtcccgtggttgtctgtacagaattaaactattttccgatg

SEQ ID NO: 123523 - DNA, 577 bp, Homo sapiens
  Payload ID: 4250
  Gene Symbol: GAK
  Gene Name: cyclin G associated kinase
  ENST ID: ENST00000512325
  CDS Start-End: 131-358
acgtcacggcgtcgaggcggaagatggtgcacctccgggccggcggttgctgagctgacccggacggcgagggagcgggagcccgagcccgaccactccggctgccgcggggtgcggcgcagccaccgccatgtcgctgctgcagtcggcgctcgacttcttggcgggtccaggctccctgggcggtgcttccggccgcgaccagagtgacttcgtggggcagacggtggaactgggcgagctgcggctgcgggtgcggcgggtcctggccgaaggagggtttgcatttgtgtatgaagctcaagatgtggggagtggcagagagtatgcattaaagggcagctggtggaatttttgaagaaaatggaatctcgaggccccctttcgtgcgacacggttctgaagatcttctaccagacgtgccgcgccgtgcagcacatgcaccggcagaagccgcccatcatccacagggacctcaaggttgagaacttgttgcttagtaaccaagggaccattaagctgtgtgactttggcagtgccacgaccatctcgcactaccctgactacagctggagcg

SEQ ID NO: 123524 - DNA, 568 bp, Homo sapiens
  Payload ID: 4250
  Gene Symbol: GAK
  Gene Name: cyclin G associated kinase
  ENST ID: ENST00000511229
  CDS Start-End: 358-568
agatgccgtctatcaggctggggaggtttctttctgtcctcgtttgctgagagttttaaatttcatgatgtagtttttccactgcagaaacctaaaagaaaactaagcaaattagaccccaaaacaatagaattaaattgattttcaaatgttaaaccaactctgctcctgatgtcttggtgggcttggtttgctgttttatgaagaattcttgggtccacattcgtgagtgatgttggagggtttgcatttgtgtatgaagctcaagatgtggggagtggcagagagtatgcattaaagaggctattatccaatgaagaggaaaagaacagagccatcattcaagaagtttgcttcatgaaaaagctttccggccacccgaacattgtccagttttgttctgcagcgtctataggaaaagaggagtcagacacggggcaggctgagttcctcttgctcacagagctctgtaaagggcagctggtggaatttttgaagaaaatggaatctcgaggccccctttcgtgcgacacggttctgaagatcttctaccagacgtgccgcgccg

SEQ ID NO: 123525 - DNA, 929 bp, Homo sapiens
  Payload ID: 4250
  Gene Symbol: GAK
  Gene Name: cyclin G associated kinase
  ENST ID: ENST00000504668
  CDS Start-End: 1-210
cccaaaggcagcagctcctggcagacaagtcggccgccagcccagggcgcctcatggccccctcaggccaagccgccccccaaagcctgcacacagccaaggcctaactatgcctcgaacttcagtgtgatcggggcgcgggaggagcggggggtccgcgcacccagctttggtctgacaagaaagggccaaagaccattgcagagatgaggaagcaggacctggctaaagacacggacccactcaagctgaagctcctggactggattgagggcaaggagcggaacatccgggccctgctgtccacgctgcacacagtgctgtgggacggggagagccgctggacgcccgtgggcatggccgacctggtggctccggagcaagtgaagaagcactatcgccgcgcggtgctggctgtgcaccccgacaaggctgcggggcagccgtacgagcagcacgccaagatgatcttcatggagctgaatgacgcctggtcggagtttgagaaccagggctcccggcccctcttctgaggccgcagtggtggtggctgcgcacacagctccacaggttgggagccgtcgtgggacctgggtccccaccgtgaggaccccgtgggcgacagcaggtgtggccagggtggggctccgagccccgggtcaccgcccgcccagcgttccaggcacatgaagagaaagcattccaaagcctctgattgttgtttcctttttctcctcccgaaggaacagctgattcatgctcctcccgcaattgtcacgtctgtgatttatttggtgtttcgggcgtggcctctggagccccggcacgtggtgggccacgctgctggcgctcatgggccctggtgtttgcaccgcactttgtaatcagtcccgtggttgtctgtacagaattaaactattttccgatga

SEQ ID NO: 123526 - DNA, 554 bp, Homo sapiens
  Payload ID: 4250
  Gene Symbol: GAK
  Gene Name: cyclin G associated kinase
  ENST ID: ENST00000502656
  CDS Start-End: 141-554
acgggcgcctacgtcacggcgtcgaggcggaagatggtgcacctccgggccggcggttgctgagctgacccggacggcgagggagcgggagcccgagcccgaccactccggctgccgcggggtgcggcgcagccaccgccatgtcgctgctgcagtcggcgctcgacttcttggcgggtccaggctccctgggcggtgcttccggccgcgaccagagtgacttcgtggggcagacggtggaactgggcgagctgcggctgcgggtgcggcgggtcctggccgaaggagggtttgcatttgtgtatgaagctcaagatgtggggagtggcagagagtatgcattaaaggttgagaacttgttgcttagtaaccaagggaccattaagctgtgtgactttggcagtgccacgaccatctcgcactaccctgactacagctggagcgcccagaggcgagccctggtggaggaagagatcacgaggaatacaacaccaatgtatagaacaccagaaatcatagacttgtattccaacttcccgatcggcgagaagcag

SEQ ID NO: 123527 - DNA, 763 bp, Homo sapiens
  Payload ID: 4250
  Gene Symbol: GAK
  Gene Name: cyclin G associated kinase
  ENST ID: ENST00000510799
  CDS Start-End: 1-763
gctgccagagcctgtgccacaggaagacggggtcgacctcctgggcctgcactccgaggtgggcgcagggccagctgtacccccgcaggcctgcaaggccccctccagcaacaccgacctgctcagctgcctccttgggccccctgaggccgcctcccaggggcccccggaggatctgctcagcgaggacccgctgctcctggcaagcccggcccctcccctgagcgtgcagagcaccccaagaggagggccccctgccgctggcaacaactcccagccctgctccaatcctgatctcttcggcgaatttctcaattcggactctgtgaccgtcccaccatccttcccgtctgcccacagtgctccgcccccatcctgcagcgccgacttcctgcacctgggggatctgccaggagagcccagcaagatgacagcctcgtccagcaacccagacctgctgggaggatgggctgcctggaccgagactgcagcatcggcagtggcccccacgccagccacagaaggccccctcttctctcctggaggtcagccggccccttgtggctctcaggccagctggaccaagtctcagaacccggacccatttgctgaccttggcgacctcagctccggcctccaaggctcaccagctggattccctcctgggggcttcattcccaaaacggccaccacgcccaaaggcagcagctcctggcagacaagtcggccgccagcccagggcgcctcatggccccctcaggcc

SEQ ID NO: 123528 - DNA, 468 bp, Homo sapiens
  Payload ID: 4250
  Gene Symbol: GAK
  Gene Name: cyclin G associated kinase
  ENST ID: ENST00000507580
  CDS Start-End: 131-280
acgtcacggcgtcgaggcggaagatggtgcacctccgggccggcggttgctgagctgacccggacggcgagggagcgggagcccgagcccgaccactccggctgccgcggggtgcggcgcagccaccgccatgtcgctgctgcagtcggcgctcgacttcttggcgggtccaggctccctgggcggtgcttccggccgcgaccagagtgacttcgtggggcagacggtggaactgggcgagctgcggctgcgggtgcggcgggtcctggccgaaggttgagaacttgttgcttagtaaccaagggaccattaagctgtgtgactttggcagtgccacgaccatctcgcactaccctgactacagctggagcgcccagaggcgagccctggtggaggaagaggccctgggctgcatcttgtacctgctgtgcttccggcagcacccttttgaggatggagcgaaacttc

SEQ ID NO: 123529 - DNA, 1326 bp, Homo sapiens
  Payload ID: 4250
  Gene Symbol: GAK
  Gene Name: cyclin G associated kinase
  ENST ID: ENST00000505819
  CDS Start-End: 179-535
gggctaggccgggtcgccgcctgacgcgacgcgtcctcacgggcgcctacgtcacggcgtcgaggcggaagatggtgcacctccgggccggcggttgctgagctgacccggacggcgagggagcgggagcccgagcccgaccactccggctgccgcggggtgcggcgcagccaccgccatgtcgctgctgcagtcggcgctcgacttcttggcgggtccaggctccctgggcggtgcttccggccgcgaccagagtgacttcgtggggcagacggtggaactgggcgagctgcggctgcgggtgcggcgggtcctggccgaaggagggtttgcatttgtgtatgaagctcaagatgtggggagtggcagagagtatgcattaaagaggctattatccaatgaagaggaaaagaacagagccatcattcaagaagtttgcttcatgctctgttcactcggagagcccgccggctgcctgagtgtgggttcgggtggacacagccacgccgcagcctccctgcgcacagccccctgagggccctgcctcctcctgccacgcgcgggatggactttggtgtcgctgtggtcagtgcacagaactgtggacatggttatgtacgttctcctttaacaagacaactgcagaaaaagctttccggccacccgaacattgtccagttttgttctgcagcgtctataggaaaagaggagtcagacacggggcaggctgagttcctcttgctcacagagctctgtaaagggcagctggtggaatttttgaagaaaatggaatctcgaggccccctttcgtgcgacacggttctgaagatcttctaccagacgtgccgcgccgtgcagcacatgcaccggcagaagccgcccatcatccacagggacctcaaggttgagaacttgttgcttagtaaccaagggaccattaagctgtgtgactttggcagtgccacgaccatctcgcactaccctgactacagctggagcgcccagaggcgagccctggtggaggaagagatcacgaggaatacaacaccaatgtatagaacaccagaaatcatagacttgtattccaacttcccgatcggcgagaagcaggatatctgggccctgggctgcatcttgtacctgctgtgcttccggcagcacccttttgaggatggagcgaaacttcgaatagtcaatgggaagtactcgatccccccgcacgacacgcagtacacggtcttccacagcctcatccgcgccatgctgcaggtgaacccggaggagcggctgtccatcgccgaggtggtgcaccagctgcaggagatc

SEQ ID NO: 123530 - DNA, 1248 bp, Homo sapiens
  Payload ID: 4250
  Gene Symbol: GAK
  Gene Name: cyclin G associated kinase
  ENST ID: ENST00000618573
  CDS Start-End: 1-1248
atgtcgctgctgcagtcggcgctcgacttcttggcgggtccaggctccctgggcggtgcttccggccgcgaccagagtgacttcgtggggcagacggtggaactgggcgagctgcggctgctcctggcaagcccggcccctcccctgagcgtgcagagcaccccaagaggagggccccctgccgctgctgacccctttggcccgcttctgccgtcttcaggcaacaactcccagccctgctccaatcctgatctcttcggcgaatttctcaattcggactctgtgaccgtcccaccatccttcccgtctgcccacagtgctccgcccccatcctgcagcgccgacttcctgcacctgggggatctgccaggagagcccagcaagatgacagcctcgtccagcaacccagacctgctgggaggatgggctgcctggaccgagactgcagcatcggcagtggcccccacgccagccacagaaggccccctcttctctcctggaggtcagccggccccttgtggctctcaggccagctggaccaagtctcagaacccggacccatttgctgaccttggcgacctcagctccggcctccaaggctcaccagctggattccctcctgggggcttcattcccaaaacggccaccacgcccaaaggcagcagctcctggcagacaagtcggccgccagcccagggcgcctcatggccccctcaggccaagccgccccccaaagcctgcacacagccaaggcctaactatgcctcgaacttcagtgtgatcggggcgcgggaggagcggggggtccgcgcacccagctttgctcaaaagccaaaagtctctgagaacgactttgaagatctgttgtccaatcaaggcttctcctccaggtctgacaagaaagggccaaagaccattgcagagatgaggaagcaggacctggctaaagacacggacccactcaagctgaagctcctggactggattgagggcaaggagcggaacatccgggccctgctgtccacgctgcacacagtgctgtgggacggggagagccgctggacgcccgtgggcatggccgacctggtggctccggagcaagtgaagaagcactatcgccgcgcggtgctggctgtgcaccccgacaaggctgcggggcagccgtacgagcagcacgccaagatgatcttcatggagctgaatgacgcctggtcggagtttgagaaccagggctcccggcccctcttc

SEQ ID NO: 123531 - DNA, 497 bp, Homo sapiens
  Payload ID: 4250
  Gene Symbol: GAK
  Gene Name: cyclin G associated kinase
  ENST ID: ENST00000628912
  CDS Start-End: 141-497
acgggcgcctacgtcacggcgtcgaggcggaagatggtgcacctccgggccggcggttgctgagctgacccggacggcgagggagcgggagcccgagcccgaccactccggctgccgcggggtgcggcgcagccaccgccatgtcgctgctgcagtcggcgctcgacttcttggcgggtccaggctccctgggcggtgcttccggccgcgaccagagtgacttcgtggggcagacggtggaactgggcgagctgcggctgcgggtgcggcgggtcctggccgaaggagggtttgcatttgtgtatgaagctcaagatgtggggagtggcagagagtatgcattaaagaggctattatccaatgaagaggaaaagaacagagccatcattcaagaagtttgcttcatgctctgttcactcggagagcccgccggctgcctgagtgtgggttcgggtggacacagccacgccgcagcctccctgcgcacagccccctga

SEQ ID NO: 123532 - DNA, 2458 bp, Homo sapiens
  Payload ID: 4251
  Gene Symbol: CCNG1
  Gene Name: cyclin G1
  Uniprot ID: P51959
  ENST ID: ENST00000340828
  CDS Start-End: 225-1112
agggcaggcgcggccccttcggctccgagctgaccctgatcagggccgagttgtctcggcggcgctgccgaggcctccacccaggacagtccccctccccgggcctctctcctcttgcctacgagtcccctctcctcgtaggcctctcggatctgatatcgtggggtgaggtgagcaggcccggggagggtggttaccgctgaggagctgcagtctctgtcaagatgatagaggtactgacaacaactgactctcagaaactgctacaccagctgaatgccctgttggaacaggagtctagatgtcagccaaaggtctgtggtttgagactaattgagtctgcacacgataatggcctcagaatgactgcaagactaagggactttgaagtaaaagatcttcttagtctaactcagttctttggctttgacacagagacattttctctagctgtgaatttactggacagattcctgtctaaaatgaaggtacagcccaagcaccttgggtgtgttggactgagctgcttttatttggctgtaaaatcaatagaagaggaaaggaatgtcccattggcaactgacttgatccgaataagtcaatataggtttacggtttcagacttgatgagaatggaaaagattgtattggagaaggtgtgttggaaagtcaaagctactactgcctttcaatttctgcaactgtattattcactccttcaagagaacttgccacttgaaaggagaaatagcattaattttgaaagactagaagctcaactgaaggcatgtcattgcaggatcatattttctaaagcaaagccttctgtgttggcattgtctatcattgcattagagatccaagcacagaagtgtgtagagttaacagaaggaatagaatgtcttcagaaacattccaagataaatggcagagatctgaccttctggcaagagcttgtatccaaatgtttaactgaatattcatcaaataagtgttccaaaccaaatgttcagaagttgaaatggattgtttctgggcgtactgcacggcaattgaagcatagctactacagaataactcaccttccaacaattcctgaaatggtcccttaactggattattacagcaccaaaaaacttctctgaagcctttctccacaaccttgttctatggattccataatgttacaatggatttaagctatgaagcctcaaaacatcacgagataagcatgatggtctcagacttgggaaaactgcctaatattatgctgtagtggaattatgtttagatttgaattcatctgtgaagcattcaaatcaaagctaaaagcctaaatgtgaaatgctaatgacaagcctgagaaggtaaactgtgaatcttcatttctatcattgatctaactttagatattggatcaatatatttaggtggtattgaaaatgctattggaggagtcacactaatactatcaactatcagtcttcccacagcttcaatcactgtcattattctaatcctactcctacttaaattttaagttatgaggtttatgtcaaaagcaacatttcacaaatgtacttttaaggcataataagggttaacattctaggcagtataaacacaccccataatgcaagtaataggtaatctagagatgtggactttattgctatatgggaattacatttaaatttgagggcattttatataaagaaaaatacagacctataaagtttggcatattcattaagttatcttttaatatttttttctagaaaacaggtgacatttgtatctacgataaaaatttttatacagaacctactgcctcaaactgaatcccatcaagaaaactagtttctattgtattagtaactcaaaataaattatcacttcgaaaacttgctttcccacactaaggtaagttcagactagattgaacactccagaattttttactacagactgtttttaagttagaagtgatggcaattttataaatagagaatatacttccactgatgcccttactgtgccaaaacaaaaatcttaagaaaagcaagtagacaccttcataactatgaatgaagctgctgaagtagtgtttaggatcctccatggcagttagtgaatgtaagaagtacagtgttaaagtgttgtaaacagttactcagtgcaatgtatagcctgagtctatccatgatggctatatccaatttgacatcacgttatggatcagtacacaatgaaaaaccaaagaaccacagtatatcttattcttaacttttgtaaaccatgttttatgggtaactttttagttttcccaaaaggctgataaatttcaatattttgaatacatcattgttaattttgagttggcagaggtaaactaaccaactaccattatgttttagtactaagggatatacctttcaataaagttaatgaaattcaa

SEQ ID NO: 123533 - DNA, 2366 bp, Homo sapiens
  Payload ID: 4251
  Gene Symbol: CCNG1
  Gene Name: cyclin G1
  Uniprot ID: P51959
  ENST ID: ENST00000393929
  CDS Start-End: 135-1022
attcctcgttagggcaggcgcggccccttcggctccgagctgaccctgatcagggccgagttgtctcggcggcgctgccgaggcctccacccagggagggtggttaccgctgaggagctgcagtctctgtcaagatgatagaggtactgacaacaactgactctcagaaactgctacaccagctgaatgccctgttggaacaggagtctagatgtcagccaaaggtctgtggtttgagactaattgagtctgcacacgataatggcctcagaatgactgcaagactaagggactttgaagtaaaagatcttcttagtctaactcagttctttggctttgacacagagacattttctctagctgtgaatttactggacagattcctgtctaaaatgaaggtacagcccaagcaccttgggtgtgttggactgagctgcttttatttggctgtaaaatcaatagaagaggaaaggaatgtcccattggcaactgacttgatccgaataagtcaatataggtttacggtttcagacttgatgagaatggaaaagattgtattggagaaggtgtgttggaaagtcaaagctactactgcctttcaatttctgcaactgtattattcactccttcaagagaacttgccacttgaaaggagaaatagcattaattttgaaagactagaagctcaactgaaggcatgtcattgcaggatcatattttctaaagcaaagccttctgtgttggcattgtctatcattgcattagagatccaagcacagaagtgtgtagagttaacagaaggaatagaatgtcttcagaaacattccaagataaatggcagagatctgaccttctggcaagagcttgtatccaaatgtttaactgaatattcatcaaataagtgttccaaaccaaatgttcagaagttgaaatggattgtttctgggcgtactgcacggcaattgaagcatagctactacagaataactcaccttccaacaattcctgaaatggtcccttaactggattattacagcaccaaaaaacttctctgaagcctttctccacaaccttgttctatggattccataatgttacaatggatttaagctatgaagcctcaaaacatcacgagataagcatgatggtctcagacttgggaaaactgcctaatattatgctgtagtggaattatgtttagatttgaattcatctgtgaagcattcaaatcaaagctaaaagcctaaatgtgaaatgctaatgacaagcctgagaaggtaaactgtgaatcttcatttctatcattgatctaactttagatattggatcaatatatttaggtggtattgaaaatgctattggaggagtcacactaatactatcaactatcagtcttcccacagcttcaatcactgtcattattctaatcctactcctacttaaattttaagttatgaggtttatgtcaaaagcaacatttcacaaatgtacttttaaggcataataagggttaacattctaggcagtataaacacaccccataatgcaagtaataggtaatctagagatgtggactttattgctatatgggaattacatttaaatttgagggcattttatataaagaaaaatacagacctataaagtttggcatattcattaagttatcttttaatatttttttctagaaaacaggtgacatttgtatctacgataaaaatttttatacagaacctactgcctcaaactgaatcccatcaagaaaactagtttctattgtattagtaactcaaaataaattatcacttcgaaaacttgctttcccacactaaggtaagttcagactagattgaacactccagaattttttactacagactgtttttaagttagaagtgatggcaattttataaatagagaatatacttccactgatgcccttactgtgccaaaacaaaaatcttaagaaaagcaagtagacaccttcataactatgaatgaagctgctgaagtagtgtttaggatcctccatggcagttagtgaatgtaagaagtacagtgttaaagtgttgtaaacagttactcagtgcaatgtatagcctgagtctatccatgatggctatatccaatttgacatcacgttatggatcagtacacaatgaaaaaccaaagaaccacagtatatcttattcttaacttttgtaaaccatgttttatgggtaactttttagttttcccaaaaggctgataaatttcaatattttgaatacatcattgttaattttgagttggcagaggtaaactaaccaactaccattatgttttagtactaagggatatacctttcaataaagttaatgaaattc

SEQ ID NO: 123534 - DNA, 418 bp, Homo sapiens
  Payload ID: 4251
  Gene Symbol: CCNG1
  Gene Name: cyclin G1
  ENST ID: ENST00000511490
  CDS Start-End: 75-418
gagctgaccctgatcagggccgagttgtctcggcggcgctgccgaggcctccacccaggacagtctctgtcaagatgatagaggtactgacaacaactgactctcagaaactgctacaccagctgaatgccctgttggaacaggagtctagatgtcagccaaaggtctgtggtttgagactaattgagtctgcacacgataatggcctcagaatgactgcaagactaagggactttgaagtaaaagatcttcttagtctaactcagttctttggctttgacacagagacattttctctagctgtgaatttactggacagattcctgtctaaaatgaaggtacagcccaagcaccttgggtgtgttggactgagctgcttttatttggctgtaaaatcaatagaagaggaaaggaatgt

SEQ ID NO: 123535 - DNA, 994 bp, Homo sapiens
  Payload ID: 4251
  Gene Symbol: CCNG1
  Gene Name: cyclin G1
  ENST ID: ENST00000510664
  CDS Start-End: 269-772
ccctgatcagggccgagttgtctcggcggcgctgccgaggcctccacccaggacagtccccctccccgggcctctctcctcttgcctacgagtcccctctcctcgtaggcctctcggatctgatatcgtggggtgaggtgagcaggcccggggagggtggttaccgctgaggagctgcagtctctgtcaagatgatagaggtactgacaacaactgactctcagaaactgctacaccagctgaatgccctgttggaacaggagtctagatgtcagccaaagacttgatgagaatggaaaagattgtattggagaaggtgtgttggaaagtcaaagctactactgcctttcaatttctgcaactgtattattcactccttcaagagaacttgccacttgaaaggagaaatagcattaattttgaaagactagaagctcaactgaaggcatgtcattgcaggatcatattttctaaagcaaagccttctgtgttggcattgtctatcattgcattagagatccaagcacagaagtgtgtagagttaacagaaggaatagaatgtcttcagaaacattccaagataaatggcagagatctgaccttctggcaagagcttgtatccaaatgtttaactgaatattcatcaaataagtgttccaaaccaaatgttcagaagttgaaatggattgtttctgggcgtactgcacggcaattgaagcatagctactacagaataactcaccttccaacaattcctgaaatggtcccttaactggattattacagcaccaaaaaacttctctgaagcctttctccacaaccttgttctatggattccataatgttacaatggatttaagctatgaagcctcaaaacatcacgagataagcatgatggtctcagacttgggaaaactgcctaatattatgctgtagtggaattatgtttagatttgaattcatctgtgaagcattcaaatcaaagctaaaagcc

SEQ ID NO: 123536 - DNA, 564 bp, Homo sapiens
  Payload ID: 4251
  Gene Symbol: CCNG1
  Gene Name: cyclin G1
  ENST ID: ENST00000510097
  CDS Start-End: 157-564
cccttcggctccgagctgaccctgatcagggccgagttgtctcggcggcgctgccgaggcctccacccaggacagtccccctccccgggcctctctcctcttgcctacgagtcccctctcctcgtaggcctctcggatctgatatcgtggggtgagatgatagaggtactgacaacaactgactctcagaaactgctacaccagctgaatgccctgttggaacaggagtctagatgtcagccaaaggtctgtggtttgagactaattgagtctgcacacgataatggcctcagaatgactgcaagactaagggactttgaagtaaaagatcttcttagtctaactcagttctttggctttgacacagagacattttctctagctgtgaatttactggacagattcctgtctaaaatgaaggtacagcccaagcaccttgggtgtgttggactgagctgcttttatttggctgtaaaatcaatagaagaggaaaggaatgtcccattggcaactgacttgatccgaataagtcaatataggtttacggtttcagacttgatgaga

SEQ ID NO: 123537 - DNA, 919 bp, Homo sapiens
  Payload ID: 4251
  Gene Symbol: CCNG1
  Gene Name: cyclin G1
  Uniprot ID: P51959
  ENST ID: ENST00000512163
  CDS Start-End: 375-860
atattcctcgttagggcaggcgcggccccttcggctccgagctgaccctgatcagggccgagttgtctcggcggcgctgccgaggcctccacccaggacagtccccctccccgggcctctctcctcttgcctacgagtcccctctcctcgtaggcctctcggatctgatatcgtggggtgaggtgagcaggcccggggagggtggttaccgctgaggagctgcagtctctgtcaaggtacagcccaagcaccttgggtgtgttggactgagctgcttttatttggctgtaaaatcaatagaagaggaaaggaatgtcccattggcaactgacttgatccgaataagtcaatataggtttacggtttcagacttgatgagaatggaaaagattgtattggagaaggtgtgttggaaagtcaaagctactactgcctttcaatttctgcaactgtattattcactccttcaagagaacttgccacttgaaaggagaaatagcattaattttgaaagactagaagctcaactgaaggcatgtcattgcaggatcatattttctaaagcaaagccttctgtgttggcattgtctatcattgcattagagatccaagcacagaagtgtgtagagttaacagaaggaatagaatgtcttcagaaacattccaagataaatggcagagatctgaccttctggcaagagcttgtatccaaatgtttaactgaatattcatcaaataagtgttccaaaccaaatgttcagaagttgaaatggattgtttctgggcgtactgcacggcaattgaagcatagctactacagaataactcaccttccaacaattcctgaaatggtcccttaactggattattacagcaccaaaaaacttctctgaagcctttctccacaaccttgttctat

SEQ ID NO: 123538 - DNA, 732 bp, Homo sapiens
  Payload ID: 4251
  Gene Symbol: CCNG1
  Gene Name: cyclin G1
  ENST ID: ENST00000504553
  CDS Start-End: 39-362
tccgaataagtcaatataggtttacggtttcagacttgatgagaatggaaaagattgtattggagaaggtgtgttggaaagtcaaagctactactgcctttcaatttctgcaactgtattattcactccttcaagagaacttgccacttgaaaggagaaatagcattaattttgaaagactagaagctcaactgaaggcatgtcattgcaggatcatattttctaaagcaaagccttctgtgttggcattgtctatcattgcattagagatccaagcacagaagtgtgtagagttaacagaaggaatagaatgtcttcagaaacattccaaggattattacagcaccaaaaaacttctctgaagcctttctccacaaccttgttctatggattccataatgttacaatggatttaagctatgaagcctcaaaacatcacgagataagcatgatggtctcagacttgggaaaactgcctaatattatgctgtagtggaattatgtttagatttgaattcatctgtgaagcattcaaatcaaagctaaaagcctaaatgtgaaatgctaatgacaagcctgagaaggtaaactgtgaatcttcatttctatcattgatctaactttagatattggatcaatatatttaggtggtattgaaaatgctattggaggagtcacactaatactatcaactatcagtcttcccacagcttcaatcactgtcattattct

SEQ ID NO: 123539 - DNA, 5526 bp, Homo sapiens
  Payload ID: 4252
  Gene Symbol: CCNG2
  Gene Name: cyclin G2
  Uniprot ID: Q16589
  ENST ID: ENST00000316355
  CDS Start-End: 357-1391
aagtgcaggatccctccgcggggagtcacgtgccccgcccccttgggggcgtcgaaactcttaacaaaaacaaggggctcggggaggtttccgctgaggcggcgggggtgcggcggtgggctggtcttccgcggccggcgttgcgccgcggcggagggtgggcgcgcggggagcgggatggagccggggctgtgaggccgaggcggcggtgcctgggaggaagggtcggatgccggaccgggggcaccgctgaggcggtgggtccccgacctgcgagacaggtttggaagcccccgctgcgcccagtccgtgcggaccgcgaggccgcgggcgggtggaggcgcgtctccggcacgatgaaggatttgggggcagagcacttggcaggtcatgaaggggtccaacttctcgggttgttgaacgtctacctggaacaagaagagagattccaacctcgagaaaaagggctgagtttgattgaggctaccccggagaatgataacactttgtgtccaggattgagaaatgccaaagttgaagatttaaggagtttagccaacttttttggatcttgcactgaaacttttgtcctggctgtcaatattttggacaggttcttggctcttatgaaggtgaaacctaaacatttgtcttgcattggagtctgttcttttttgctggctgctagaatagttgaagaagactgcaatattccatccactcatgatgtgatccggattagtcagtgtaaatgtactgcttctgacataaaacggatggaaaaaataatttcagaaaaattgcactatgaattggaagctactactgccttaaactttttgcacttataccatactattatactttgtcatacttcagaaaggaaagaaatactgagccttgataaactagaagctcagctgaaagcttgcaactgccgactcatcttttcaaaagcaaaaccatctgtattagccttgtgccttctcaatttggaagtggaaactttgaaatctgttgaattactggaaattctcttgctagttaaaaaacattccaagattaatgacactgagttcttctactggagagagttggtttctaaatgcctagccgagtattcttctcctgaatgttgcaaaccagatcttaagaagttggtttggatcgtttcaaggcgcacagcccagaacctccacaacagctactatagtgttcctgagctgccaacgatacctgaggggggttgttttgatgaaagtgaaagtgaggactcttgtgaagatatgagttgtggagaggagagtctcagcagctctcctcccagtgatcaagagtgcaccttctttttcaacttcaaagtggcacaaacactgtgctttccatcttagaaatctgattgttctgtcagaatttatatttacaggtttcaaagcaataaatgggggaataggtagtttcctggtttagcccccatctagtcaggaattaatatactggaatacctaccttctatttgttattcagatcagatctggcctattttcatatttatcctaagccatcaaatggggtagtgcctcttaaaccattaacagtactttagacattggcactttatttttctcgtagatctttagctactttggggaggagggaaggtgctgataccttcaatttgttacttttcaagatttttaaaaataactagtgtagcttatcttaaacattttataaaaccttcagatgtctttaagcagattggaagtatgcaagtgcttccttagcagggacagtggataatccttaatggtttatcatagatttcaccctccccccttctcagaagagtgagtatgctcttaaatgtcaaacacatttttgttgttttgttttttaaatgatcagtgtctatttgatgtgatgcagatcttataaatttgggaattataatattgacatttctgtgatttttatatatgtaatgtcttaattgagatttctgttaaggcagaaataattaggctagggctcttagttttcattcctattgcccaagtattgtcaaactatggtattattttaatgttactttaaaaatccataatctgctagttttgcatgtacttatatgaaaacagtgcagtaagttgaaaactcagtatctatggaattgataaatgttgatctggtgtagtatattttatcgcattttcttatattaaaaaatgtctgcatgattacattttatttcctttgtaatttacatttcagaatagtgtattgctatatgggtgccaagattgaatatgaagaacccgagtgtttgtagtattatagttttaagcaaatctgtgtggtgatacagccataagaatggggcttatataaactctgtacatgtaagattttgtacagagaatttttaactttataaattgtatatgaacatgtaaatcttttaaaatgtacataaaatactgtatttttttaccttgtgtgtgatagtctagtcattgcatgtaaatataatttattatgtattctgtagtataaatcatacattgatgacttacatttttactggtaagtcaacatccgttggatgttttctgaagtggctctttttgaagtgataatagattgtaattcaaaataaaattattaatgaattctccttgtttgggatcacatcttaatttttaatctgttaaaagttcttgatgtattttaatgagaagactttaggtgaggctacagtgattccagagtgagccttctaactggctagcagaagttctctaggtttggcatctgtgccttggagatactgaaagagaatctgtcatttgacaattgacctctttgtgggatggactcattaagtatgctctcagagactggtatattaccagaatgcctattaattttcagtgagaggcaacaggtattaagtagaacagaatgctcaggttggcagattagaacgatctttcaggagacaaagcaagttttaatcagttgtttggttaataagtatggggtgttcgctgtgatagggccccgccagcttctggctcttgtggacctcaaaagtatcaggtggttttgcaagtggtggtcctttcccctgccccaccccaataggttccccatctgtctagtttgatttttgtagacctttgttttctctagttagaaaatcaggtacactgaatatggttttcatgtaacacctcttctctggagataggggtatgttttcctacccttctagtggagaatcctacttgaggatgacctttcctctcttactaaataatattagtaaatagtgggcaatatattctgctttcagattttgatttgttgagatgtaaaagttgtttggggcttaccaaatctcaagactctctttagctcctgcaggattgtattgcttttcttactggatatttttcctgggtaagcatctttgtggcttcatctcttccccctgtggttttcagtgtatttagtcgagacctctctgctgagcttgcaacctgtttattcacatggcctgccatgccacttggaggtttctgattactcccaaacctgctggttctttatgtctttctcagcgaataattccatctattcatgttggaaacttaggtgatatgctcatctccttttgcctgtttatggaggtcaccagcctctatcatttgtatgatttcgtttacactgtttatatctctctgtcccccctttttctgccattggcatggtttagacctgtactctttatcagcagaggtactgtaatatatttgtgatccctcagcttccaggcttactcctggtctctgccttcctatctacatatccttttaaaataaaattttaactatctcctgaaaaattgttgagtaggtcacgcacaatcaggagaaaaatctattcatgacatacaagtctctgtctaatctgaacactgcacctgtctctggcctttttttcttgtcatttcctagaccttaaaaaatgtgtattgagaaagaactctgttagctatacagaagatgaactgggcaatatagagtagcagcatggagaccagtctgactgaactaaggcagtggaagtgtggatgaggaagagaggtgaaaattgagaagcgctatcctttctctttgggcattattaggaggctcacagacaagtccaggagcctggttataccctcctgtgccattcaaccaggtggctttcccatgactgtgatgaataaaattgagaagcccctgcccttttcagagcagagggtgaggagaaagctaccattttgtcctcatccttacccccgttgacttggcgagagatttgacctttcaggttttgatcctgtcattttctaggatgtggtgcacgcactttgctgttgcgcatggtgaagtattgtgcctaggtcctgggtcttcatctgtttggctctgctactgtttcctcctcccaggaagtgtggttagacaaataatgtgttttaattacctgtcacactcaggattaatacatactcaggttaactgtagagaggcattggcttcagaacactcctcgtgacaattttaaccattttctttgtctagagtctgcctttttcttttttacaatttcttttatttcaacactaggtttcaatatggtgttcctgctacctcccacctccctcctccctcatcacacatgcaaattgtcagcttattgagacaacccacttagattcatatatggacaaggacaaggtattttgcatttgttactggaattcagttttcctaactatttactaccagaaatggtcaataacttactttgtgtttagcaaatcaaattgtgtgatagatagtttcccagtatgatggccagtcagtctttccatccctgtgcctacatgctgctcttcccgtccacaagtggagtctgtttctcttgagttttggctggccttatgaatggctttgcttactgaagtgcagcagaagaaatttagtatatgtccaagcctaggctttaagagactggcagctttccttttatcctttttggaagctagccaccatgctgcaaagaagctcagctggattactgaaagatgagaggccatgtggagagagactcttgaggatgagagattatcttggatgttccagccttaagctcccagctgaatgtgggtgtatcctcagctacaccacagaaaacagaggaactactcagtcgatcccaatcaacccacagactcactagaaataacaaattattgttttaagccacgaggttttgggggagggttgttaaacagtaatagataagtgagacagattgcttgttatttatggtcaaatggtgattatctctggtgagattacaggtgatgttttttttaagttatgcctatctgtagtttcctttttttcctaaaattgatttgaattattagtgtattaacagaataaagaatgaactttaaaacac

SEQ ID NO: 123540 - DNA, 1335 bp, Homo sapiens
  Payload ID: 4252
  Gene Symbol: CCNG2
  Gene Name: cyclin G2
  ENST ID: ENST00000354403
  CDS Start-End: 304-1335
gaaactcttaacaaaaacaaggggctcggggaggtttccgctgaggcggcgggggtgcggcggtgggctggtcttccgcggccggcgttgcgccgcggcggagggtgggcgcgcggggagcgggatggagccggggctgtgaggccgaggcggcggtgcctgggaggaagggtcggatgccggaccgggggcaccgctgaggcggtgggtccccgacctgcgagacaggtttggaagcccccgctgcgcccagtccgtgcggaccgcgaggccgcgggcgggtggaggcgcgtctccggcacgatgaaggatttgggggcagagcacttggcaggtcatgaaggggtccaacttctcgggttgttgaacgtctacctggaacaagaagagagattccaacctcgagaaaaagggctgagtttgattgaggctaccccggagaatgataacactttgtgtccaggattgagaaatgccaaagttgaagatttaaggagtttagccaacttttttggatcttgcactgaaacttttgtcctggctgtcaatattttggacaggttcttggctcttatgaaggtgaaacctaaacatttgtcttgcattggagtctgttcttttttgctggctgctagaatagttgaagaagactgcaatattccatccactcatgatgtgatccggattagtcagtgtaaatgtactgcttctgacataaaacggatggaaaaaataatttcagaaaaattgcactatgaattggaagctactactgccttaaactttttgcacttataccatactattatactttgtcatacttcagaaaggaaagaaatactgagccttgataaactagaagctcagctgaaagcttgcaactgccgactcatcttttcaaaagcaaaaccatctgtattagccttgtgccttctcaatttggaagtggaaactttgaaatctgttgaattactggaaattctcttgctagttaaaaaacattccaagattaatgacactgagttcttctactggagagagttggtttctaaatgcctagccgagtattcttctcctgaatgttgcaaaccagatcttaagaagttggtttggatcgtttcaaggcgcacagcccagaacctccacaacagctactatagtgttcctgagctgccaacgatacctgaggggggttgttttgatgaaagtgaaagctctgttgcccaggctggagtgcagtggcccgatctcagctcattccaacctccacctaccaggttcaagcgattctcatgcctcagcctccggagtagctgggattacaggtgctggtct

SEQ ID NO: 123541 - DNA, 1410 bp, Homo sapiens
  Payload ID: 4252
  Gene Symbol: CCNG2
  Gene Name: cyclin G2
  Uniprot ID: Q16589
  ENST ID: ENST00000395640
  CDS Start-End: 237-1271
ggtcttacccagcgctggccggcggacctgaccacggctcctccccctgccacacctccctggccgtggtggggattgccctggggctctggcggacgtgactggtcccttcacccgctccttgtcggggtgtgctggggcgacccttgctggaggtactggcctcagccctttctcccgcttccccacccctcttacccccagattacattctctgtgtggtgtctttactgcagatgaaggatttgggggcagagcacttggcaggtcatgaaggggtccaacttctcgggttgttgaacgtctacctggaacaagaagagagattccaacctcgagaaaaagggctgagtttgattgaggctaccccggagaatgataacactttgtgtccaggattgagaaatgccaaagttgaagatttaaggagtttagccaacttttttggatcttgcactgaaacttttgtcctggctgtcaatattttggacaggttcttggctcttatgaaggtgaaacctaaacatttgtcttgcattggagtctgttcttttttgctggctgctagaatagttgaagaagactgcaatattccatccactcatgatgtgatccggattagtcagtgtaaatgtactgcttctgacataaaacggatggaaaaaataatttcagaaaaattgcactatgaattggaagctactactgccttaaactttttgcacttataccatactattatactttgtcatacttcagaaaggaaagaaatactgagccttgataaactagaagctcagctgaaagcttgcaactgccgactcatcttttcaaaagcaaaaccatctgtattagccttgtgccttctcaatttggaagtggaaactttgaaatctgttgaattactggaaattctcttgctagttaaaaaacattccaagattaatgacactgagttcttctactggagagagttggtttctaaatgcctagccgagtattcttctcctgaatgttgcaaaccagatcttaagaagttggtttggatcgtttcaaggcgcacagcccagaacctccacaacagctactatagtgttcctgagctgccaacgatacctgaggggggttgttttgatgaaagtgaaagtgaggactcttgtgaagatatgagttgtggagaggagagtctcagcagctctcctcccagtgatcaagagtgcaccttctttttcaacttcaaagtggcacaaacactgtgctttccatcttagaaatctgattgttctgtcagaatttatatttacaggtttcaaagcaataaatgggggaataggtagtttcctggtttagcccccatctagtcaggaattaatatactggaatacctaccttctatttgttattcagatc

SEQ ID NO: 123542 - DNA, 1459 bp, Homo sapiens
  Payload ID: 4252
  Gene Symbol: CCNG2
  Gene Name: cyclin G2
  Uniprot ID: Q16589
  ENST ID: ENST00000502280
  CDS Start-End: 165-1199
cttaacaaaaacaaggggctcggggaggaagggtcggatgccggaccgggggcaccgctgaggcggtgggtccccgacctgcgagacaggtttggaagcccccgctgcgcccagtccgtgcggaccgcgaggccgcgggcgggtggaggcgcgtctccggcacgatgaaggatttgggggcagagcacttggcaggtcatgaaggggtccaacttctcgggttgttgaacgtctacctggaacaagaagagagattccaacctcgagaaaaagggctgagtttgattgaggctaccccggagaatgataacactttgtgtccaggattgagaaatgccaaagttgaagatttaaggagtttagccaacttttttggatcttgcactgaaacttttgtcctggctgtcaatattttggacaggttcttggctcttatgaaggtgaaacctaaacatttgtcttgcattggagtctgttcttttttgctggctgctagaatagttgaagaagactgcaatattccatccactcatgatgtgatccggattagtcagtgtaaatgtactgcttctgacataaaacggatggaaaaaataatttcagaaaaattgcactatgaattggaagctactactgccttaaactttttgcacttataccatactattatactttgtcatacttcagaaaggaaagaaatactgagccttgataaactagaagctcagctgaaagcttgcaactgccgactcatcttttcaaaagcaaaaccatctgtattagccttgtgccttctcaatttggaagtggaaactttgaaatctgttgaattactggaaattctcttgctagttaaaaaacattccaagattaatgacactgagttcttctactggagagagttggtttctaaatgcctagccgagtattcttctcctgaatgttgcaaaccagatcttaagaagttggtttggatcgtttcaaggcgcacagcccagaacctccacaacagctactatagtgttcctgagctgccaacgatacctgaggggggttgttttgatgaaagtgaaagtgaggactcttgtgaagatatgagttgtggagaggagagtctcagcagctctcctcccagtgatcaagagtgcaccttctttttcaacttcaaagtggcacaaacactgtgctttccatcttagaaatctgattgttctgtcagaatttatatttacaggtttcaaagcaataaatgggggaataggtagtttcctggtttagcccccatctagtcaggaattaatatactggaatacctaccttctatttgttattcagatcagatctggcctattttcatatttatcctaagccatcaaatggggtagtgcctcttaaaccattaacagtactttagacattggcactttatttttctcgtagatctttagctactttgggg

SEQ ID NO: 123543 - DNA, 578 bp, Homo sapiens
  Payload ID: 4252
  Gene Symbol: CCNG2
  Gene Name: cyclin G2
  ENST ID: ENST00000512918
  CDS Start-End: 97-578
ctggccgtggtggggattgccctggggctctggcggacgtgactggtcccttcacccgctccttgtcggggtgtgctggggcgacccttgctggagatgaaggatttgggggcagagcacttggcaggtcatgaaggggtccaacttctcgggttgttgaacgtctacctggaacaagaagagagattccaacctcgagaaaaagggctgagtttgattgaggctaccccggagaatgataacactttgtgtccaggattgagaaatgccaaagttgaagatttaaggagtttagccaacttttttggatcttgcactgaaacttttgtcctggctgtcaatattttggacaggttcttggctcttatgaaggtgaaacctaaacatttgtcttgcattggagtctgttcttttttgctggctgctagaatagttgaagaagactgcaatattccatccactcatgatgtgatccggattagtcagtgtaaatgtactgcttctgacataaaacggatggaaaaaataatttcagaaaaattgcactatgaattggaagctactactgccttaaactt

SEQ ID NO: 123544 - DNA, 1549 bp, Homo sapiens
  Payload ID: 4252
  Gene Symbol: CCNG2
  Gene Name: cyclin G2
  Uniprot ID: Q16589
  ENST ID: ENST00000509972
  CDS Start-End: 108-1022
gtgtgctggggcgacccttgctggaggtactggcctcagccctttctcccgcttccccacccctcttacccccagattacattctctgtgtggtgtctttactgcagatgaaggatttgggggcagagcacttggcaggtcatgaaggggtccaacttctcgggttgttgaacgtctacctggaacaagaagagagattccaacctcgagaaaaagggctgagtttgattgaggctaccccggagaatgataacactttgtgtccaggattgagaaatgccaaagttgaagatttaaggagtttagccaacttttttggatcttgcactgaaacttttgtcctggctgtcaatattttggacaggttcttggctcttatgaaggtgaaacctaaacatttgtcttgcattggagtctgttcttttttgctggctgctagaatagttgaagaagactgcaatattccatccactcatgatgtgatccggattagtcagtgtaaatgtactgcttctgacataaaacggatggaaaaaataatttcagaaaaattgcactatgaattggaagctactactgccttaaactttttgcacttataccatactattatactttgtcatacttcagaaaggaaagaaatactgagccttgataaactagaagctcagctgaaagcttgcaactgccgactcatcttttcaaaagcaaaaccatctgtattagccttgtgccttctcaatttggaagtggaaactttgaaatctgttgaattactggaaattctcttgctagttaaaaaacattccaagattaatgacactgagttcttctactggagagagttggtttctaaatgcctagccgagtattcttctcctgaatgttgcaaaccagatcttaagaagttggtttggatcgtttcaaggcgcacagcccagaacctccacaacagctactatagtgttcctgagctgccaacgatacctgaggggggttgttttgatgaaagtgaaaggtaggcaggttccttgactaattaaacttccctagactaaatattactgagtttattatactcagaactggaatagtgtaagacatcagagaaagcaagcacctacactaagagctaagaattaaagcccccactcttcaggtaagcaaattaaccagaagtagtattttaatatgtaatgatttataaggtcctctccaatttttttagtttttttcttttttatatttttttgagtagagatagggtctcgcgatgttgcccagggctggtcttacatactcccaggctcaagtgatcctcctgcctcagcctccgaagtgctgagattacaggtgtgagccactgcactcggcctcttttccctttttaaagtggttgttttccatctttctcctatttcccttgctcttgaaatacagctaaaaaaccccaaaaaaacaaaactgaaaaagaattctgggctttgtaatgttagtatgaattcctaatattgtgctgtggtgaagagattgaggggtaggtgcctgg

SEQ ID NO: 123545 - DNA, 1378 bp, Homo sapiens
  Payload ID: 4253
  Gene Symbol: CCNH
  Gene Name: cyclin H
  Uniprot ID: P51946
  ENST ID: ENST00000256897
  CDS Start-End: 226-1197
gggcgccctaacgaacccgggatacggtctgttcctagtccgctccggaaatgcaactgcgtacgggctggccgcgtaatcgtgacgacagcgcgccagcgccggctagccggacgccctaggcttccgcgagatcttcggtgggggtacgggtgttttacgccaggacgctgatgcgtttgggttctcgtctgcagaccctctggacctggtcacgattccataatgtaccacaacagtagtcagaagcggcactggaccttctccagcgaggagcagctggcaagactgcgggctgacgccaaccgcaaattcagatgcaaagccgtggccaacgggaaggttcttccgaatgatccagtctttcttgagcctcatgaagaaatgacactctgcaaatactatgagaaaaggttattggaattctgttcggtgtttaagccagcaatgccaagatctgttgtgggtacggcttgtatgtatttcaaacgtttttatcttaataactcagtaatggaatatcaccccaggataataatgctcacttgtgcatttttggcctgcaaagtagatgaattcaatgtatctagtcctcagtttgttggaaacctccgggagagtcctcttggacaggagaaggcacttgaacagatactggaatatgaactacttcttatacagcaacttaatttccaccttattgtccacaatccttacagaccatttgagggcttcctcatcgacttaaagacccgctatcccatattggagaatccagagattttgaggaaaacagctgatgactttcttaatagaattgcattgacggatgcttaccttttatacacaccttcccaaattgccctgactgccattttatctagtgcctccagggctggaattactatggaaagttatttatcagagagtctgatgctgaaagagaacagaacttgcctgtcacagttactagatataatgaaaagcatgagaaacttagtaaagaagtatgaaccacccagatctgaagaagttgctgttctgaaacagaagttggagcgatgtcattctgctgagcttgcacttaacgtaatcacgaagaagaggaaaggctatgaagatgatgattacgtctcaaagaaatccaaacatgaggaggaagaatggactgatgacgacctggtagaatctctctaaccatttgaagttgatttctcaatgctaactaatcaagagaagtaggaagcatatcaaacgtttaactttatttaaaaagtataatgtgaaaacataaaatatattaaaacttttctattgttttctttccctttcacagtaactttatgtaaaataaaccatcttcaaaagagctagaata

SEQ ID NO: 123546 - DNA, 1497 bp, Homo sapiens
  Payload ID: 4253
  Gene Symbol: CCNH
  Gene Name: cyclin H
  ENST ID: ENST00000504878
  CDS Start-End: 576-1325
gccctaggcttccgcgagatcttcggtgggggtacgggtgttttacgccaggacgctgatgcgtttgggttctcgtctgcagaccctctggacctggtcacgattccataatgtaccacaacagtagtcagaagcggcactggaccttctccagcgaggagcagctggcaagactgcgggctgacgccaaccgcaaattcagatgcaaagccgtggccaacgggaaggtgaggttttcccaacggttgcccagttgcccggtcactaaattctgagcagctgcgggagctcttctggctcccaggacaatctcgctccgtcgtttctctgcctctgcggcgcggagtgcgtttttctatcaaaataagcgagcaccttgccaggttccgtgggtacaaagacgaacaacgccatccccgtcgtcgaatggcagacaagtaaccagtctttgtaacgtagtgaagaagagagttcttccgaatgatccagtctttcttgagcctcatgaagaaatgacactctgcaaatactatgagaaaaggttattggaattctgttcggtgtttaagccagcaatgccaagatctgttgtgggtacggcttgtatgtatttcaaacgtttttatcttaataactcagtaatggaatatcaccccaggataataatgctcacttgtgcatttttggcctgcaaagtagatgaattcaatgtatctagtcctcagtttgttggaaacctccgggagagtcctcttggacaggagaaggcacttgaacagatactggaatatgaactacttcttatacagcaacttaatttccaccttattgtccacaatccttacagaccatttgagggcttcctcatcgacttaaagacccgctatcccatattggagaatccagagattttgaggaaaacagctgatgactttcttaatagaattgcattgacggatgcttaccttttatacacaccttcccaaattgccctgactgccattttatctagtgcctccagggctggaattactatggaaagttatttatcagagagtctgatgctgaaagagaacagaacttgcctgtcacagttactagatataatgaaaagcatgagaaacttagtaaagaagtatgaaccacccagatctgaagaagttgctgttctgaaacagaagttggagcgatgtcattctgctgagcttgcacttaacgtaatcacgaagaagaggaaaggctatgaagatgatgattacgtctcaaagaaatccaaacatgaggaggaagaatggactgatgacgacctggtagaatctctctaaccatttgaagttgatttctcaatgctaactaatcaagagaagtaggaagcatatcaaacgtttaactttatttaaaaagtataatgtgaaaacataaaatatattaaaacttttctattgttttctttccctttcacagtaactttatgtaaaataaaccatcttcaaaaga

SEQ ID NO: 123547 - DNA, 2391 bp, Homo sapiens
  Payload ID: 4253
  Gene Symbol: CCNH
  Gene Name: cyclin H
  ENST ID: ENST00000508855
  CDS Start-End: 54-821
gcaaatactatgagaaaaggttattggaattctgttcggtgtttaagccagcaatgccaagatctgttgtgggtacggcttgtatgtatttcaaacgtttttatcttaataactcagtaatggaatatcaccccaggataataatgctcacttgtgcatttttggcctgcaaagtagatgaattcaatgtatctagtcctcagtttgttggaaacctccgggagagtcctcttggacaggagaaggcacttgaacagatactggaatatgaactacttcttatacagcaacttaatttccaccttattgtccacaatccttacagaccatttgagggcttcctcatcgacttaaagacccgctatcccatattggagaatccagagattttgaggaaaacagctgatgactttcttaatagaattgcattgacggatgcttaccttttatacacaccttcccaaattgccctgactgccattttatctagtgcctccagggctggaattactatggaaagttatttatcagagagtctgatgctgaaagagaacagaacttgcctgtcacagttactagatataatgaaaagcatgagaaacttagtaaagaagtatgaaccacccagatctgaagaagttgctgttctgaaacagaagttggagcgatgtcattctgctgagcttgcacttaacgtaatcacgaagaagaggaaaggctatgaagatgatgattacgtctcaaagaaatccaaacatgaggaggtatgttttactccaaagatgaactctaagttatttttgttatacattctggtgtgactatactgttaagatttattctccaagagtacaggcattatagagttgtgggttttttcattttttgcatacttccttacgtacagtactgttgtccattattaaagggatttttctctcttctgtctttatttaatgaagaatccttcctgtgttcatagaaagcagaagcaatatgtatacatactacatttttgctttttttcttattctccaaggatttttcccttacccccttttaaaaaaaattttctatctgtcaagtcaaataagtgaataatcagaggcaaaaggtcacagccataacctttattcctcactggaggagtctggtgagaccatgccaacattactaacagtgaactattacaaaatttcctggtttatcttttgtaatccacatgggtaaaaggaggagaacattttcttaaagggaggtaagaggtaaacaatactggttatgcttcagtgttatccttaccacactttttttccttcttaggaagaatggactgatgacgacctggtagaatctctctaaccatttgaagttgatttctcaatgctaactaatcaagagaagtaggaagcatatcaaacgtttaactttatttaaaaagtataatgtgaaaacataaaatatattaaaacttttctattgttttctttccctttcacagtaactttatgtaaaataaaccatcttcaaaagagctagaatagcacctgttttgaatattcttattccatcgtgactaatatcaaattaaagctgcaactcatttgcctaattttttaagcaaaatatgataggcaaacctatgctttttttaaaaaaggcaccacaaaaaacaaaacttagtagccagctttaaaagtgttaaggaatgtgttttgccctctagaaacctttataaatggctttttgaatgccatcctgatatatttagctatttgtccattactattaaactgcagaaggtatttcaactgttacatggtactgaaagccagtcgtctgggtaatgaatattatttttctttagttacccgaaaacatttccaaatgggtttttaaaaaaaaccagatatatgattttgaatagctgtctacatcaaactcttacgctagtatagataagtaggtagcagcaaattgtatattcagttgtggttgttttttaattttgttttgatgtaaggtcttgctatgttgcccaggctgtctcagactcctaggctctagtgatcctctgcctcagttttctgagtaattgggactacaggcacacatcaccacagccttataattaacctattagatcctataagtgaatccgtgtaagtagattataacagttactaggaattttgcagattaaatatgttagagaaatgtaattcaaattgaaatgagtcaatataaaaatatgaaagcacagactattacagcaaattacttacatatgaatcatggccagctgtatttcactatgtgaccttggtaagttattaaacctctaagtgccagtttcccacactgaaaatggggaagataaaaatgcctact

SEQ ID NO: 123548 - DNA, 2772 bp, Homo sapiens
  Payload ID: 4254
  Gene Symbol: CCNI
  Gene Name: cyclin I
  Uniprot ID: Q14094
  ENST ID: ENST00000237654
  CDS Start-End: 578-1711
cttcccctctcttcccctccctccccagccttccccgcgagcggacgcggcagcgcctctgtctcgctttttcttatttttcccccctttcccctttctttttttttttttcttttcttttctcccctccccccctttcaccatttcccctcggaggcgctttccccgggcaggggcagagccggtctcaccccccgcctctccccggcccccgccgccctatggcgagagggagccccctcccaacccgggctcgagcggcggcggcctcaggccgggggtcatcatggaactaattcgctgaccgacccagcggccgcagccgtgcgtcccgctcgagcgccagcgcccgcgcccgcgccccccgatccgcttcccctttctccctcctcagttggccgagtcgtcccgcgcgcaccgcctccgcgcgcctatgagaatgaggtggtaacgggcccccggatgaccccgcgtcaccactgtgaggcctacagctctgccggggaggaggaggaggaggaagaggaggagaaggtagctacagcaagctgggtagcaggcagatccaaaggatatcatgaagtttccagggcctttggaaaaccagagattgtctttcctgttggaaaaggcaatcactagggaagcacagatgtggaaagtgaatgtgcggaaaatgccttcaaatcagaatgtttctccatcccagagagatgaagtaattcaatggctggccaaactcaagtaccaattcaacctttacccagaaacatttgctctggctagcagtcttttggataggtttttagctaccgtaaaggctcatccaaaatacttgagttgtattgcaatcagctgttttttcctagctgccaagactgttgaggaagatgagagaattccagtactaaaggtattggcaagagacagtttctgtggatgttcctcatctgaaattttgagaatggagagaattattctggataagttgaattgggatcttcacacagccacaccattggattttcttcatattttccatgccattgcagtgtcaactaggcctcagttacttttcagtttgcccaaattgagcccatctcaacatttggcagtccttaccaagcaactacttcactgtatggcctgcaaccaacttctgcaattcagaggatccatgcttgctctggccatggttagtctggaaatggagaaactcattcctgattggctttctcttacaattgaactgcttcagaaagcacagatggatagctcccagttgatccattgtcgggagcttgtggcacatcacctttctactctgcagtcttccctgcctctgaattccgtttatgtctaccgtcccctcaagcacaccctggtgacctgtgacaaaggagtgttcagattacatccctcctctgtcccaggcccagacttctccaaggacaacagcaagccagaagtgccagtcagaggtacagcagccttttaccatcatctcccagctgccagtgggtgcaagcagacctctactaaacgcaaagtagaggaaatggaagtggatgacttctatgatggaatcaaacggctctataatgaagataatgtctcagaaaatgtgggttctgtgtgtggcactgatttatcaagacaagagggacatgcttccccttgtccacctttgcagcctgtttctgtcatgtagtttcaacaagtgctacctttgagtgtaaactaaggtagactactttgggaatgagaacatgcaaaatcaggaaaggctgtagaaggaaatataccttaacaggctgatttggagtgagccagaaaaaaaaaataaaactctcattatttgtgtggctaattataattcagcgttatttaagcacataaagaccaaaaaaaaaaaaaagaaatccaaaagatccaaactttttttaaacttaaaaaatctctttgtagtatgtcagttgcactttttttctgccataatgtaacgtagcttgccccgtcaaaaattcaattaaaattcatggccagcaatcctgttccccctcagcatcctgatttaattttcctgttgcttttgcttgcttctccatttaatagttactgaactttatgcatgttgatctatattgattttcactgcagttgaatgaacaaattatttcagtgtgacagccatgactcaagttccaattagtctgaaaagggtactttggaattgtcccatattaatcagagatggcaaaagaaaaagttctcatattaccaggttgattttgtgtctcatttcaaattttaatttaaaattatggttttcatttttgtttaccttaaagtgatgcttaaaagtggcatgtaattaggacacttaggtttgttgaaagcattttcgacatttgtataaaagaatttgtgataaatatatccaggtgctcaccaaagaaacatgtattaacaacttaaattagatttttctaactgatagttttcactcatttataatcagtaggagagactgtctagatgttggggcagctctatgatttaagtctgtaacatgttataactgaatttagtaccctagttttgttaagctattaggattttctaatagaacttactccccctgcctccccagccttatgtttcttttaatgacttctggatcctgagctccctttgcagtctgaaaaaggtattgcagtcagaactgtgtactgatgataaaagcctctggtagcaataaaaagttgtcct

SEQ ID NO: 123549 - DNA, 595 bp, Homo sapiens
  Payload ID: 4254
  Gene Symbol: CCNI
  Gene Name: cyclin I
  ENST ID: ENST00000507788
  CDS Start-End: 447-595
ctccctccccagccttccccgcgagcggacgcggcagcgcctctgtctcgctttttcttatttttcccccctttcccctttctttttttttttttcttttcttttctcccctccccccctttcaccatttcccctcggaggcgctttccccgggcaggggcagagccggtctcaccccccgcctctccccggcccccgccgccctatggcgagagggagccccctcccaacccgggctcgagcggcggcggcctcaggccgggggtcatcatggaactaattcgctgaccgacccagcggccgcagccgtgcgtcccgctcgagcgccagcgcccgcgcccgcgccccccgatccgcttcccctttctccctcctcagttggccgagtcgtcccgcgcgcaccgcctccgcgcgcctatgagaatgaggtggtaacgggcccccggatgaccccgcgtcaccactgtgaggcctacagctctgccggggaggaggaggaggaggaagaggaggagaagaatgtttctccatcccagagagatgaagtaattcaatggctggccaaactcaagtaccaattcaacctttacccaga

SEQ ID NO: 123550 - DNA, 576 bp, Homo sapiens
  Payload ID: 4254
  Gene Symbol: CCNI
  Gene Name: cyclin I
  ENST ID: ENST00000511943
  CDS Start-End: 266-436
gcggccgcagccgtgcgtcccgctcgagcgccagcgcccgcgcccgcgccccccgatccgcttcccctttctccctcctcagttggccgagtcgtcccgcgcgcaccgcctccgcgcgcctatgagaatgaggtggtaacgggcccccggatgaccccgcgtcaccactgtgaggcctacagctctgccggggaggaggaggaggaggaagaggaggagaaggtagctacagcaagctgggtagcaggcagatccaaaggatatcatgaagtttccagggcctttggaaaaccagagattgtctttcctgttggaaaaggcaatcactagggaagcacagatgtggaaagtgaatgtgcggaaaatgccttcaaatcagaattccagtactaaaggtattggcaagagacagtttctgtggatgttcctcatctgaaattttgagaatggagagaattattctggataagttgaattgggatcttcacacagccacaccattggattttcttcatattttccatgccattgcagtgtcaactaggcctcagttacttttcagtttgcccaaattga

SEQ ID NO: 123551 - DNA, 636 bp, Homo sapiens
  Payload ID: 4254
  Gene Symbol: CCNI
  Gene Name: cyclin I
  ENST ID: ENST00000515468
  CDS Start-End: 1-532
atctgaaattttgagaatggagagaattattctggataagttgaattgggatcttcacacagccacaccattggattttcttcatattatggatagctcccagttgatccattgtcgggagcttgtggcacatcacctttctactctgcagtcttccctgcctctgaattccgtttatgtctaccgtcccctcaagcacaccctggtgacctgtgacaaaggagtgttcagattacatccctcctctgtcccaggcccagacttctccaaggacaacagcaagccagaagtgccagtcagaggtacagcagccttttaccatcatctcccagctgccagtgggtgcaagcagacctctactaaacgcaaagtagaggaaatggaagtggatgacttctatgatggaatcaaacggctctataatgaagataatgtctcagaaaatgtgggttctgtgtgtggcactgatttatcaagacaagagggacatgcttccccttgtccacctttgcagcctgtttctgtcatgtagtttcaacaagtgctacctttgagtgtaaactaaggtagactactttgggaatgagaacatgcaaaatcaggaaaggctgtagaaggaaatataccttaacaggc

SEQ ID NO: 123552 - DNA, 517 bp, Homo sapiens
  Payload ID: 4254
  Gene Symbol: CCNI
  Gene Name: cyclin I
  ENST ID: ENST00000513774
  CDS Start-End: 278-517
gcatcccccagcccggggaacctcggggccgccctcttcgtcctctccggcccagacagacccgtcacctgcccacttgaaaacggcactactgtgttccttttcgggccagtttttctgtcagcgagtaacttttttttgtggcagcggcaaattagctactctatagtgcgtgttggaggctctacgagcccgtgttaatacacaaagaaggggacacacccccaccctcaggtagctacagcaagctgggtagcaggcagatccaaaggatatcatgaagtttccagggcctttggaaaaccagagattgtctttcctgttggaaaaggcaatcactagggaagcacagatgtggaaagtgaatgtgcggaaaatgccttcaaatcagaatgtttctccatcccagagagatgaagtaattcaatggctggccaaactcaagtaccaattcaacctttacccagaaacatttgctctggctagcagtcttttggataggtttttagctaccgta

SEQ ID NO: 123553 - DNA, 541 bp, Homo sapiens
  Payload ID: 4254
  Gene Symbol: CCNI
  Gene Name: cyclin I
  ENST ID: ENST00000505609
  CDS Start-End: 165-541
aaataactggaatttgaaaggaggacagaggagcctccgctggagctagggggctccgttacagatccttttggcagaagttgacaattgggtatcaaaacagtggaaggtgtttcgggaggtagctacagcaagctgggtagcaggcagatccaaaggatatcatgaagtttccagggcctttggaaaaccagagattgtctttcctgttggaaaaggcaatcactagggaagcacagatgtggaaagtgaatgtgcggaaaatgccttcaaatcagaatgtttctccatcccagagagatgaagtaattcaatggctggccaaactcaagtaccaattcaacctttacccagaaacatttgctctggctagcagtcttttggataggtttttagctaccgtaaaggctcatccaaaatacttgagttgtattgcaatcagctgttttttcctagctgccaagactgttgaggaagatgagagaattccagtactaaaggtattggcaagagacagtttctgtggatgttcctcatctga

SEQ ID NO: 123554 - DNA, 2355 bp, Homo sapiens
  Payload ID: 4255
  Gene Symbol: CCNI2
  Gene Name: cyclin I family, member 2
  Uniprot ID: Q6ZMN8
  ENST ID: ENST00000378731
  CDS Start-End: 52-1161
tataaaatgccgggttaagcggcaactcagactcaggatcccgctcacgacatggcctcgggcgctcagctcccgccgcagccgtcgagctcagaggtcagcgccgtccagagcccaggcgggcgtcccggcgccggtctggaggaaacagccctgggcgttcctctcccgccgtctccgggggaggcccctctgccccgaagcaaccggagcaggtgccctgggacccgccagcccggagcggcctccctccacgcggcgtccgcagcagtccccgtgcggccccggcgcggtacggcgccagccgggaaaaccgcagacgcggtccccgccgccgccccagagcaagctccgcggccggctccacagtcccgcaagccgcgcaacctggaaggcgacctggacgagcgccggctgctctgccacttgcagctggcccaggaccgcgaggcgcgcctgtggcggggcggcaaaccccaggatgaaatctgcgacgccttcgaggaagtcgtgctgtggctcctgcggcttcagaacaccttttacttctcccagtccacttttaacctggccctcaccatctttggccgcctcctgatttcagtgaaggtaaaagagaaatacctgcattgcgccacaattacttccttgaggctcgctgcaaaagttaatgaagaagaggagtttattccacaagtaaaagacttcacaaagcactatggctctgactattccccgaatgagctgctgaggatggagctggctattctggacagactgcactgggacctctatattgggacgccgctggacttcttgactatattccatgccctggtggtcctgagctggccccatgtgttggagctgctgcctcagaggaatccttccctccacgtcgcatccctgaccaggcagctgcagcactgtatggcgggccaccagctgctgcagttcaagggctccacactggccttggtcatcatcaccttagagctggagaggctcatgcccggctggtgtgctcctatatctgatctgctaaagaaagcacaggttggtgatatgcagtacagctgctgcaaggaacttgtaatgcagcaactgagaagtcttcagtcatcctcctgcacagacaactttgtgtcacctgccaactagcccctctgcctccaccccggggctttcagagcatagtgtgaaacctccttgcttggactaccatgagttctttggcttgttatgaatcctgtaaaaagggaaggtggctctggaagagcaactgagaaaaagttcccaactgagcccttggaaaaaaaataaaggggagaggggaaaggcaggctgaggtcagtagaggtcagggtggtctgatagactatgaccctgtcttccctttttctcctctgggcctgaagccagggagtatgaatgaatgttcaaatggcagcttgttttaccttccttctccagcaagggttggcattggcccctgggagcgctggaatatgaaaccaagaggcaggcctggctcagggctgaagggctggggctagctctgaccagttcttgctgctctacctgccagagctggccaggtccttccaacttcccaggcttatcccaaacacatatgtggtgcttccagtcccaactaccctgcctgccactcctcacatgggacagtctctgcagatgcatttacccaaccatggctatgacttatgtcttccctttacaaggactggattataaagtatgctttgtttaatgtaacttgagcaagctttaggcatatctttcctttgttactcttaagcaaagtggtttcagttattagtttaactagagggattttgtgctaatgaatgggtattataggctaacacctgtgatgggaggcacagctctgaatgctttctgttgggatgagcaggttctgaggccaagcctgctccaaccacagtgctgccaggaggaggagccggctgcctctctcatgctgtgctaccacagagccattctctaagcaggggagtgcagctgacaaagatgccagctggggctgtgtaagttgtgttgggggcatgaatgactgagccacacattcagaggtggtttgtgaagtcttccactgtgaactatggttttttttttttttttttttttttggtgtgtttgtgtaaatgtgctaagccatggggtgggaggggaaagatttactaggtgcaaagtggtcaagggccagatatactataattgtctatattatagagttagtatacatctgtattttttcttgacacacttttgcttgttggtgctttcgttaaaattacactttaattgcttccg

SEQ ID NO: 123555 - DNA, 2642 bp, Homo sapiens
  Payload ID: 4255
  Gene Symbol: CCNI2
  Gene Name: cyclin I family, member 2
  Uniprot ID: Q6ZMN8
  ENST ID: ENST00000614847
  CDS Start-End: 52-1209
tataaaatgccgggttaagcggcaactcagactcaggatcccgctcacgacatggcctcgggcgctcagctcccgccgcagccgtcgagctcagaggtcagcgccgtccagagcccaggcgggcgtcccggcgccggtctggaggaaacagccctgggcgttcctctcccgccgtctccgggggaggcccctctgccccgaagcaaccggagcaggtgccctgggacccgccagcccggagcggcctccctccacgcggcgtccgcagcagtccccgtgcggccccggcgcggtacggcgccagccgggaaaaccgcagacgcggtccccgccgccgccccagagcaagctccgcggccggctccacagtcccgcaagccgcgcaacctggaaggcgacctggacgagcgccggctgctctgccacttgcagctggcccaggaccgcgaggcgcgcctgtggcggggcggcaaaccccaggatgaaatctgcgacgccttcgaggaagtcgtgctgtggctcctgcggcttcagaacaccttttacttctcccagtccacttttaacctggccctcaccatctttggccgcctcctgatttcagtgaaggtaaaagagaaatacctgcattgcgccacaattacttccttgaggctcgctgcaaaagttaatgaagaagaggagtttattccacaagtaaaagacttcacaaagcactatggctctgactattccccgaatgagctgctgaggatggagctggctattctggacagactgcactgggacctctatattgggacgccgctggacttcttgactatagaaaagtatggcgttttctgttctaacattaaaaaccatggtctccagttccatgccctggtggtcctgagctggccccatgtgttggagctgctgcctcagaggaatccttccctccacgtcgcatccctgaccaggcagctgcagcactgtatggcgggccaccagctgctgcagttcaagggctccacactggccttggtcatcatcaccttagagctggagaggctcatgcccggctggtgtgctcctatatctgatctgctaaagaaagcacaggttggtgatatgcagtacagctgctgcaaggaacttgtaatgcagcaactgagaagtcttcagtcatcctcctgcacagacaactttgtgtcacctgccaactagcccctctgcctccaccccggggctttcagagcatagtgtgaaacctccttgcttggactaccatgagttctttggcttgttatgaatcctgtaaaaagggaaggtggctctggaagagcaactgagaaaaagttcccaactgagcccttggaaaaaaaataaaggggagaggggaaaggcaggctgaggtcagtagaggtcagggtggtctgatagactatgaccctgtcttccctttttctcctctgggcctgaagccagggagtatgaatgaatgttcaaatggcagcttgttttaccttccttctccagcaagggttggcattggcccctgggagcgctggaatatgaaaccaagaggcaggcctggctcagggctgaagggctggggctagctctgaccagttcttgctgctctacctgccagagctggccaggtccttccaacttcccaggcttatcccaaacacatatgtggtgcttccagtcccaactaccctgcctgccactcctcacatgggacagtctctgcagatgcatttacccaaccatggctatgacttatgtcttccctttacaaggactggattataaagtatgctttgtttaatgtaacttgagcaagctttaggcatatctttcctttgttactcttaagcaaagtggtttcagttattagtttaactagagggattttgtgctaatgaatgggtattataggctaacacctgtgatgggaggcacagctctgaatgctttctgttgggatgagcaggttctgaggccaagcctgctccaaccacagtgctgccaggaggaggagccggctgcctctctcatgctgtgctaccacagagccattctctaagcaggggagtgcagctgacaaagatgccagctggggctgtgtaagttgtgttgggggcatgaatgactgagccacacattcagaggtggtttgtgaagtcttccactgtgaactatggttttttttttttttttttttttttggtgtgtttgtgtaaatgtgctaagccatggggtgggaggggaaagatttactaggtgcaaagtggtcaagggccagatatactataattgtctatattatagagttagtatacatctgtattttttcttgacacacttttgcttgttggtgctttcgttaaaattacactttaattgcttccgatcctgtatgagtcttattttgagctaccatgcatttagccttgcgagagtcagatacatttggaacactatctcctaggtcatatcaagaactctcctctagtccagaacccattttacagatggagatgctgaggccatgctgctcacagcttccagtggtggccgttgagtgccctctgcctccttccttccagtgtaagtgggaccacagtgcatgaggcagaaggacatcctga

SEQ ID NO: 123556 - DNA, 4115 bp, Homo sapiens
  Payload ID: 4256
  Gene Symbol: CCNJ
  Gene Name: cyclin J
  Uniprot ID: Q5T5M9
  ENST ID: ENST00000265992
  CDS Start-End: 368-1486
cgtgcgggatgctgaccgtacccaggcgggagccgccgcgccgccgcctggcgctgcacctgggcccggcccggccgccaattggacggctcggggcgaccccgctgtatcgcgagacgagattggcagcggcggggcctcaagtgcccccgcgctggctttgtatgcggagccgcctgccggtcctttaacaatgggcggcgcgagcgtccaggcgctgggctctagctgaggccggcgcttagcggcccactgtccgcagcatgagcggggccggcgtccgccgcacgacggcggggctggggctgtgagggccgcggttccggactcgagttgccgcgtcgggctgggcgcgccgccgggtcccatggagctggaggggcagtggtggcgaggacagctggccgccgatattcaccaagcgcttcgctacaaggagctgaagttgccctcctataaaggccagtcccctcagttaagtctcagacggtattttgctgacttgattgccattgtgagcaatcgcttcacactctgcccttctgcccgccatcttgctgtctatttactggacctgtttatggaccgctatgacatctctatccagcagctgcatttagttgcgctttcctgcctgcttctagcaagtaaatttgaagaaaaagaagacagtgtgcctaagctggagcagctcaacagcctgggttgtatgactaatatgaatctagtattaacaaaacaaaatttgctacatatggaactattattattagaaacctttcagtggaacctctgccttccaacagccgcccatttcattgagtattatctctctgaagcagtacacgaaacagatcttcatgacggctggccaatgatttgcttggaaaagactaaactctacatggccaaatatgcagattacttcctggaagtatctttgcaagtagctgctgcatgtgtggcttcttcgaggattatacttcgtctttctccaacgtggcctacaagactacatcgtcttactgcctactcttgggatttcttagtgcagtgtattgaacgactgttgatcgctcatgataatgatgtgaaagaagcaaacaaacagagagggcaagcaggacctcagtcagcgcaactaagtgtattccagacagcctcccagccatcacggccagttcactttcagcaacctcagtatctccatcagacacatcagacctcactgcagtatcgccatcctacgtcagaacaaccaagctgtcagcagattgtatcgaccacacacacctcatcttacacactacagacatgtcctgctggcttccaaactagtgttcagggccttgggcacatgcagactggtgttgggatgtcactggcaataccagtagaagttaagccctgtctgagtgtttcttacaaccggagttatcagataaatgaacattacccttgtattactccatgttttgaaaggtgattatttgtgaagctgataaccgacccagactgctttgtgacatgaagctatgggtaagcgttttgtaaacttctgttcaaaaggaaagggatctaaatgacatcagaactcttcaggtaccagcaccaggaagactgaatatcctttttaatgcaccatgaatcctgggagactaagcaaattaacagtatgtcaaattctgttacaacaaatccctgtatgacaaaaatgttcaagtcctggctgatggtccaaatatttcaaaaatattcagtacaacagaaaatttggacagacttcaatttgccattttgagatttgacctgtggtagcatctgggcctaatgttggcttctaagtcaaagactaaatgtttatctcatctatggacttgccaaacagtcttttatgaaggaaagttacagtattaatttttgaaaaggttttttttattctgcaattttttatttttgttctacacatgaatttttgactaagtttaaactcatgaattgttatgctataccaatctgcagtaaaaaaaatttttttagatgattctatataacttcgtctcacaaatagtgtaggtatctgggtttatatactaaaattaagggtggagaagatcttattttttaaatcatggtcataatttttctttttttccctaagtgatcaacatcaaatttttagaattaaaatacatttaactcagggaatttgtactacttggaaacacttaactgtaatgcaacatgccttgggaatgttatagtgtgaactacctttataacataggttaaaatacgcttgctagggtgtgttttcaaatgagaacataatatagctcagaatgaagtggtagttcctgtgattcataatacatatgtaggttttgcatatctcagtgcaatccatgatttatactcagaatcgacattcttaaaaagttatttcaagggatggcataactgtaagaggtcagtgctagaataaagtcctgtaggtttattttggaagggactgtggccagggtagttctcaggttgtgctagagcagcactttgttatgtggaagacaggttttttaagcaacctttgaatccagctctagtcagtctaagcaggcaaaggtaactgatgactaaatttcagtagctactttcattggattgaccctacaactgccctgggacatttcactgtaccagtattaactgcaaacagcaataattgtcattacagcaagggcagtttgggggtaaagcattttggaggaataaccttaaaaagttaaaaagtcattgtaataactgataaactgtatacattgtgctcctttctgtgggagaagaaagatttggtggagggaagctttctggtttaaaaattagtaaggtgtgtctttttgttttttttaagatagcacttgaatagaagggaaaactgcatggcagatacgtgactgccacaatatgcatcgaagacaaacttactataaagatgttgtgggtatgcagcaggagtctcagtaatcaagccaatggcctttgtcaggaagggaaggggctcaacacagtgatggactgatccagatggctcccggggatgaatgtgggtgggtagcttctgtcagtatcaatgcttagagaaatatcctttccttaaaaagaaaataacttttatatttagagtacatagggcatgatgtggatttattagtctggtagataaaatgaaaaaccactcaggtaagaacactcactcatggcagtttttaagcatgaaaattgttttctgaaagtatcatcacttttcctttttaaagaaggctgctaattggattttggtagttcttacctcaagaaaacttgaattatttgggggaaagtaggctcaaaagagaatatatctttcacattcacattcagaacccagcaacctggagtccaattttcagtattttaactacctcaataatgctatgaatgtaagatattgggatagagatcccaacttgaaacaacagccagtgcctgtggtaacttaatgtcttgtcaaatacttttattgattggtttatatgccattcttgttatagaagaatatgccttttaaaaaagcttattaataacactttcccaatttatattttaaaaagctaaagaacactggattaataatcttttgggagggtagaataaaataattgattactattgctgcatacccggggtgggatggggtggttggagaaccagaactatttttaaaacattaggtttcaatataaatacaactcacaactgctagctttggggggtgggggaacattgtgtgggttttgttttgtttaatttattgattagtctttaaagtaggcttttttttttttttttgagaatactggaccatcattaaatgtgtactgtgaagagattaatatgtatgaagggctttaccaaagtccactaaataaacactactcaagtacagactgcaaaccaaaatgtatctgtgttacgacattaattgcaaatagcaagtatggtgctaaagtctacaccaatggaattagatgagtgctatgcacttaattttaaaataaaactagttttcagtaaaa

SEQ ID NO: 123557 - DNA, 2830 bp, Homo sapiens
  Payload ID: 4256
  Gene Symbol: CCNJ
  Gene Name: cyclin J
  Uniprot ID: Q5T5M9
  ENST ID: ENST00000403870
  CDS Start-End: 368-1483
cgtgcgggatgctgaccgtacccaggcgggagccgccgcgccgccgcctggcgctgcacctgggcccggcccggccgccaattggacggctcggggcgaccccgctgtatcgcgagacgagattggcagcggcggggcctcaagtgcccccgcgctggctttgtatgcggagccgcctgccggtcctttaacaatgggcggcgcgagcgtccaggcgctgggctctagctgaggccggcgcttagcggcccactgtccgcagcatgagcggggccggcgtccgccgcacgacggcggggctggggctgtgagggccgcggttccggactcgagttgccgcgtcgggctgggcgcgccgccgggtcccatggagctggaggggcagtggtggcgaggacagctggccgccgatattcaccaagcgcttcgctacaaggagctgaagttgccctcctataaaggccagtcccctcagttaagtctcagacggtattttgctgacttgattgccattgtgagcaatcgcttcacactctgcccttctgcccgccatcttgctgtctatttactggacctgtttatggaccgctatgacatctctatccagcagctgcatttagttgcgctttcctgcctgcttctagcaagtaaatttgaagaaaaagaagacagtgtgcctaagctggagcagctcaacagcctgggttgtatgactaatatgaatctagtattaacaaaacaaaatttgctacatatggaactattattattagaaacctttcagtggaacctctgccttccaacagccgcccatttcattgagtattatctctctgaagcagtacacgaaacagatcttcatgacggctggccaatgatttgcttggaaaagactaaactctacatggccaaatatgcagattacttcctggaagtatctttgcaagctgctgcatgtgtggcttcttcgaggattatacttcgtctttctccaacgtggcctacaagactacatcgtcttactgcctactcttgggatttcttagtgcagtgtattgaacgactgttgatcgctcatgataatgatgtgaaagaagcaaacaaacagagagggcaagcaggacctcagtcagcgcaactaagtgtattccagacagcctcccagccatcacggccagttcactttcagcaacctcagtatctccatcagacacatcagacctcactgcagtatcgccatcctacgtcagaacaaccaagctgtcagcagattgtatcgaccacacacacctcatcttacacactacagacatgtcctgctggcttccaaactagtgttcagggccttgggcacatgcagactggtgttgggatgtcactggcaataccagtagaagttaagccctgtctgagtgtttcttacaaccggagttatcagataaatgaacattacccttgtattactccatgttttgaaaggtgattatttgtgaagctgataaccgacccagactgctttgtgacatgaagctatgggtaagcgttttgtaaacttctgttcaaaaggaaagggatctaaatgacatcagaactcttcaggtaccagcaccaggaagactgaatatcctttttaatgcaccatgaatcctgggagactaagcaaattaacagtatgtcaaattctgttacaacaaatccctgtatgacaaaaatgttcaagtcctggctgatggtccaaatatttcaaaaatattcagtacaacagaaaatttggacagacttcaatttgccattttgagatttgacctgtggtagcatctgggcctaatgttggcttctaagtcaaagactaaatgtttatctcatctatggacttgccaaacagtcttttatgaaggaaagttacagtattaatttttgaaaaggttttttttattctgcaattttttatttttgttctacacatgaatttttgactaagtttaaactcatgaattgttatgctataccaatctgcagtaaaaaaaatttttttagatgattctatataacttcgtctcacaaatagtgtaggtatctgggtttatatactaaaattaagggtggagaagatcttattttttaaatcatggtcataatttttctttttttccctaagtgatcaacatcaaatttttagaattaaaatacatttaactcagggaatttgtactacttggaaacacttaactgtaatgcaacatgccttgggaatgttatagtgtgaactacctttataacataggttaaaatacgcttgctagggtgtgttttcaaatgagaacataatatagctcagaatgaagtggtagttcctgtgattcataatacatatgtaggttttgcatatctcagtgcaatccatgatttatactcagaatcgacattcttaaaaagttatttcaagggatggcataactgtaagaggtcagtgctagaataaagtcctgtaggtttattttggaagggactgtggccagggtagttctcaggttgtgctagagcagcactttgttatgtggaagacaggttttttaagcaacctttgaatccagctctagtcagtctaagcaggcaaaggtaactgatgactaaatttcagtagctactttcattggattgaccctacaactgccctgggacatttcactgtaccagtattaactgcaaacagcaataattgtcattacagcaagggcagtttgggggtaaagcattttggaggaataaccttaaaaagttaaaaagtcattgtaataactgataaactgtatacattgtgctcctttct

SEQ ID NO: 123558 - DNA, 2677 bp, Homo sapiens
  Payload ID: 4256
  Gene Symbol: CCNJ
  Gene Name: cyclin J
  Uniprot ID: Q5T5M9
  ENST ID: ENST00000465148
  CDS Start-End: 179-1330
aacaatgggcggcgcgagcgtccaggcgctgggctctagctgaggccggcgcttagcggcccactgtccgcagcatgagcggggccggcgtccgccgcacgacggcggggctggggctgtgagggccgcggttccggactcgagttgccgcgtcgggctgggcgcgccgccgggtcccatggagctggaggggcagtggtggcgaggacagctggccgccgatattcaccaagcgcttcgctacaaggagctgaagttgccctcctataaaggccagtcccctcagttaagtctcagacggtattttgctgacttgattgccattgtgagcaatcgcttcacactctgcccttctgcccgccatcttgctgtctatttactggacctgtttatggaccgctatgacatctctatccagcagctgcatttagttgcgctttcctgcctgcttctagcaagtaaatttgaagaaaaagaagacagtgtgcctaagctggagcagctcaacagcctgggttgtatgactaatatgaatctagtattaacaaaacaaaatttgctacatatggaactattattattagaaacctttcagtggaacctctgccttccaacagccgcccatttcattgagtattatctctctgaagcagtacacgaaacagatcttcatgacggctggccaatgatttgcttggaaaagactaaactctacatggccaaatatgcagattacttcctggaagtatctttgcaagattatgcctttctaaattatgcaccttctttagtagctgctgcatgtgtggcttcttcgaggattatacttcgtctttctccaacgtggcctacaagactacatcgtcttactgcctactcttgggatttcttagtgcagtgtattgaacgactgttgatcgctcatgataatgatgtgaaagaagcaaacaaacagagagggcaagcaggacctcagtcagcgcaactaagtgtattccagacagcctcccagccatcacggccagttcactttcagcaacctcagtatctccatcagacacatcagacctcactgcagtatcgccatcctacgtcagaacaaccaagctgtcagcagattgtatcgaccacacacacctcatcttacacactacagacatgtcctgctggcttccaaactagtgttcagggccttgggcacatgcagactggtgttgggatgtcactggcaataccagtagaagttaagccctgtctgagtgtttcttacaaccggagttatcagataaatgaacattacccttgtattactccatgttttgaaaggtgattatttgtgaagctgataaccgacccagactgctttgtgacatgaagctatgggtaagcgttttgtaaacttctgttcaaaaggaaagggatctaaatgacatcagaactcttcaggtaccagcaccaggaagactgaatatcctttttaatgcaccatgaatcctgggagactaagcaaattaacagtatgtcaaattctgttacaacaaatccctgtatgacaaaaatgttcaagtcctggctgatggtccaaatatttcaaaaatattcagtacaacagaaaatttggacagacttcaatttgccattttgagatttgacctgtggtagcatctgggcctaatgttggcttctaagtcaaagactaaatgtttatctcatctatggacttgccaaacagtcttttatgaaggaaagttacagtattaatttttgaaaaggttttttttattctgcaattttttatttttgttctacacatgaatttttgactaagtttaaactcatgaattgttatgctataccaatctgcagtaaaaaaaatttttttagatgattctatataacttcgtctcacaaatagtgtaggtatctgggtttatatactaaaattaagggtggagaagatcttattttttaaatcatggtcataatttttctttttttccctaagtgatcaacatcaaatttttagaattaaaatacatttaactcagggaatttgtactacttggaaacacttaactgtaatgcaacatgccttgggaatgttatagtgtgaactacctttataacataggttaaaatacgcttgctagggtgtgttttcaaatgagaacataatatagctcagaatgaagtggtagttcctgtgattcataatacatatgtaggttttgcatatctcagtgcaatccatgatttatactcagaatcgacattcttaaaaagttatttcaagggatggcataactgtaagaggtcagtgctagaataaagtcctgtaggtttattttggaagggactgtggccagggtagttctcaggttgtgctagagcagcactttgttatgtggaagacaggttttttaagcaacctttgaatccagctctagtcagtctaagcaggcaaaggtaactgatgactaaatttcagtagctactttcattggattgaccctacaactgccctgggacatttcactgtaccagtattaactgcaaacagcaataattgtcattacagcaagggcagtttgggggtaaagcattttggaggaataaccttaaaaagttaaaaagtcattgtaataactgataaactgtatacattgtgctcctttct

SEQ ID NO: 123559 - DNA, 1848 bp, Homo sapiens
  Payload ID: 4257
  Gene Symbol: CCNJL
  Gene Name: cyclin J-like
  ENST ID: ENST00000257536
  CDS Start-End: 287-1450
aattcccccagcgagggagggaggcccccggcggccgggagcctgcgagccgcggcgggacccgagcgcacgcaggggcgcggcgacggcgggggctagtcgggctgcggaggcggccgtcgggagtgcggagcgcctcggacgagggtccaaccgccggcaggcaccagagggcacggctggctcggcactgggaggggcccggcgctcgcagccccccacgcccagagaggatgcggtgcgccctgagagccgggtagcctcggatagcggcgctgcgtacgcgatgatggatgagccgtggtgggaagggcgcgtcgcctcggacgtccactgcaccctgcgcgagaaggaactgaagctgcccaccttccgagcccactccccactcctgaagagccgccggttcttcgtggacatcctgaccctgctgagcagccactgccagctctgccctgcagcccggcacctggccgtctacctgctggaccacttcatggatcgctacaacgtcaccacctccaagcagctctacaccgtggccgtctcctgcctcctgcttgcaagtaagttcgaggatcgggaagaccacgtccccaagttggagcaaataaacagcacgaggatcctgagcagccagaacttcaccctcaccaagaaggagctgctgagcacagagctgctgctcctggaggccttcagctggaacctctgcctgcccacgcctgcccacttcctggactactacctcttggcctccgtcagccagaaggaccaccactgccacacctggcccaccacctgcccccgcaagaccaaagagtgcctcaaggagtatgcccattacttcctagaggtcaccctgcaagatcacatattctacaaattccagccttctgtggtcgctgcggcctgtgttggggcctccaggatttgcctgcagctttctccctactggaccagagacctgcagaggatctcaagctattccctggagcacctcagcacgtgtattgaaatcctgctggtagtgtatgacaacgtcctcaaggatgccgtagccgtcaagagccaggccttggcaatggtgcccggcacaccccccacccccactcaagtgctgttccagccaccagcctacccggccctcggccagccagcgaccaccctggcacagttccagacccccgtgcaggacctatgcttggcctatcgggactccttgcaggcccaccgttcagggagcctgctctcggggagtacaggctcatccctccacaccccgtaccaaccgctgcagcccttggatatgtgtcccgtgcccgtccctgcatcccttagcatgcatatggccattgcagctgagcccaggcactgcctcgccaccacctatggaagcagctacttcagtgggagccacatgttccccaccggctgctttgacagataggccacctccagacctcacgaggaagccttggagatgtgggcagaggaagaggacactgaagaggagagctcagccaagtgaggcagcaggaggccatccctgaagagccttggaacgtggagggtctgtgctccttttaaataaaactgacccagagcaaaacattcaataacatacctcacccgagagcattcctctgagaaacgtctgccacgtgtggctagggtacaaaaggatggcttggtggccgtccccccacacaggggcccagtgaatcgagaaagacttgataagaggccaggagagtgggaactggacacagaccactgatctcaagcatgtccagtttttagcattaaagacttttctattctttgctgatggcagctacaccgctg

SEQ ID NO: 123560 - DNA, 3320 bp, Homo sapiens
  Payload ID: 4257
  Gene Symbol: CCNJL
  Gene Name: cyclin J-like
  Uniprot ID: Q8IV13
  ENST ID: ENST00000393977
  CDS Start-End: 287-1594
aattcccccagcgagggagggaggcccccggcggccgggagcctgcgagccgcggcgggacccgagcgcacgcaggggcgcggcgacggcgggggctagtcgggctgcggaggcggccgtcgggagtgcggagcgcctcggacgagggtccaaccgccggcaggcaccagagggcacggctggctcggcactgggaggggcccggcgctcgcagccccccacgcccagagaggatgcggtgcgccctgagagccgggtagcctcggatagcggcgctgcgtacgcgatgatggatgagccgtggtgggaagggcgcgtcgcctcggacgtccactgcaccctgcgcgagaaggaactgaagctgcccaccttccgagcccactccccactcctgaagagccgccggttcttcgtggacatcctgaccctgctgagcagccactgccagctctgccctgcagcccggcacctggccgtctacctgctggaccacttcatggatcgctacaacgtcaccacctccaagcagctctacaccgtggccgtctcctgcctcctgcttgcaaacggagtttcgctcttatcgcccaggctgaagtgcagtggcatgatctcagctcattgcaacctccacctcccaggttcaagcaattctcctgcttcagcgccccaccccccacccacaccgccccaagtagctgagactacaggtaagttcgaggatcgggaagaccacgtccccaagttggagcaaataaacagcacgaggatcctgagcagccagaacttcaccctcaccaagaaggagctgctgagcacagagctgctgctcctggaggccttcagctggaacctctgcctgcccacgcctgcccacttcctggactactacctcttggcctccgtcagccagaaggaccaccactgccacacctggcccaccacctgcccccgcaagaccaaagagtgcctcaaggagtatgcccattacttcctagaggtcaccctgcaagatcacatattctacaaattccagccttctgtggtcgctgcggcctgtgttggggcctccaggatttgcctgcagctttctccctactggaccagagacctgcagaggatctcaagctattccctggagcacctcagcacgtgtattgaaatcctgctggtagtgtatgacaacgtcctcaaggatgccgtagccgtcaagagccaggccttggcaatggtgcccggcacaccccccacccccactcaagtgctgttccagccaccagcctacccggccctcggccagccagcgaccaccctggcacagttccagacccccgtgcaggacctatgcttggcctatcgggactccttgcaggcccaccgttcagggagcctgctctcggggagtacaggctcatccctccacaccccgtaccaaccgctgcagcccttggatatgtgtcccgtgcccgtccctgcatcccttagcatgcatatggccattgcagctgagcccaggcactgcctcgccaccacctatggaagcagctacttcagtgggagccacatgttccccaccggctgctttgacagataggccacctccagacctcacgaggaagccttggagatgtgggcagaggaagaggacactgaagaggagagctcagccaagtgaggcagcaggaggccatccctgaagagccttggaacgtggagggtctgtgctccttttaaataaaactgacccagagcaaaacattcaataacatacctcacccgagagcattcctctgagaaacgtctgccacgtgtggctagggtacaaaaggatggcttggtggccgtccccccacacaggggcccagtgaatcgagaaagacttgataagaggccaggagagtgggaactggacacagaccactgatctcaagcatgtccagtttttagcattaaagacttttctattctttgctgatggcagctacaccgctgaaaaaggaggggcagcctggcgtgttctcaggacccccggaggatcccatattgggtgcttttctttccctggctctatgcagaggggcctgagttggtgtgtatgcctgagtgtttgccttgcgaggcacagtgggtggctgtcttgcctttgttttcgaacctaaaaccattttcagccttttagatatgtcatgtgctgctgcttcccgaagtggtcttgctttctgtttcgtaagatgtcttgtttacacactgtatcagggatttggtgatacttgaaaattcctttggagaaaaaaacaaatttaattgccacactgcctgtcccacatgagggctgttaatttggaacccaagtttgaacccaacttgtgatggacccgcaggtaaccacagagcttcctttttgaaggcatatggttggagagaaccattttcccagctctcggttccggaagattccacgtcttggaggctgtgttcaccactagaactttaataactacccagggagggagaagctcgttgaaaggaagacaaagatttaaacagttcccacctctctccaccacatacttacagggcatgagtttaacccagtctaggctttgagtgtggctgatagcgaaggatagcaatgtggaaaatttgcttagtcccacctgtatttggggagtgggatgtacatgggcgtttgataccaccattgataggcaagcgactggttggatcaaaagccagtatttagggatctgcagcgagagggccctcaggaagactcttgtaaccatgtgcaatatgtttttattctgactcgcagcttgtgctcagcatgttctttggtttagtttggggttgggggacacattgttcacccagcagaactgggaggtgcaaaggaccgtggaagcaatttttgttttgtttgaggaatacctgtcttggattccttagccccttgccagtcctggagactgtggcaggggccgccaggaaggcagctgtctgctgctgagtcagatcggaaggtggtgaatctttccagagcagctgaaaatctcagcatggagacagtaagaaaagagacggggtgtggataagactctgccaccgtgtcacactagcataggaggctgcacgttcatttgttgttgtttttttttcctttgccaacctccgttctatttatgtgcaagcagtttggattcaagttcttgtatctgtctgttctgggacctggggattgtgagggttccctcacagccagcacgacccccagaaagaggcgtcccacaataaacacgtcacctgctcttgatctctca

SEQ ID NO: 123561 - DNA, 940 bp, Homo sapiens
  Payload ID: 4257
  Gene Symbol: CCNJL
  Gene Name: cyclin J-like
  ENST ID: ENST00000519673
  CDS Start-End: 163-921
agtgcggagcgcctcggacgagggtccaaccgccggcaggcaccagagggcacggctggctcggcactgggaggggcccggcgctcgcagccccccacgcccagagaggatgcggtgcgccctgagagccgggtagcctcggatagcggcgctgcgtacgcgatgatggatgagccgtggtgggaagggcgcgtcgcctcggacgtccactgcaccctgcgcgagaaggaactgaagctgcccaccttccgagcccactccccactcctgaagagccgccggttcttcgtggacatcctgaccctgctgagcagccactgccagctctgccctgcagcccggcacctggccgtctacctgctggaccacttcatggatcgctacaacgtcaccacctccaagcagctctacaccgtggccgtctcctgcctcctgcttgcaagtaagttcgaggatcgggaagaccacgtccccaagttggagcaaataaacagcacgaggatcctgagcagccagaacttcaccctcaccaagaaggagctgctgagcacagagctgctgctcctggaggccttcagctggaacctctgcctgcccacgcctgcccacttcctggactactacctcttggcctccgtcagccagaaggaccaccactgccacacctggcccaccacctgcccccgcaagaccaaagagtgcctcaaggagtatgcccattacttcctagaggtcaccctgcaagatcacatattctacaaattccagccttctgtggtcgctgcggcctgtgttggggcctccaggatttgcctgcagctttctccctactggaccagagacctgcagaggatctcaagctattccctggagcacctcagcacgtgtattgaaatcctgctggtcccccttttcagatgaaaaatcctaggccccagcg

SEQ ID NO: 123562 - DNA, 914 bp, Homo sapiens
  Payload ID: 4257
  Gene Symbol: CCNJL
  Gene Name: cyclin J-like
  ENST ID: ENST00000520748
  CDS Start-End: 348-914
gcgagccgcggcgggacccgagcgcacgcaggggcgcggcgacggcgggggctagtcgggctgcggaggcggccgtcgggagtgcggagcgcctcggacgagggtccaaccgccggcaggcaccagagggcacggctggctcggcactgggaggggcccggcgctcgcagccccccacgcccagagaggatgcggtgcgccctgagagccgggtagcctcggatagcggcgctgcgtacgcgatgatggatgagccgtggtgggaagggcgcgtcgcctcggacgtccactgcaccctgcgcgagaaggtccttgatactttatgagcctgtgcttagtgaaagcagatgggagatagcccaggcggggctgccatcctgggacttgcaggaaaactaagaagggtatggagggaatcgttgcctcccattcaggccctgaggtcccatttcctgggacagccgagactctcaggaggcagccctgaccgtcacccctccgccccgcctgtcctccaggaactgaagctgcccaccttccgagcccactccccactcctgaagagccgccggttcttcgtggacatcctgaccctgctgagcagccactgccagctctgccctgcagcccggcacctggccgtctacctgctggaccacttcatggatcgctacaacgtcaccacctccaagcagctctacaccgtggccgtctcctgcctcctgcttgcaagtaagttcgaggatcgggaagaccacgtccccaagttggagcaaataaacagcacgaggatcctgagcagccagaacttcaccctcaccaagaaggagctgctgagcacagagctgctgctcctggaggccttcagctggaacctctgcctgcccacgcctgcccacttcctggactactac

SEQ ID NO: 123563 - DNA, 2965 bp, Homo sapiens
  Payload ID: 4257
  Gene Symbol: CCNJL
  Gene Name: cyclin J-like
  ENST ID: ENST00000541762
  CDS Start-End: 1-1251
agagaaaaagaactgaagctgcccaccttccgagcccactccccactcctgaagagccgccggttcttcgtggacatcctgaccctgctgagcagccactgccagctctgccctgcagcccggcacctggccgtctacctgctggaccacttcatggatcgctacaacgtcaccacctccaagcagctctacaccgtggccgtctcctgcctcctgcttgcaaacggagtttcgctcttatcgcccaggctgaagtgcagtggcatgatctcagctcattgcaacctccacctcccaggttcaagcaattctcctgcttcagcgccccaccccccacccacaccgccccaagtagctgagactacaggtaagttcgaggatcgggaagaccacgtccccaagttggagcaaataaacagcacgaggatcctgagcagccagaacttcaccctcaccaagaaggagctgctgagcacagagctgctgctcctggaggccttcagctggaacctctgcctgcccacgcctgcccacttcctggactactacctcttggcctccgtcagccagaaggaccaccactgccacacctggcccaccacctgcccccgcaagaccaaagagtgcctcaaggagtatgcccattacttcctagaggtcaccctgcaagatcacatattctacaaattccagccttctgtggtcgctgcggcctgtgttggggcctccaggatttgcctgcagctttctccctactggaccagagacctgcagaggatctcaagctattccctggagcacctcagcacgtgtattgaaatcctgctggtagtgtatgacaacgtcctcaaggatgccgtagccgtcaagagccaggccttggcaatggtgcccggcacaccccccacccccactcaagtgctgttccagccaccagcctacccggccctcggccagccagcgaccaccctggcacagttccagacccccgtgcaggacctatgcttggcctatcgggactccttgcaggcccaccgttcagggagcctgctctcggggagtacaggctcatccctccacaccccgtaccaaccgctgcagcccttggatatgtgtcccgtgcccgtccctgcatcccttagcatgcatatggccattgcagctgagcccaggcactgcctcgccaccacctatggaagcagctacttcagtgggagccacatgttccccaccggctgctttgacagataggccacctccagacctcacgaggaagccttggagatgtgggcagaggaagaggacactgaagaggagagctcagccaagtgaggcagcaggaggccatccctgaagagccttggaacgtggagggtctgtgctccttttaaataaaactgacccagagcaaaacattcaataacatacctcacccgagagcattcctctgagaaacgtctgccacgtgtggctagggtacaaaaggatggcttggtggccgtccccccacacaggggcccagtgaatcgagaaagacttgataagaggccaggagagtgggaactggacacagaccactgatctcaagcatgtccagtttttagcattaaagacttttctattctttgctgatggcagctacaccgctgaaaaaggaggggcagcctggcgtgttctcaggacccccggaggatcccatattgggtgcttttctttccctggctctatgcagaggggcctgagttggtgtgtatgcctgagtgtttgccttgcgaggcacagtgggtggctgtcttgcctttgttttcgaacctaaaaccattttcagccttttagatatgtcatgtgctgctgcttcccgaagtggtcttgctttctgtttcgtaagatgtcttgtttacacactgtatcagggatttggtgatacttgaaaattcctttggagaaaaaaacaaatttaattgccacactgcctgtcccacatgagggctgttaatttggaacccaagtttgaacccaacttgtgatggacccgcaggtaaccacagagcttcctttttgaaggcatatggttggagagaaccattttcccagctctcggttccggaagattccacgtcttggaggctgtgttcaccactagaactttaataactacccagggagggagaagctcgttgaaaggaagacaaagatttaaacagttcccacctctctccaccacatacttacagggcatgagtttaacccagtctaggctttgagtgtggctgatagcgaaggatagcaatgtggaaaatttgcttagtcccacctgtatttggggagtgggatgtacatgggcgtttgataccaccattgataggcaagcgactggttggatcaaaagccagtatttagggatctgcagcgagagggccctcaggaagactcttgtaaccatgtgcaatatgtttttattctgactcgcagcttgtgctcagcatgttctttggtttagtttggggttgggggacacattgttcacccagcagaactgggaggtgcaaaggaccgtggaagcaatttttgttttgtttgaggaatacctgtcttggattccttagccccttgccagtcctggagactgtggcaggggccgccaggaaggcagctgtctgctgctgagtcagatcggaaggtggtgaatctttccagagcagctgaaaatctcagcatggagacagtaagaaaagagacggggtgtggataagactctgccaccgtgtcacactagcataggaggctgcacgttcatttgttgttgtttttttttcctttgccaacctccgttctatttatgtgcaagcagtttggattcaagttcttgtatctgtctgttctgggacctggggattgtgagggttccctcacagccagcacgacccccagaaagaggcgtcccacaataaacacgtcacctgct

SEQ ID NO: 123564 - DNA, 3524 bp, Homo sapiens
  Payload ID: 4258
  Gene Symbol: CCNK
  Gene Name: cyclin K
  Uniprot ID: O75909
  ENST ID: ENST00000389879
  CDS Start-End: 124-1866
gacattccatatacaagatggccgcagtcggcaaggagagacgtcgctgaggggcttgcctgaagcgaggggattctaacattttcagagaaccttttggaaagaacaagcctacttcaataaatgaaggagaataaagaaaattcaagcccttcagtaacttcagcaaacctggaccacacaaagccatgttggtactgggataagaaagacttggctcatacaccctcacaacttgaaggacttgatccagccaccgaggcccggtaccgccgagagggcgctcggttcatctttgatgtgggcacacgtttggggctacactatgataccctggcaactggaataatttattttcatcgcttctatatgtttcattccttcaagcaattcccaagatatgtgacaggagcctgttgcctctttctggctgggaaagtagaagaaacaccaaaaaaatgtaaagatatcatcaaaacagctcgtagtttattaaatgatgtacaatttggccagtttggagatgacccaaaggaggaagtaatggttctggagagaatcttactgcagaccatcaagtttgatttacaggtagaacatccataccagttcctactaaaatatgcaaagcaactcaaaggtgataaaaacaaaattcaaaagttggttcaaatggcatggacatttgtaaatgacagtctctgcaccaccttgtcactgcagtgggaaccagagatcatagcagtagcagtgatgtatctcgcaggacgtttgtgcaaatttgaaatacaagaatggacctccaaacccatgtataggagatggtgggagcagtttgttcaagatgtcccggtcgacgttttggaagacatctgccaccaaatcctggatctttactcacaaggaaaacaacagatgcctcatcacaccccccatcagctgcaacagcccccatctcttcagcctacaccacaagtgccgcaagtacagcagtcacagccgtctcaaagctccgaaccatcccagccccagcagaaggacccccagcaaccagcccagcagcagcagccagcccaacagcccaagaaaccctctccgcagcccagttctccccgacaggttaagcgagccgtggttgtttctcccaaagaagagaacaaagcagcagaaccaccaccacctaaaatccccaaaattgagaccactcatccaccgttgcctccagcccacccacctccagaccggaagcctcccctcgctgctgccttaggtgaggctgagccgccgggccctgtggatgccactgacctccccaaagtccagattccccctccggcccacccggcccctgtgcaccagccaccgccgctgccacaccggcccccgcccccacccccctccagctacatgaccgggatgtccaccaccagctcctacatgtctggagagggctaccagagcctgcagtccatgatgaagaccgagggaccctcctacggtgccctgccccccgcctacggcccacctgcacacctgccctaccacccccatgtctacccgcccaacccgcccccgccacctgtgcctcctcccccagcctccttccccccacctgccatcccaccccctactcctggctaccccccacccccacccacctacaaccccaacttcccacccccacccccacgcctcccgcctacccacgcagtcccccctcatcctcctccagggttgggcctgccgccagccagctacccacctcctgccgtcccccctggaggacagcctcctgtgcccccgcccattcccccacccggcatgcctccagttggggggctggggcgggcagcctggatgagataacgtgagccttttttccctctttgtttttttaacaagattttctaatcgacttgcagagtagttgaagtgggtaagcagcagggtaccttgtataatgcacgacagttgcagtatgggaagaatggaccgggcccctgggataaaatcagagtggtcctcacacctagaggacggggacaaccagctttcagagtagcctcatcagtgcccttgcagtctgactgtgtacacttggttcagctaatgtctgagagtcctgcactgggttactttatactagtgaggacgttaaccagccatattggctcaataaatagcttcggtaaggagttaatttccttctagaaatcagtgcctatttttcctggaaactcaattttaaatagtccaattccatctgaagccaagctgttgtcattttcattcggtgacattctctcccatgacacccagaaggggcagaagaaccacatttttcatttatagatgtttgcatcctttgtattaaaattattttgaaggggttgcctcattggatggctttttttttttcctccagggagaaggggagaaatgtacttggaaattaatgtatgtttacatctctttgcaaattcctgtacatagagatatattttttaagtgtgaatgtaacaacatactgtgaattccatcttggttacaaatgagactccttcagtcagttatccaaataaaagcagttctgaaactatccctttctttgttatgggtggaaggtggggctccaggccttcgcagtctgtggcttataaaatgtgcagaggccctccttccagaccctggggacgcgggagaggcctggctgcagctcacagcagccacagccaaccccactgcctcccaaggcactctgggtggatccgcacagctgcctgccaagccagcctgcccccatcctgtgcctgccttggtttcctttggaggacctggttgagttccaaaccagtttgaaactttgaagccttgctgcgtagaacgcacacaggaacccgggggcttggatttgaaaccctttccacttctggcctgtgatgagacagaggcagctggaggagcagcggcctcactgtccaccttgaggggccacggctctgtctgtggaaggggccccgactgagcccccatctgcggtgcttgaggggccttggccctgtctctgcctgctgaccctgccacccacgacagaaacaagcactgagcacccagccaggaggctcacaaagaggcctttatttatctagctcaaagtagacactatcacaatcttgtttgttactccttttactaaaatagttcaaatcaatgtttttaccacactatcaaaaagttctatttcttcttgtctccccacgtcagagtggttgaatagaaggtagaaacaggccgggagtccacgggctcccagctctaaacggcgccagggcaggaaggggtggctccaggtctcactgtggcaccttctacagaaaatagacgtagctgccgggcccggggacagaaaccagacgttccagtccatctccaaaaagcagcacaaatactttgccccacagtatgaaaaatatacacctctaccgctctgcagtcatgcatttagttttaagaaaaaaaaaaaa

SEQ ID NO: 123565 - DNA, 811 bp, Homo sapiens
  Payload ID: 4258
  Gene Symbol: CCNK
  Gene Name: cyclin K
  ENST ID: ENST00000555842
  CDS Start-End: 483-811
gatggccgcagtcggcaaggagagacgtcgctgaggggcttgcctgaagcgagggcatggagcttttggagagtgtctttattctgagtgaaagaaaaggaagaggatgaaaaagcaagaacagtttaaaggagctccttctctcatggaccacttccatccacccactccccaaatcacaagatgcacatttggtttacatcagtgaattcagtgatttgtgcagatgtgaattaacccaatcccatgacttgtctaagtgaaagtgcctacatggaataaactgaaaaggggtgctggatggaagagatggttagttttagaacataaatctttgtcaagattaagacaggcccaggttttgctgaagaatggaatctggaccagcgttagaggacctgtatgtctagtgaagaaaaaccagaagaaagattctaacattttcagagaaccttttggaaagaacaagcctacttcaataaatgaaggagaataaagaaaattcaagcccttcagtaacttcagcaaacctggaccacacaaagccatgttggtactgggataagaaagacttggctcatacaccctcacaacttgaaggacttgatccagccaccgaggcccggtaccgccgagagggcgctcggttcatctttgatgtgggcacacgtttggggctacactatgataccctggcaactggaataatttattttcatcgcttctatatgtttcattccttcaagcaattcccaagatatgtgacaggagcctgttgcctctttctggctgggaaagtagaagaaacacc

SEQ ID NO: 123566 - DNA, 936 bp, Homo sapiens
  Payload ID: 4258
  Gene Symbol: CCNK
  Gene Name: cyclin K
  ENST ID: ENST00000557441
  CDS Start-End: 256-936
attccatatacaagatggccgcagtcggcaaggagagacgtcgctgaggggcttgcctgaagcgaggggtgagtgacccaccgactgagggcagcgccgcccacctcccgcgtatctggaggtcggagtaggttatggccaaccgccgctatccactggcggagtctctctttccggattctgcctccctccgctaacctccggattctaacattttcagagaaccttttggaaagaacaagcctacttcaataaatgaaggagaataaagaaaattcaagcccttcagtaacttcagcaaacctggaccacacaaagccatgttggtactgggataagaaagacttggctcatacaccctcacaacttgaaggacttgatccagccaccgaggcccggtaccgccgagagggcgctcggttcatctttgatgtgggcacacgtttggggctacactatgataccctggcaactggaataatttattttcatcgcttctatatgtttcattccttcaagcaattcccaagatatgtgacaggagcctgttgcctctttctggctgggaaagtagaagaaacaccaaaaaaatgtaaagatatcatcaaaacagctcgtagtttattaaatgatgtacaatttggccagtttggagatgacccaaaggaggaagtaatggttctggagagaatcttactgcagaccatcaagtttgatttacaggtagaacatccataccagttcctactaaaatatgcaaagcaactcaaaggtgataaaaacaaaattcaaaagttggttcaaatggcatggacatttgtaaatgacagtctctgcaccaccttgtcactgcagtgggaaccagagatcatagcagtagcagtgatgtatctcgcaggacgtttgtgcaaatttgaaatacaagaatggacctcc

SEQ ID NO: 123567 - DNA, 1606 bp, Homo sapiens
  Payload ID: 4258
  Gene Symbol: CCNK
  Gene Name: cyclin K
  ENST ID: ENST00000555049
  CDS Start-End: 109-1245
agatggccgcagtcggcaaggagagacgtcgctgaggggcttgcctgaagcgaggggattctaacattttcagagaaccttttggaaagaacaagcctacttcaataaatgaaggagaataaagaaaattcaagcccttcagtaacttcagcaaacctggaccacacaaagccatgttggtactgggataagaaagacttggctcatacaccctcacaacttgaaggacttgatccagccaccgaggcccggtaccgccgagagggcgctcggttcatctttgatgtgggcacacgtttggggctacactatgataccctggcaactggaataatttattttcatcgcttctatatgtttcattccttcaagcaattcccaagatatgtgacaggagcctgttgcctctttctggctgggaaagtagaagaaacaccaaaaaaatgtaaagatatcatcaaaacagctcgtagtttattaaatgatgtacaatttggccagtttggagatgacccaaaggaggaagtaatggttctggagagaatcttactgcagaccatcaagtttgatttacaggtagaacatccataccagttcctactaaaatatgcaaagcaactcaaaggtgataaaaacaaaattcaaaagttggttcaaatggcatggacatttgtaaatgacagtctctgcaccaccttgtcactgcagtgggaaccagagatcatagcagtagcagtgatgtatctcgcaggacgtttgtgcaaatttgaaatacaagaatggacctccaaacccatgtataggagatggtgggagcagtttgttcaagatgtcccggtcgacgttttggaagacatctgccaccaaatcctggatctttactcacaaggaaaacaacagatgcctcatcacaccccccatcagctgcaacagcccccatctcttcagcctacaccacaagtgccgcaagtacagcagtcacagccgtctcaaagctccgaaccatcccagccccagcagaaggacccccagcaaccagcccagcagcagcagccagcccaacagcccaagaaaccctctccgcagcccagttctccccgacaggttaagcgagccgtggttgtttctcccaaagaagagaacaaagcagcagaaccaccaccacctaaaatccccaaaattgagaccactcatccaccgttgcctccagcccacccacctccagcttccacacaccctccttagcaaccacaatggccccgccaggtctgcaatggaaggctggcgtctagggagccccactccacagacaggtgagaccccagcccctcctgccctcaccagccctgggaagccagcacggcctgtggccaaagcccttcaccatagggcacctgacagcaaggcatgaaattacaaaagccagccttgccattcagagcttggctgtgcacttgcgcctgtatggtggtggggagtggggggcggggtgtggaggagagttcacaagaggccaaatgaggaacgtgcactctgctaatcccaccaggccctgggaaccttccccacagcccacaaaggggtgagacgtgaggatgacctcagt

SEQ ID NO: 123568 - DNA, 549 bp, Homo sapiens
  Payload ID: 4259
  Gene Symbol: CCNL1
  Gene Name: cyclin L1
  Uniprot ID: Q9UK58
  ENST ID: ENST00000295925
  CDS Start-End: 1-519
atggcgtccgggcctcattcgacagctactgctgccgcagccgcctcatcggccgccccaagcgcgggcggctccagctccgggacgacgaccacgacgacgaccacgacgggagggatcctgatcggcgatcgcctgtactcggaagtttcacttaccatcgaccactctctgattccggaggagaggctctcgcccaccccatccatgcaggatgggctcgacctgcccagtgagacggacttacgcatcctgggctgcgagctcatccaggccgccggcattctcctccggctgccgcaggtggcgatggcaacggggcaggtgttgtttcatcgttttttctactccaaatctttcgtcaaacacagtttcgagattgttgctatggcttgtattaatcttgcatcaaaaatcgaagaagcacctagaagaataagagatgtgattaatgtattccaccacctccgccagttaagaggaaaaagcgaccagctacatttaccaaagcctgggtgatgtggagtggtacatagagatgaagctgtc

SEQ ID NO: 123569 - DNA, 2388 bp, Homo sapiens
  Payload ID: 4259
  Gene Symbol: CCNL1
  Gene Name: cyclin L1
  Uniprot ID: Q9UK58
  ENST ID: ENST00000295926
  CDS Start-End: 120-1700
acgcggcgtgaagcggcccagaacccggcggtcacgggaatatccgtcgcgccgagaacgctggttagtcttgtttcgggttccggctgcgttgggcttgcgtgcggctcgctaagactatggcgtccgggcctcattcgacagctactgctgccgcagccgcctcatcggccgccccaagcgcgggcggctccagctccgggacgacgaccacgacgacgaccacgacgggagggatcctgatcggcgatcgcctgtactcggaagtttcacttaccatcgaccactctctgattccggaggagaggctctcgcccaccccatccatgcaggatgggctcgacctgcccagtgagacggacttacgcatcctgggctgcgagctcatccaggccgccggcattctcctccggctgccgcaggtggcgatggcaacggggcaggtgttgtttcatcgttttttctactccaaatctttcgtcaaacacagtttcgagattgttgctatggcttgtattaatcttgcatcaaaaatcgaagaagcacctagaagaataagagatgtgattaatgtattccaccacctccgccagttaagaggaaaaaggactccaagccccctgatccttgatcagaactacattaacaccaaaaatcaagttatcaaagcagagaggagggtgctaaaggagttgggattttgtgttcatgtcaagcatcctcataagatcattgttatgtatttacaagtcttagaatgtgaacgtaatcaaaccctggttcaaactgcctggaattacatgaatgacagtcttcgaaccaatgtgtttgttcgatttcaaccagagactatagcatgtgcttgcatctaccttgcagctagagcacttcagattccgttgccaactcgtccccattggtttcttctttttggtactacagaagaggaaatccaggaaatctgcatagaaacacttaggctttataccagaaaaaagccaaactatgaattactggaaaaagaagtagaaaaaagaaaagtagccttacaagaagccaaattaaaagcaaagggattgaatccggatggaactccagccctttcaaccctgggtggattttctccagcctccaagccatcatcaccaagagaagtaaaagctgaagagaaatcaccaatctccattaatgtgaagacagtcaaaaaagaacctgaggatagacaacaggcttccaaaagcccttacaatggtgtaagaaaagacagcaagagaagtagaaatagcagaagtgcaagtcgatcgaggtcaagaacacgatcacgttctagatcacatactccaagaagacactataataataggcggagtcgatctggaacatacagctcgagatcaagaagcaggtcccgcagtcacagtgaaagccctcgaagacatcataatcatggttctcctcaccttaaggccaagcataccagagatgatttaaaaagttcaaacagacatggtcataaaaggaaaaaatctcgttctcgatctcagagcaagtctcgggatcactcagatgcagccaagaaacacaggcatgaaaggggacatcatagggacaggcgtgaacgatctcgctcctttgagaggtcccataaaagcaagcaccatggtggcagtcgctcaggacatggcaggcacaggcgctgactttctcttcctttgagcctgcatcagttcttggttttgcctatctacagtgtgatgtatggactcaatcaaaaacattaaacgcaaactgattaggatttgatttcttgaaaccctctaggtctctagaacactgaggacagtttcttttgaaaagaactatgttaatttttttgcacattaaaatgccctagcagtatctaattaaaaaccatggtcaggttcaattgtactttattatagttgtgtattgtttattgctataagaactggagcgtgaattctgtaaaaatgtatcttatttttatacagataaaattgcagacactgttctatttaagtggttatttgtttaaatgatggtgaatactttcttaacactggtttgtctgcatgtgtaaagatttttacaaggaaataaaatacaaatcttgttttttctaaactgcttcaaataccttatttaaataaattattaaaaaggaaaattttaatagcaaaatggctgtactggttttctgacaaacttattctttcctccattagatggtagtttgagattattaaaatgcaattcttaactgcattgtgagctattgtaagtcttcactgtatatatggaaaaagtaaatgggagtcgcccaacaatgtgacattaaatgttatattttagcactaaaccaaaaaa

SEQ ID NO: 123570 - DNA, 793 bp, Homo sapiens
  Payload ID: 4259
  Gene Symbol: CCNL1
  Gene Name: cyclin L1
  ENST ID: ENST00000468977
  CDS Start-End: 1-178
cagaaaaaagccaaactatgaattactggaaaaagaagtagaaaaaagaaaagtagccttacaagaagccaaattaaaagcaaagggattgaatccggatggaactccagccctttcaaccctgggtggattttctccagcctccaagccatgtaagatgtatttagaattaaaatgacttgggggcactgaaagtgtgtctttattagagagcttttacatttgaaagttgcatagagaaaaatgatgttaggaaactgctgctatgttctctcatggcagtcaaccaacatggaagcggaagcatgcatcaccaagagaagtaaaagctgaagagaaatcaccaatctccattaatgtgaagacagtcaaaaaagaacctgaggatagacaacaggcttccaaaagcccttacaatggtgtaagaaaagacagcaagagaagtagaaatagcagaagtgcaagtcgatcgaggtcaagaacacgatcacgttctagatcacatactccaagaagacactataataataggcggagtcgatctggaacatacagctcgagatcaagaagcaggtcccgcagtcacagtgaaagccctcgaagacatcataatcatggttctcctcaccttaaggccaagcataccagagatgatttaaaaagttcaaacagacatggtcataaaaggaaaaaatctcgttctcgatctcagagcaagtctcgggatcactcagatgcagccaagaaacacaggcatgaaaggggacatcatagggacaggcgtgaacgatct

SEQ ID NO: 123571 - DNA, 1889 bp, Homo sapiens
  Payload ID: 4259
  Gene Symbol: CCNL1
  Gene Name: cyclin L1
  Uniprot ID: Q9UK58
  ENST ID: ENST00000470121
  CDS Start-End: 1-699
atggcgtccgggcctcattcgacagctactgctgccgcagccgcctcatcggccgccccaagcgcgggcggctccagctccgggacgacgaccacgacgacgaccacgacgggagggatcctgatcggcgatcgcctgtactcggaagtttcacttaccatcgaccactctctgattccggaggagaggctctcgcccaccccatccatgcaggatgggctcgacctgcccagtgagacggacttacgcatcctgggctgcgagctcatccaggccgccggcattctcctccggctgccgcaggtggcgatggcaacggggcaggtgttgtttcatcgttttttctactccaaatctttcgtcaaacacagtttcgagattgttgctatggcttgtattaatcttgcatcaaaaatcgaagaagcacctagaagaataagagatgtgattaatgtattccaccacctccgccagttaagaggaaaaaggactccaagccccctgatccttgatcagaactacattaacaccaaaaatcaagttatcaaagcagagaggagggtgctaaaggagttgggattttgtgttcatgtcaagcatcctcataagatcattgttatgtatttacaagtcttagaatgtgaacgtaatcaaaccctggttcaaactgcctgggtagtccatgatggtaagtcatagaactctgccctctgcacttcagcccatgacctcaggatggcctgattggctaccctgctctccagccaatccagtgcaagctctcatccgagattcactgaagtggtccatatccatctggcagcatcttctagttctgtcggggtgtcaaaaggatttgtatatttgcttctagaatgtgtatagcatgaatactaccaaaggagacgacaaacttgcagcttaaaatgggcaccagttcccacactggcttaatttatataactgcttggctgtattgcgggaattacatgaatgacagtcttcgaaccaatgtgtttgttcgatttcaaccagagactatagcatgtgcttgcatctaccttgcagctagagcacttcagattccgttgccaactcgtccccattggtttcttctttttggtactacagaagaggaaatccaggaaatctgcatagaaacacttaggctttataccagaaaaaagccaaactatgaattactggaaaaagaagtagaaaaaagaaaagtagccttacaagaagccaaattaaaagcaaagggattgaatccggatggaactccagccctttcaaccctgggtggattttctccagcctccaagccatcatcaccaagagaagtaaaagctgaagagaaatcaccaatctccattaatgtgaagacagtcaaaaaagaacctgaggatagacaacaggcttccaaaagcccttacaatggtgtaagaaaagacagcaagagaagtagaaatagcagaagtgcaagtcgatcgaggtcaagaacacgatcacgttctagatcacatactccaagaagacactataataataggcggagtcgatctggaacatacagctcgagatcaagaagcaggtcccgcagtcacagtgaaagccctcgaagacatcataatcatggttctcctcaccttaaggccaagcataccagagatgatttaaaaagttcaaacagacatggtcataaaaggaaaaaatctcgttctcgatctcagagcaagtctcgggatcactcagatgcagccaagaaacacaggcatgaaaggggacatcatagggacaggcgtgaacgatctcgctcctttgagaggtcccataaaagcaagcaccatggtggcagtcgctcaggacatggcaggcacaggcgctga

SEQ ID NO: 123572 - DNA, 2362 bp, Homo sapiens
  Payload ID: 4259
  Gene Symbol: CCNL1
  Gene Name: cyclin L1
  Uniprot ID: Q9UK58
  ENST ID: ENST00000475298
  CDS Start-End: 62-580
cgctggttagtcttgtttcgggttccggctgcgttgggcttgcgtgcggctcgctaagactatggcgtccgggcctcattcgacagctactgctgccgcagccgcctcatcggccgccccaagcgcgggcggctccagctccgggacgacgaccacgacgacgaccacgacgggagggatcctgatcggcgatcgcctgtactcggaagtttcacttaccatcgaccactctctgattccggaggagaggctctcgcccaccccatccatgcaggatgggctcgacctgcccagtgagacggacttacgcatcctgggctgcgagctcatccaggccgccggcattctcctccggctgccgcaggtggcgatggcaacggggcaggtgttgtttcatcgttttttctactccaaatctttcgtcaaacacagtttcgagattgttgctatggcttgtattaatcttgcatcaaaaatcgaagaagcacctagaagaataagagatgtgattaatgtattccaccacctccgccagttaagaggaaaaagcgaccagctacatttaccaaagcctgggtgatgtggagtggtacatagagatgaagctgtcgtcatggcaacagactccaagccccctgatccttgatcagaactacattaacaccaaaaatcaagttatcaaagcagagaggagggtgctaaaggagttgggattttgtgttcatgtcaagcatcctcataagatcattgttatgtatttacaagtcttagaatgtgaacgtaatcaaaccctggttcaaactgcctgggtagtccatgatggtaagtcatagaactctgccctctgcacttcagcccatgacctcaggatggcctgattggctaccctgctctccagccaatccagtgcaagctctcatccgagattcactgaagtggtccatatccatctggcagcatcttctagttctgtcggggtgtcaaaaggatttgtatatttgcttctagaagaattacatgaatgacagtcttcgaaccaatgtgtttgttcgatttcaaccagagactatagcatgtgcttgcatctaccttgcagctagagcacttcagattccgttgccaactcgtccccattggtttcttctttttggtactacagaagaggaaatccaggaaatctgcatagaaacacttaggctttataccagaaaaaagccaaactatgaattactggaaaaagaagtagaaaaaagaaaagtagccttacaagaagccaaattaaaagcaaagggattgaatccggatggaactccagccctttcaaccctgggtggattttctccagcctccaagccatcatcaccaagagaagtaaaagctgaagagaaatcaccaatctccattaatgtgaagacagtcaaaaaagaacctgaggatagacaacaggcttccaaaagcccttacaatggtgtaagaaaagacagcaagagaagtagaaatagcagaagtgcaagtcgatcgaggtcaagaacacgatcacgttctagatcacatactccaagaagacactataataataggcggagtcgatctggaacatacagctcgagatcaagaagcaggtcccgcagtcacagtgaaagccctcgaagacatcataatcatggttctcctcaccttaaggccaagcataccagagatgatttaaaaagttcaaacagacatggtcataaaaggaaaaaatctcgttctcgatctcagagcaagtctcgggatcactcagatgcagccaagaaacacaggcatgaaaggggacatcatagggacaggcgtgaacgatctcgctcctttgagaggtcccataaaagcaagcaccatggtggcagtcgctcaggacatggcaggcacaggcgctgactttctcttcctttgagcctgcatcagttcttggttttgcctatctacagtgtgatgtatggactcaatcaaaaacattaaacgcaaactgattaggatttgatttcttgaaaccctctaggtctctagaacactgaggacagtttcttttgaaaagaactatgttaatttttttgcacattaaaatgccctagcagtatctaattaaaaaccatggtcaggttcaattgtactttattatagttgtgtattgtttattgctataagaactggagcgtgaattctgtaaaaatgtatcttatttttatacagataaaattgcagacactgttctatttaagtggttatttgtttaaatgatggtgaatactttcttaacactggtttgtctgcatgtgtaaagatttttacaaggaaataaaatacaaatcttgttttttctaaa

SEQ ID NO: 123573 - DNA, 793 bp, Homo sapiens
  Payload ID: 4259
  Gene Symbol: CCNL1
  Gene Name: cyclin L1
  Uniprot ID: Q9UK58
  ENST ID: ENST00000465947
  CDS Start-End: 43-561
gggttccggctgcgttgggcttgcgtgcggctcgctaagactatggcgtccgggcctcattcgacagctactgctgccgcagccgcctcatcggccgccccaagcgcgggcggctccagctccgggacgacgaccacgacgacgaccacgacgggagggatcctgatcggcgatcgcctgtactcggaagtttcacttaccatcgaccactctctgattccggaggagaggctctcgcccaccccatccatgcaggatgggctcgacctgcccagtgagacggacttacgcatcctgggctgcgagctcatccaggccgccggcattctcctccggctgccgcaggtggcgatggcaacggggcaggtgttgtttcatcgttttttctactccaaatctttcgtcaaacacagtttcgagattgttgctatggcttgtattaatcttgcatcaaaaatcgaagaagcacctagaagaataagagatgtgattaatgtattccaccacctccgccagttaagaggaaaaagcgaccagctacatttaccaaagcctgggtgatgtggagtggtacatagagatgaagctgtcgtcatggcaacagtgagactccaagccccctgatccttgatcagaactacattaacaccaaaaatcaagttatcaaagcagagaggagggtgctaaaggagttgggattttgtgttcatgtcaagcatcctcataagatcattgttatgtatttacaagtcttagaatgtgaacgtaatcaaaccctggttcaaactgcctg

SEQ ID NO: 123574 - DNA, 1464 bp, Homo sapiens
  Payload ID: 4259
  Gene Symbol: CCNL1
  Gene Name: cyclin L1
  Uniprot ID: Q9UK58
  ENST ID: ENST00000477127
  CDS Start-End: 85-603
gggaatatccgtcgcgccgagaacgctggttagtcttgtttcgggttccggctgcgttgggcttgcgtgcggctcgctaagactatggcgtccgggcctcattcgacagctactgctgccgcagccgcctcatcggccgccccaagcgcgggcggctccagctccgggacgacgaccacgacgacgaccacgacgggagggatcctgatcggcgatcgcctgtactcggaagtttcacttaccatcgaccactctctgattccggaggagaggctctcgcccaccccatccatgcaggatgggctcgacctgcccagtgagacggacttacgcatcctgggctgcgagctcatccaggccgccggcattctcctccggctgccgcaggtggcgatggcaacggggcaggtgttgtttcatcgttttttctactccaaatctttcgtcaaacacagtttcgagattgttgctatggcttgtattaatcttgcatcaaaaatcgaagaagcacctagaagaataagagatgtgattaatgtattccaccacctccgccagttaagaggaaaaagcgaccagctacatttaccaaagcctgggtgatgtggagtggtacatagagatgaagctgtcgtcatggcaacagtgagtgaagtatcgaaaatccccaaggagaagccagtgctctgagaataggtcactggaatcggggactaacaggactccaagccccctgatccttgatcagaactacattaacaccaaaaatcaagttatcaaagcagagaggagggtgctaaaggagttgggattttgtgttcatgtcaagcatcctcataagatcattgttatgtatttacaagtcttagaatgtgaacgtaatcaaaccctggttcaaactgcctggaattacatgaatgacagtcttcgaaccaatgtgtttgttcgatttcaaccagagactatagcatgtgcttgcatctaccttgcagctagagcacttcagattccgttgccaactcgtccccattggtttcttctttttggtactacagaagaggaaatccaggaaatctgcatagaaacacttaggctttataccagaaaaaagccaaactatgaattactggaaaaagaagtagaaaaaagaaaagtagccttacaagaagccaaattaaaagcaaagggattgaatccggatggaactccagccctttcaaccctgggtggattttctccagcctccaagccatcatcaccaagagaagtaaaagctgaagagaaatcaccaatctccattaatgtgaagacagtcaaaaaagaacctgaggatagacaacaggcttccaaaagcccttacaatggtgtaagaaaagacagcaagagaagtagaaatagcagaagtgcaagtcgatcgaggtcaagaacacgatcacgttctagatcacatactccaagaagaca

SEQ ID NO: 123575 - DNA, 1998 bp, Homo sapiens
  Payload ID: 4259
  Gene Symbol: CCNL1
  Gene Name: cyclin L1
  ENST ID: ENST00000461804
  CDS Start-End: 667-1953
atgcctccgccctacttccccatactggcaaaaacacgctccccggggagctttcatttgggaaccgatagggtccacagccctgtgttcttcaaatactgtaaagcagccctctccagattccttgagggtcactttatattacacattcgtccacacaggacaacaaagtcaccacttccacccgccaaagcgcgctcaggtcggccgccacttcccttggtacacgcggaacgcaagccgcgccgaggctaaaggaagaggccggaatgcagggcgaaggggcgcagagatgctagccaatgctgccacctctattttgggtataagggatcttgtaaagctccgttattcgtgtggctatcacaaacaaggtggtttcgaccggccttggctagagaaggcctcctcagcctctgaggatcccaaggtctgtcgcagcacccaacactcccctcgcaggcccagatgccgagggcggaggcgcggcctggagggactagttggcgcgcggctgcccggcgtggtgacgtcagggcggaagcgcacgcggcgtgaagcggcccagaacccggcggtcacgggaatatccgtcgcgccgagaacgctggttagtcttgtttcgggttccggctgcgttgggcttgcgtgcggctcgctaagactatggcgtccgggcctcattcgacagctactgctgccgcagccgcctcatcggccgccccaagcgcgggcggctccagctccgggacgacgaccacgacgacgaccacgacgggagggatcctgatcggcgatcgcctgtactcggaagtttcacttaccatcgaccactctctgattccggaggagaggctctcgcccaccccatccatgcaggatgggctcgacctgcccagtgagacggacttacgcatcctgggctgcgagctcatccaggccgccggcattctcctccggctgccgcaggtggcgatggcaacggggcaggtgttgtttcatcgttttttctactccaaatctttcgtcaaacacagtttcgagattgttgctatggcttgtattaatcttgcatcaaaaatcgaagaagcacctagaagaataagagatgtgattaatgtattccaccacctccgccagttaagaggaaaaaggactccaagccccctgatccttgatcagaactacattaacaccaaaaatcaagttatcaaagcagagaggagggtgctaaaggagttgggattttgtgttcatgtcaagcatcctcataagatcattgttatgtatttacaagtcttagaatgtgaacgtaatcaaaccctggttcaaactgcctggaattacatgaatgacagtcttcgaaccaatgtgtttgttcgatttcaaccagagactatagcatgtgcttgcatctaccttgcagctagagcacttcagattccgttgccaactcgtccccattggtttcttctttttggtactacagaagaggaaatccaggaaatctgcatagaaacacttaggctttataccagaaaaaagccaaactatgaattactggaaaaagaagtagaaaaaagaaaagtagccttacaagaagccaaattaaaagcaaagggattgaatccggatggaactccagccctttcaaccctgggtggattttctccagcctccaagccatcatcaccaagagaagtaaaagctgaagagaaatcaccaatctccattaatgtgaagacagtcaaaaaagaacctgaggatagacaacaggcttccaaaagcccttacaatggtgtaagaaaagacagcaagagaagtagaaatagcagaagtgcaagtcgatcgaggtcaagaacacgatcacgttctagatcacatactccaagaagacaagacgaggtcttgctacgttgcccaggtcggtcacgaactcctggcctcaagtgatcctcccacctcagcctcccaagtattaaattcttaatagtgttg

SEQ ID NO: 123576 - DNA, 2457 bp, Homo sapiens
  Payload ID: 4259
  Gene Symbol: CCNL1
  Gene Name: cyclin L1
  Uniprot ID: Q9UK58
  ENST ID: ENST00000631619
  CDS Start-End: 270-788
gagaaggcctcctcagcctctgaggatcccaaggtctgtcgcagcacccaacactcccctcgcaggcccagatgccgagggcggaggcgcggcctggagggactagttggcgcgcggctgcccggcgtggtgacgtcagggcggaagcgcacgcggcgtgaagcggcccagaacccggcggtcacgggaatatccgtcgcgccgagaacgctggttagtcttgtttcgggttccggctgcgttgggcttgcgtgcggctcgctaagactatggcgtccgggcctcattcgacagctactgctgccgcagccgcctcatcggccgccccaagcgcgggcggctccagctccgggacgacgaccacgacgacgaccacgacgggagggatcctgatcggcgatcgcctgtactcggaagtttcacttaccatcgaccactctctgattccggaggagaggctctcgcccaccccatccatgcaggatgggctcgacctgcccagtgagacggacttacgcatcctgggctgcgagctcatccaggccgccggcattctcctccggctgccgcaggtggcgatggcaacggggcaggtgttgtttcatcgttttttctactccaaatctttcgtcaaacacagtttcgagattgttgctatggcttgtattaatcttgcatcaaaaatcgaagaagcacctagaagaataagagatgtgattaatgtattccaccacctccgccagttaagaggaaaaagcgaccagctacatttaccaaagcctgggtgatgtggagtggtacatagagatgaagctgtcgtcatggcaacagtgagtgaagtatcgaaaatccccaaggagaagccagtgctctgagaataggtcactggaatcggggactaacaggactccaagccccctgatccttgatcagaactacattaacaccaaaaatcaagttatcaaagcagagaggagggtgctaaaggagttgggattttgtgttcatgtcaagcatcctcataagatcattgttatgtatttacaagtcttagaatgtgaacgtaatcaaaccctggttcaaactgcctgggtagtccatgatggaattacatgaatgacagtcttcgaaccaatgtgtttgttcgatttcaaccagagactatagcatgtgcttgcatctaccttgcagctagagcacttcagattccgttgccaactcgtccccattggtttcttctttttggtactacagaagaggaaatccaggaaatctgcatagaaacacttaggctttataccagaaaaaagccaaactatgaattactggaaaaagaagtagaaaaaagaaaagtagccttacaagaagccaaattaaaagcaaagggattgaatccggatggaactccagccctttcaaccctgggtggattttctccagcctccaagccatcatcaccaagagaagtaaaagctgaagagaaatcaccaatctccattaatgtgaagacagtcaaaaaagaacctgaggatagacaacaggcttccaaaagcccttacaatggtgtaagaaaagacagcaagagaagtagaaatagcagaagtgcaagtcgatcgaggtcaagaacacgatcacgttctagatcacatactccaagaagacactataataataggcggagtcgatctggaacatacagctcgagatcaagaagcaggtcccgcagtcacagtgaaagccctcgaagacatcataatcatggttctcctcaccttaaggccaagcataccagagatgatttaaaaagttcaaacagacatggtcataaaaggaaaaaatctcgttctcgatctcagagcaagtctcgggatcactcagatgcagccaagaaacacaggcatgaaaggggacatcatagggacaggcgtgaacgatctcgctcctttgagaggtcccataaaagcaagcaccatggtggcagtcgctcaggacatggcaggcacaggcgctgactttctcttcctttgagcctgcatcagttcttggttttgcctatctacagtgtgatgtatggactcaatcaaaaacattaaacgcaaactgattaggatttgatttcttgaaaccctctaggtctctagaacactgaggacagtttcttttgaaaagaactatgttaatttttttgcacattaaaatgccctagcagtatctaattaaaaaccatggtcaggttcaattgtactttattatagttgtgtattgtttattgctataagaactggagcgtgaattctgtaaaaatgtatcttatttttatacagataaaattgcagacactgttctatttaagtggttatttgtttaaatgatggtgaatactttcttaacactggtttgtctgcatgtgtaaagatttttacaaggaaataaaatacaaatcttgttttttctaaa

SEQ ID NO: 123577 - DNA, 2305 bp, Homo sapiens
  Payload ID: 4260
  Gene Symbol: CCNL2
  Gene Name: cyclin L2
  Uniprot ID: Q96S94
  ENST ID: ENST00000400809
  CDS Start-End: 7-1569
cacaaaatggcggcggcggcggcggcggctggtgctgcagggtcggcagctcccgcggcagcggccggcgccccgggatctgggggcgcaccctcagggtcgcagggggtgctgatcggggacaggctgtactccggggtgctcatcaccttggagaactgcctcctgcctgacgacaagctccgtttcacgccgtccatgtcgagcggcctcgacaccgacacagagaccgacctccgcgtggtgggctgcgagctcatccaggcggccggtatcctgctccgcctgccgcaggtggccatggctaccgggcaggtgttgttccagcggttcttttataccaagtccttcgtgaagcactccatggagcatgtgtcaatggcctgtgtccacctggcttccaagatagaagaggccccaagacgcatacgggacgtcatcaatgtgtttcaccgccttcgacagctgagagacaaaaagaagcccgtgcctctactactggatcaagattatgttaatttaaagaaccaaattataaaggcggaaagacgagttctcaaagagttgggtttctgcgtccatgtgaagcatcctcataagataatcgttatgtaccttcaggtgttagagtgtgagcgtaaccaacacctggtccagacctcatggaattacatgaacgacagccttcgcaccgacgtcttcgtgcggttccagccagagagcatcgcctgtgcctgcatttatcttgctgcccggacgctggagatccctttgcccaatcgtccccattggtttcttttgtttggagcaactgaagaagaaattcaggaaatctgcttaaagatcttgcagctttatgctcggaaaaaggttgatctcacacacctggagggtgaagtggaaaaaagaaagcacgctatcgaagaggcaaaggcccaagcccggggcctgttgcctgggggcacacaggtgctggatggtacctcggggttctctcctgcccccaagctggtggaatcccccaaagaaggtaaagggagcaagccttccccactgtctgtgaagaacaccaagaggaggctggagggcgccaagaaagccaaggcggacagccccgtgaacggcttgccaaaggggcgagagagtcggagtcggagccggagccgtgagcagagctactcgaggtccccatcccgatcagcgtctcctaagaggaggaaaagtgacagcggctccacatctggtgggtccaagtcgcagagccgctcccggagcaggagtgactccccaccgagacaggccccccgcagcgctccctacaaaggctctgagattcggggctcccggaagtccaaggactgcaagtacccccagaagccacacaagtctcggagccggagttcttcccgttctcgaagcaggtcacgggagcgggcggataatccgggaaaatacaagaagaaaagtcattactacagagatcagcgacgagagcgctcgaggtcgtatgaacgcacaggccgtcgctatgagcgggaccaccctgggcacagcaggcatcggaggtgaggcggggttgcagtgactggtggccgcaagcccttccctggggagtacctgatggctgccctttgacccccggtggctgccctttgacccccgggtgtgctctcagcgcaagtggtcctagaacaggattctttttggaaatgtctgtcgactggaccttggtggatttggaaatggaactgagggaccggtgacacgtgcttcagaccggtctggggtgcggcgcacacctgggcccgtgcagggctcagctcggcagcagctctgagggcagctcaatgaaaaagtgaatgcacacgcccttgttggcgtggcctggcatggcctggtgctatcggcagccgctctccactccccgactgatactcaattacgtgaagccaagaaagatgatttttagaacctttgcctatattaggttgtacttatgtacatattttgcagtgtttcacaggagaaagtggccttaactgccccttattctctctccacgttgtaaataaacatgtgtttaatacaagttaaagctatgtatgaaaactcagaacttgaatcccgtcagcttaaaacttgtgtagggaatcctgacttttaaaatgtgagggtatttggatctgtgttgaaagtcgtatatttttatctgtgcggtgctgagtgcaggccaccagctcctaaatagaggttccctatatgcgcgtatgacatggtgaataaacacaactctctccactcagga

SEQ ID NO: 123578 - DNA, 1857 bp, Homo sapiens
  Payload ID: 4260
  Gene Symbol: CCNL2
  Gene Name: cyclin L2
  ENST ID: ENST00000408952
  CDS Start-End: 86-1129
attttctctagataatgcaggcggaagacctgggttcccgggtggggcattgcagttcttcctgtgtttggcttccaggaattacatgaacgacagccttcgcaccgacgtcttcgtgcggttccagccagagagcatcgcctgtgcctgcatttatcttgctgcccggacgctggagatccctttgcccaatcgtccccattggtttcttttgtttggagcaactgaagaagaaattcaggaaatctgcttaaagatcttgcagctttatgctcggaaaaaggttgatctcacacacctggagggtgaagtggaaaaaagaaagcacgctatcgaagagggcccaagcccggggcctgttgcctgggggcacacaggtgctggatggtacctcggggttctctcctgcccccaagctgggtgctgggattacagcctggagtgcagtggcgctatctgggatcactgcaagctccgcctaccagattctggtgattcttgtgcctcagcctcccaagtagctgggattgcaggcgcccaccaccacgctcagagtctcgctgtgttgccagtggaatcccccaaagaaggtaaagggagcaagccttccccactgtctgtgaagaacaccaagaggaggctggagggcgccaagaaagccaaggcggacagccccgtgaacggcttgccaaaggggcgagagagtcggagtcggagccggagccgtgagcagagctactcgaggtccccatcccgatcagcgtctcctaagaggaggaaaagtgacagcggctccacatctggtgggtccaagtcgcagagccgctcccggagcaggagtgactccccaccgagacaggccccccgcagcgctccctacaaaggctctgagattcggggctcccggaagtccaaggactgcaagtacccccagaagccacacaagtctcggagccggagttcttcccgttctcgaagcaggtcacgggagcgggcggataatccgggaaaatacaagaagaaaagtcattactacagagatcagcgacgagagcgctcgaggtcgtatgaacgcacaggccgtcgctatgagcgggaccaccctgggcacagcaggcatcggaggtgaggcggggttgcagtgactggtggccgcaagcccttccctggggagtacctgatggctgccctttgacccccggtggctgccctttgacccccgggtgtgctctcagcgcaagtggtcctagaacaggattctttttggaaatgtctgtcgactggaccttggtggatttggaaatggaactgagggaccggtgacacgtgcttcagaccggtctggggtgcggcgcacacctgggcccgtgcagggctcagctcggcagcagctctgagggcagctcaatgaaaaagtgaatgcacacgcccttgttggcgtggcctggcatggcctggtgctatcggcagccgctctccactccccgactgatactcaattacgtgaagccaagaaagatgatttttagaacctttgcctatattaggttgtacttatgtacatattttgcagtgtttcacaggagaaagtggccttaactgccccttattctctctccacgttgtaaataaacatgtgtttaatacaagttaaagctatgtatgaaaactcagaacttgaatcccgtcagcttaaaacttgtgtagggaatcctgacttttaaaatgtgagggtatttggatctgtgttgaaagtcgtatatttttatctgtgcggtgctgagtgcaggccaccagctcctaaatagaggttccctatatgcgcgtatgacatggtgaataaacacaactctctcc

SEQ ID NO: 123579 - DNA, 1186 bp, Homo sapiens
  Payload ID: 4260
  Gene Symbol: CCNL2
  Gene Name: cyclin L2
  Uniprot ID: Q96S94
  ENST ID: ENST00000408918
  CDS Start-End: 12-692
ggcggcacaaaatggcggcggcggcggcggcggctggtgctgcagggtcggcagctcccgcggcagcggccggcgccccgggatctgggggcgcaccctcagggtcgcagggggtgctgatcggggacaggctgtactccggggtgctcatcaccttggagaactgcctcctgcctgacgacaagctccgtttcacgccgtccatgtcgagcggcctcgacaccgacacagagaccgacctccgcgtggtgggctgcgagctcatccaggcggccggtatcctgctccgcctgccgcaggtggccatggctaccgggcaggtgttgttccagcggttcttttataccaagtccttcgtgaagcactccatggagcatgtgtcaatggcctgtgtccacctggcttccaagatagaagaggccccaagacgcatacgggacgtcatcaatgtgtttcaccgccttcgacagctgagagacaaaaagaagcccgtgcctctactactggatcaagattatgttaatttaaagaaccaaattataaaggcggaaagacgagttctcaaagagttgggtttctgcgtccatgtgaagcatcctcataagataatcgttatgtaccttcaggtgttagagtgtgagcgtaaccaacacctggtccagacctcatgggtagcctctgagggtaagtgactaagacttctcctctgctgtccaagcgctttggtgcagggacagcggcatcttcagccaatccagtgcaggctctccaccgaaggctggctctagactggtggtacgcacatagcatagccatggccgactcctgctgtggttctctgacgattgtgcttcttgttaatcctctgtcgtgctttggtaatcgtattgattagagttggtaactgtcttgacttgaattttgtccctttaaaactgctgtacctgtatgataaagatgcagtacctttctcttaaaaaaaaatgctatggaaagctgtgagaattgaagagacaaattggctgtgtcagtgtggggttatgtcatgatttctagaagccctgaagttgctcttttgagcagctttgcatgacacgctctggtaaaaggtgtgcatctttaaattatttcatggatactttgaaaaatattgtatcacttcaaatacagcaataagtttatatgt

SEQ ID NO: 123580 - DNA, 661 bp, Homo sapiens
  Payload ID: 4260
  Gene Symbol: CCNL2
  Gene Name: cyclin L2
  ENST ID: ENST00000425598
  CDS Start-End: 20-562
ggggagtcggcggcacaaaatggcggcggcggcggcggcggctggtgctgcagggtcggcagctcccgcggcagcggccggcgccccgggatctgggggcgcaccctcagggtcgcagggggtgctgatcggggacaggctgtactccggggtgctcatcaccttggagaactgcctcctgcctgacgacaagctccgtttcacgccgtccatgtcgagcggcctcgacaccgacacagagaccgacctccgcgtggtgggctgcgagctcatccaggcggccggtatcctgctccgcctgccgcaggtgagggcgcggccgcgagcctccggcccaggtggccatggctaccgggcaggtgttgttccagcggttcttttataccaagtccttcgtgaagcactccatggagcatgtgtcaatggcctgtgtccacctggcttccaagatagaagaggccccaagacgcatacgggacgtcatcaatgtgtttcaccgccttcgacagctgagagacaaaaagaagcccgtgcctctactactggatcaagattatgttaatttaaagaaccaaattataaaggcggaaagacgagttctcaaagagttgggtttctgcgtccatgtgaagcatcctcataagataatcgttatgtacct

SEQ ID NO: 123581 - DNA, 2815 bp, Homo sapiens
  Payload ID: 4260
  Gene Symbol: CCNL2
  Gene Name: cyclin L2
  ENST ID: ENST00000481223
  CDS Start-End: 6-716
acaaaatggcggcggcggcggcggcggctggtgctgcagggtcggcagctcccgcggcagcggccggcgccccgggatctgggggcgcaccctcagggtcgcagggggtgctgatcggggacaggctgtactccggggtgctcatcaccttggagaactgcctcctgcctgacgacaagctccgtttcacgccgtccatgtcgagcggcctcgacaccgacacagagaccgacctccgcgtggtgggctgcgagctcatccaggcggccggtatcctgctccgcctgccgcaggtggccatggctaccgggcaggtgttgttccagcggttcttttataccaagtccttcgtgaagcactccatggagcatgtgtcaatggcctgtgtccacctggcttccaagatagaagaggccccaagacgcatacgggacgtcatcaatgtgtttcaccgccttcgacagctgagagacaaaaagaagcccgtgcctctactactggatcaagattatgttaatttaaagaaccaaattataaaggcggaaagacgagttctcaaagagttgggtttctgcgtccatgtgaagcatcctcataagataatcgttatgtaccttcaggtgttagagtgtgagcgtaaccaacacctggtccagacctcatgggtagcctctgaggaccccttgttgaaatgggacagttggcagcggctctgatgagcccgagaagaggcctgcccttgggtgcggagtctccctccgcacgatgctcccacgcgtccaacttgcacccaaggggcttttccctcttccaagtggactccttcaaggaagctgcagctcggtcagcagagaaggggcctgccgccagcgccctggaggaagaggaagaggaacccaagaggatggcttgtctcccagcagccacaccggctttgtgctcagccagttcatttgagtttgcatgtttctctgcactatggattttgagcatttagatttctttaatcaaaagcgttttagtgactccagtagacattttctttctgaggcatcgtgctttgcatgagagcaggccaaggttgaggggaaaagtaaagttaaagtcggttctctttcatagcaacacgtattgtctgacattcagccagctttttttttttctaataatttctgtgcctttctgtcctgtatttactgtatttagaaaaagcagctagaatatttctccattaactcttgagattcacaggactgtctagctctgagtcctagcaatagactccttagaggagtagtacgtttatctagattttctctagataatgcaggcggaagacctgggttcccgggtggggcattgcagttcttcctgtgtttggcttccaggaattacatgaacgacagccttcgcaccgacgtcttcgtgcggttccagccagagagcatcgcctgtgcctgcatttatcttgctgcccggacgctggagatccctttgcccaatcgtccccattggtttcttttgtttggagcaactgaagaagaaattcaggaaatctgcttaaagatcttgcagctttatgctcggaaaaaggttgatctcacacacctggagggtgaagtggaaaaaagaaagcacgctatcgaagaggcaaaggcccaagcccggggcctgttgcctgggggcacacaggtgctggatggtacctcggggttctctcctgcccccaagctggtggaatcccccaaagaaggtaaagggagcaagccttccccactgtctgtgaagaacaccaagaggaggctggagggcgccaagaaagccaaggcggacagccccgtgaacggcttgccaaaggggcgagagagtcggagtcggagccggagccgtgagcagagctactcgaggtccccatcccgatcagcgtctcctaagaggaggaaaagtgacagcggctccacatctggtgggtccaagtcgcagagccgctcccggagcaggagtgactccccaccgagacaggccccccgcagcgctccctacaaaggctctgagattcggggctcccggaagtccaaggactgcaagtacccccagaagccacacaagtctcggagccggagttcttcccgttctcgaagcaggtcacgggagcgggcggataatccgggaaaatacaagaagaaaagtcattactacagagatcagcgacgagagcgctcgaggtcgtatgaacgcacaggccgtcgctatgagcgggaccaccctgggcacagcaggcatcggaggtgaggcggggttgcagtgactggtggccgcaagcccttccctggggagtacctgatggctgccctttgacccccggtggctgccctttgacccccgggtgtgctctcagcgcaagtggtcctagaacaggattctttttggaaatgtctgtcgactggaccttggtggatttggaaatggaactgagggaccggtgacacgtgcttcagaccggtctggggtgcggcgcacacctgggcccgtgcagggctcagctcggcagcagctctgagggcagctcaatgaaaaagtgaatgcacacgcccttgttggcgtggcctggcatggcctggtgctatcggcagccgctctccactccccgactgatactcaattacgtgaagccaagaaagatgatttttagaacctttgcctatattaggttgtacttatgtacatattttgcagtgtttcacaggagaaagtggccttaactgccccttattctctctccacgttgtaaataaacatgtgtttaatacaagtt

SEQ ID NO: 123582 - DNA, 1598 bp, Homo sapiens
  Payload ID: 4260
  Gene Symbol: CCNL2
  Gene Name: cyclin L2
  ENST ID: ENST00000488340
  CDS Start-End: 23-706
gaaggggagtcggcggcacaaaatggcggcggcggcggcggcggctggtgctgcagggtcggcagctcccgcggcagcggccggcgccccgggatctgggggcgcaccctcagggtcgcagggggtgctgatcggggacaggctgtactccggggtgctcatcaccttggagaactgcctcctgcctgacgacaagctccgtttcacgccgtccatgtcgagcggcctcgacaccgacacagagaccgacctccgcgtggtgggctgcgagctcatccaggcggccggtatcctgctccgcctgccgcaggtggccatggctaccgggcaggtgttgttccagcggttcttttataccaagtccttcgtgaagcactccatggagcatgtgtcaatggcctgtgtccacctggcttccaagatagaagaggccccaagacgcatacgggacgtcatcaatgtgtttcaccgccttcgacagctgagagacaaaaagaagcccgtgcctctactactggatcaagattatgttaatttaaagaaccaaattataaaggcggaaagacgagttctcaaagagttgggtttctgcgtccatgtgaagcatcctcataagataatcgttatgtaccttcaggtgttagagtgtgagcgtaaccaacacctggtccagacctcatgggtagcctctgagggaattacatgaacgacagccttcgcaccgacgtcttcgtgcggttccagccagagagcatcgcctgtgcctgcatttatcttgctgcccggacgctggagatccctttgcccaatcgtccccattggtttcttttgtttggagcaactgaagaagaaattcaggaaatctgcttaaagatcttgcagctttatgctcggaaaaaggttgatctcacacacctggagggtgaagtggaaaaaagaaagcacgctatcgaagaggcaaaggcccaagcccggggcctgttgcctgggggcacacaggtgctggatggtacctcggggttctctcctgcccccaagctggtggaatcccccaaagaaggtaaagggagcaagccttccccactgtctgtgaagaacaccaagaggaggctggagggcgccaagaaagccaaggcggacagccccgtgaacggcttgccaaaggggcgagagagtcggagtcggagccggagccgtgagcagagctactcgaggtccccatcccgatcagcgtctcctaagaggaggaaaagtgacagcggctccacatctggtgggtccaagtcgcagagccgctcccggagcaggagtgactccccaccgagacaggccccccgcagcgctccctacaaaggctctgagattcggggctcccggaagtccaaggactgcaagtacccccagaagccacacaagtctcggagccggagttcttcccgttctcgaagcaggtcacgggagcgggcggataatccgggaaaatacaagaagaaaagtcattactacagagatcagcgacgagagcgctcgaggtcgtatgaacgcacaggccgtcgctatgagcgggaccaccctgggcacagcaggcatcggaggtg

SEQ ID NO: 123583 - DNA, 2059 bp, Homo sapiens
  Payload ID: 4260
  Gene Symbol: CCNL2
  Gene Name: cyclin L2
  ENST ID: ENST00000482621
  CDS Start-End: 1-139
agaagaggccccaagacgcatacgggacgtcatcaatgtgtttcaccgccttcgacagctgagagacaaaaaaccctgtgctctctctctggcaggaagcccgtgcctctactactggatcaagattatgttaatttaaagaaccaaattataaaggcggaaagacgagttctcaaagagttgggtttctgcgtccatgtgaagcatcctcataagataatcgttatgtaccttcaggtgttagagtgtgagcgtaaccaacacctggtccagacctcatgggtagcctctgagggtaagtgactaagacttctcctctgctgtccaagcgctttggtgcagggacagcggcatcttcagccaatccagtgcaggctctccaccgaaggctggctctagactggtggaattacatgaacgacagccttcgcaccgacgtcttcgtgcggttccagccagagagcatcgcctgtgcctgcatttatcttgctgcccggacgctggagatccctttgcccaatcgtccccattggtttcttttgtttggagcaactgaagaagaaattcaggaaatctgcttaaagatcttgcagctttatgctcggaaaaaggttgatctcacacacctggagggtgaagtggaaaaaagaaagcacgctatcgaagaggcaaaggcccaagcccggggcctgttgcctgggggcacacaggtgctggatggtacctcggggttctctcctgcccccaagctggtggaatcccccaaagaaggtaaagggagcaagccttccccactgtctgtgaagaacaccaagaggaggctggagggcgccaagaaagccaaggcggacagccccgtgaacggcttgccaaaggggcgagagagtcggagtcggagccggagccgtgagcagagctactcgaggtccccatcccgatcagcgtctcctaagaggaggaaaagtgacagcggctccacatctggtgggtccaagtcgcagagccgctcccggagcaggagtgactccccaccgagacaggccccccgcagcgctccctacaaaggctctgagattcggggctcccggaagtccaaggactgcaagtacccccagaagccacacaagtctcggagccggagttcttcccgttctcgaagcaggtcacgggagcgggcggataatccgggaaaatacaagaagaaaagtcattactacagagatcagcgacgagagcgctcgaggtcgtatgaacgcacaggccgtcgctatgagcgggaccaccctgggcacagcaggcatcggaggtgaggcggggttgcagtgactggtggccgcaagcccttccctggggagtacctgatggctgccctttgacccccggtggctgccctttgacccccgggtgtgctctcagcgcaagtggtcctagaacaggattctttttggaaatgtctgtcgactggaccttggtggatttggaaatggaactgagggaccggtgacacgtgcttcagaccggtctggggtgcggcgcacacctgggcccgtgcagggctcagctcggcagcagctctgagggcagctcaatgaaaaagtgaatgcacacgcccttgttggcgtggcctggcatggcctggtgctatcggcagccgctctccactccccgactgatactcaattacgtgaagccaagaaagatgatttttagaacctttgcctatattaggttgtacttatgtacatattttgcagtgtttcacaggagaaagtggccttaactgccccttattctctctccacgttgtaaataaacatgtgtttaatacaagttaaagctatgtatgaaaactcagaacttgaatcccgtcagcttaaaacttgtgtagggaatcctgacttttaaaatgtgagggtatttggatctgtgttgaaagtcgtatatttttatctgtgcggtgctgagtgcaggccaccagctcctaaatagaggttccctatatgcgcgtatgacatggtgaataaacacaactctctccactcaggacatccggagcgtt

SEQ ID NO: 123584 - DNA, 548 bp, Homo sapiens
  Payload ID: 4260
  Gene Symbol: CCNL2
  Gene Name: cyclin L2
  ENST ID: ENST00000497013
  CDS Start-End: 292-548
gcggcgagtcgggcccgcaccgcccccgcctagaccccgaccccagcccctgccccgaccccagcctcggcgccattccctagccagcccatgcccctgacccggggcctccccgcccgccagtgcgctggatcccgagacggcgggacgcgaagagcctttgtggacgtgggaagcgtttcagtgtttggttctgcgtggggagtcccacgttactcgatgactttcggccgcgaaggctttgaatggtgcgtttgaaaatacggaaactttcttctactctaggtggccatggctaccgggcaggtgttgttccagcggttcttttataccaagtccttcgtgaagcactccatggagcatgtgtcaatggcctgtgtccacctggcttccaagatagaagaggccccaagacgcatacgggacgtcatcaatgtgtttcaccgccttcgacagctgagagacaaaaagaagcccgtgcctctactactggatcaagattatgttaatttaaagaaccaaattataaaggcggaaagacgagttct

SEQ ID NO: 123585 - DNA, 2369 bp, Homo sapiens
  Payload ID: 4261
  Gene Symbol: CNTD1
  Gene Name: cyclin N-terminal domain containing 1
  Uniprot ID: Q8N815
  ENST ID: ENST00000588408
  CDS Start-End: 277-1269
agagccgcggttcccgggcacaggggatggacgcgggaggtgagaagcggacgtgctttctgattggctgaggagtccgtggccgttggggcgggaaaaagctgtggagggttcgaggctgtggtggtaattgggttttcctcagacttgaggcgacgacacactcattggaaggggacgaggaatccagggtgtggcagaagactggagaggagctaagggggtcggtatgtggatccagtgaacccgtccaggtgccccaagaggctcgtgaatatggacggacccatgaggccacgatcggcctccctcgttgactttcagtttggagttgtcgccacagagacgattgaagacgccctgcttcacttggcccagcagaatgagcaagcagtgagggaggcttcggggcggctgggccgcttcagggagccccagatcgtggagtttgtttttctcctgtctgaacaatggtgtctggagaaatctgtgagctaccaggctgtagaaatcctagaaaggtttatggtaaaacaggcagagaacatctgcaggcaagccacaatccagccaagagataataagagagagtctcagaattggagggctctgaaacagcagcttgtcaacaagtttactctccgtcttgtgtcatgtgttcagctggccagcaaactttccttccgaaacaaaataatcagcaacattacagtcttgaatttcctccaggctctaggctatctacacactaaagaagaactgctggaatcagagcttgatgttttgaagtccttgaacttccgaattaatctgcccactcccctggcatatgtggagacgctcctagaggttttaggatacaatggctgtttggttccagccatgaggctgcatgcaacctgcctgacactgctcgacctggtctatcttctgcatgaacccatatatgagagcctgttgagggcttcaattgagaactccactcccagtcagctgcaaggggaaaagtttacttcagtgaaggaagacttcatgctgttggcagtaggaatcattgcagcaagtgctttcatccaaaaccatgagtgttggagccaggttgtggggcatttgcagagcatcactggtattgccttggcaagcattgctgagttctcttatgcaatcctgactcacggagtgggagccaacactccggggagacagcagtctattcctccccacctggcagccagagctctgaagactgttgcttcctctaacacatgagggaggctgaatccaccaaatataaacagccatccgtcactgcactcatgcctccctctgtttactttcatactaagggtacaaaaattccaagtctcttttgaactgtattttgtatgccaatttcatgcttatttttcctttatcagagagagttaaggtggacgagcatgccctttttgtcatatcagcctgaaaatgttaaaaagctaggtggagacagattagttgtttcatttttgtttaacaaggtatttatacttttagcttaatttcattaagaggaacatcaggcattgcaatcagtattaatcaggggctcaaatacagactatctgggtgaccttgactaagcatcaaggaggtagcctttatttccccttaaaattagtttaacatctctgttccattattcagatctacacaaacaaggcttcctcaacagctatctatttttactagagtctttttttaaaactaaaactaactctaaagaagtttcaacagaatttccacatacctgcattcattagaacttgattctcccagaatacaaagtactctattttaaagaaaaacccaacagtgcacccctgggcagttttcagactgcagcaaatcttttattacaaataattaaatctctccataatgtctcaaacagtatcaaacaccatttcatatctctaacacagagcagagtcggcattcagtataagaaccaagtgaaaagtgttaaatttcaagcatctgatcacatcacatggtgaccaggtaaagcttagatgtcattttcccacattatccaactgtgcatctcaaacatatcctcatctcagtaaagacaaaagtttctatttcatattgttaagtgcaggaagttgagagagataaaaatccagtgaaaacacatcaatctcaattcaactcagttaaaaaaaagaaaagcaaatttaaattagtttttttcagagaagaaagggaaaggagtccatggggttaagaatcaaaactgaccagggctggcaactatagatggcatgttgtagctctggaaagtatctgtcacatgatattttaaaataaagtggcttttgtgg

SEQ ID NO: 123586 - DNA, 547 bp, Homo sapiens
  Payload ID: 4261
  Gene Symbol: CNTD1
  Gene Name: cyclin N-terminal domain containing 1
  ENST ID: ENST00000585355
  CDS Start-End: 19-547
ggttcccgggcacaggggatggacgcgggagagtttgtttttctcctgtctgaacaatggtgtctggagaaatctgtgagctaccaggctgtagaaatcctagaaaggtttatggtaaaacaggcagagaacatctgcaggcaagccacaatccagccaagagataataagagagagtctcagaattggagggctctgaaacagcagcttgtcaacaagtttactctccgtcttgtgtcatgtgttcagctggccagcaaactttccttccgaaacaaaataatcagcaacattacagtcttgaatttcctccaggctctaggctatctacacactaaagaagaactgctggaatcagagcttgatgttttgaagtccttgaacttccgaattaatctgcccactcccctggcatatgtggagacgctcctagaggttttaggatacaatggctgtttggttccagccatgaggctgcatgcaacctgcctgacactgctcgacctggtctatcttctgcatgaacccatatatgagagcctgttga

SEQ ID NO: 123587 - DNA, 504 bp, Homo sapiens
  Payload ID: 4261
  Gene Symbol: CNTD1
  Gene Name: cyclin N-terminal domain containing 1
  ENST ID: ENST00000586652
  CDS Start-End: 1-342
acgctcctagaggttttaggatacaatggctgtttggttccagccatgaggctgcatgcaacctgcctgacactgctcgacctggtctatcttctgcatgaacccatatatgagagcctgttgagggcttcaattgagaactccactcccagtcagctgcaaggggaaaagtttacttcagtgaaggaagacttcatgctgttggcagtaggaatcattgcagcaagtgctttcatccaaaaccatgagtgttggagccaggtatgcaccactgagcaggaccagcatggttgtggggcatttgcagagcatcactggtattgccttggcaagcattgctgagttctcttatgcaatcctgactcacggagtgggagccaacactccggggagacagcagtctattcctccccacctggcagccagagctctgaagactgttgcttcctctaacacatgagggaggctgaatccaccaaatataaacagccatccgtcactgca

SEQ ID NO: 123588 - DNA, 904 bp, Homo sapiens
  Payload ID: 4261
  Gene Symbol: CNTD1
  Gene Name: cyclin N-terminal domain containing 1
  ENST ID: ENST00000592166
  CDS Start-End: 215-394
attggctgaggagtccgtggccgttggggcgggaaaaagctgtggagggttcgaggctgtggtggtaattgggttttcctcagacttgaggcgacgacacactcattggaaggggacgaggaatccagggtgtggcagaagactggagaggagctaagggggtcggtatgtggatccagtgaacccgtccaggtgccccaagaggctcgtgaatatggacggacccatgaggccacgatcggcctccctcgttgactttcagtttggagttgtcgccacagagacgattgaagacgccctgcttcacttggcccagcagaatgagcaagcagtgagggaggcttcggggcggctgggccgcttcagggagccccagatcgtgggtttatggtaaaacaggcagagaacatctgcaggcaagccacaatccagccaagagataataagagagagtctcagaattggagggctctgaaacagcagcttgtcaacaagtttactctccgtcttgtgtcatgtgttcagctggccagcaaactttccttccgaaacaaaataatcagcaacattacagtcttgaatttcctccaggctctaggctatctacacactaaagaagaactgctggaatcagagcttgatgttttgaagtccttgaacttccgaattaatctgcccactcccctggcatatgtggagacgctcctagaggttttaggatacaatggctgtttggttccagccatgaggctgcatgcaacctgcctgacactgctcgacctggtctatcttctgcatgaacccatatatgagagcctgttgagggcttcaattgagaactccactcccagtcagctgcaaggggaaaagtttacttcagtgaaggaagacttcatgctgttgg

SEQ ID NO: 123589 - DNA, 1308 bp, Homo sapiens
  Payload ID: 4261
  Gene Symbol: CNTD1
  Gene Name: cyclin N-terminal domain containing 1
  ENST ID: ENST00000588527
  CDS Start-End: 213-956
aaaaagctgtggagggttcgaggctgtggtggtaattgggttttcctcagacttgaggcgacgacacactcattggaaggggacgaggaatccagggtgtggcagaagactggagaggagctaagggggtcgagtttgtttttctcctgtctgaacaatggtgtctggagaaatctgtgagctaccaggctgtagaaatcctagaaaggtttatggtaaaacaggcagagaacatctgcaggcaagccacaatccagccaagagataataagagagagtctcagaattggagggctctgaaacagcagcttgtcaacaagtttactctccgtcttgtgtcatgtgttcagctggccagcaaactttccttccgaaacaaaataatcagcaacattacagtcttgaatttcctccaggctctaggctatctacacactaaagaagaactgctggaatcagagcttgatgttttgaagtccttgaacttccgaattaatctgcccactcccctggcatatgtggagacgctcctagaggttttaggatacaatggctgtttggttccagccatgaggctgcatgcaacctgcctgacactgctcgacctggtctatcttctgcatgaacccatatatgagagcctgttgagggcttcaattgagaactccactcccagtcagctgcaaggggaaaagtttacttcagtgaaggaagacttcatgctgttggcagtaggaatcattgcagcaagtgctttcatccaaaaccatgagtgttggagccaggttgtggggcatttgcagagcatcactggtattgccttggcaagcattgctgagttctcttatgcaatcctgactcacggagtgggagccaacactccggggagacagcagtctattcctccccacctggcagccagagctctgaagactgttgcttcctctaacacatgagggaggctgaatccaccaaatataaacagccatccgtcactgcactcatgcctccctctgtttactttcatactaagggtacaaaaattccaagtctcttttgaactgtattttgtatgccaatttcatgcttatttttcctttatcagagagagttaaggtggacgagcatgccctttttgtcatatcagcctgaaaatgttaaaaagctaggtggagacagattagttgtttcatttttgtttaacaaggtatttatacttttagcttaatttcattaagaggaacatcaggcattgcaatcagtattaatcaggggctcaaatacagactatctgggtgaccttgacta

SEQ ID NO: 123590 - DNA, 1783 bp, Homo sapiens
  Payload ID: 4262
  Gene Symbol: CNTD2
  Gene Name: cyclin N-terminal domain containing 2
  Uniprot ID: Q9H8S5
  ENST ID: ENST00000221818
  CDS Start-End: 17-484
aacaccctcctggaggatgctggtgagaggcagggaccaggggtccggctcccggctcgggcctatcgttaggcgctgggcccccaggccctctcctttgcagagtctcgctgcctccctcgacgcagagccttcaagcgccgcagtccccgacggcttccccgcgggccccactgtctccccaagacgcctggcgaggccgccggggctggaggaggcgctgagcgcgctggggctgcagggagaacgcgagtacgccggggacatcttcgccgaagtcatggagtacctgggtctggctggtgacacactttatctggcggttcacctgcttgattcctacctgagcgctggccgcgtgcgtctacatcgcctgcagctgctgggcgtggcttgcctgtttgtggcgtgcaaaatggaagagtgcgtgcttcccgaggaaactgaggtccggaacttggggcctttccagggcagggagtaaagagcccggatccaagactccttcacctccccccgcatcccccatctgcagcccgccttcctctgcctcctgagcgcggactccttctcacgggcggagctgctgcgcgccgagcgtcgcatcctgagccgcctggatttccggctgcaccaccccggcccgctgctgtgcctcgggctgctggccgcgctggcagggagcagcccccaggtgatgttacttgccacctacttcctggagctgtctttgctggaggccgaggcggcgggatgggagccgggtcgtcgtgcggctgcggctctgagcctggcgcaccgcttgctcgacggggcgggctccaggctccagccagaactttacaggtgtagtcttggcggaggaagtgtatggggtcaccgcagcttcagggacttaccttcctggtcatttttacggtctcggagaatgagagacaattattgaggaggaggtggcacctagacttgatttttctgggtgtgggagagaatggggtgggaggaccccattagtccagatctggggtctcttaaccttgccccagagtggaagatagtctcccaggcccagaagatgctcctattgccttccagggctgagaacgaaggatcacccaggcctcgagtcctccatctctgtatctggtggtggatggggtgttcctttagctgctagggccgctaaccatgctaccaggtggcagggcgaaccatggtttccctcagcctgtgcacccagcatagagaggatggctgcccatcctcagctcccctccttgcttcctcgagtgttctgactccgcactagccgcgccctgtaggaagaatagggtgtccacctctccccggtgctcgcctagtcactccagttgaagacgggacgcgtgcccgatctcaagagagcccccgacccgtccgtggggaaccacatcgacgcttcttctcagcctccagtctccagttccaaggatgggtcatctccaaccacttgccctgcctcagtttctccatctccctgctgcagccccgaggaactgggcaccctcgagccgtgcatggcccgcgctgcgctccgaggtcccgcgccgggtcgcgccgcagtcttcctcaagtatgcgcggccccagcgccaggggaccagccttgccgccgcctgcctgctccgccgcctccagtctgagcctccctgagtactgggactcagtcacaaaaaaatcaacaacaaaaaacaaaaccctcccagtgtgtgtccgtctctcatctcaataaaagaatttatttt

SEQ ID NO: 123591 - DNA, 1817 bp, Homo sapiens
  Payload ID: 4262
  Gene Symbol: CNTD2
  Gene Name: cyclin N-terminal domain containing 2
  Uniprot ID: Q9H8S5
  ENST ID: ENST00000430325
  CDS Start-End: 50-973
tagctgcaagggtcggtgcttggcctcgcccgcaacaccctcctggaggatgctggtgagaggcagggaccaggggtccggctcccggctcgggcctatcgttaggcgctgggcccccaggccctctcctttgcagagtctcgctgcctccctcgacgcagagccttcaagcgccgcagtccccgacggcttccccgcgggccccactgtctccccaagacgcctggcgaggccgccggggctggaggaggcgctgagcgcgctggggctgcagggagaacgcgagtacgccggggacatcttcgccgaagtcatggtgtgccgcgtgctgcccctgagagccctgccccgcgctgtgaccccggagatgcgcgccctggtggtagactggctggtccaggtgcacgagtacctgggtctggctggtgacacactttatctggcggttcacctgcttgattcctacctgagcgctggccgcgtgcgtctacatcgcctgcagctgctgggcgtggcttgcctgtttgtggcgtgcaaaatggaagagtgcgtgcttcccgagcccgccttcctctgcctcctgagcgcggactccttctcacgggcggagctgctgcgcgccgagcgtcgcatcctgagccgcctggatttccggctgcaccaccccggcccgctgctgtgcctcgggctgctggccgcgctggcagggagcagcccccaggtgatgttacttgccacctacttcctggagctgtctttgctggaggccgaggcggcgggatgggagccgggtcgtcgtgcggctgcggctctgagcctggcgcaccgcttgctcgacggggcgggctccaggctccagccagaactttacaggtgtagtcttggcggaggaagtgtatggggtcaccgcagcttcagggacttaccttcctggtcatttttacggtctcggagaatgagagacaattattgaggaggaggtggcacctagacttgatttttctgggtgtgggagagaatggggtgggaggaccccattagtccagatctggggtctcttaaccttgccccagagtggaagatagtctcccaggcccagaagatgctcctattgccttccagggctgagaacgaaggatcacccaggcctcgagtcctccatctctgtatctggtggtggatggggtgttcctttagctgctagggccgctaaccatgctaccaggtggcagggcgaaccatggtttccctcagcctgtgcacccagcatagagaggatggctgcccatcctcagctcccctccttgcttcctcgagtgttctgactccgcactagccgcgccctgtaggaagaatagggtgtccacctctccccggtgctcgcctagtcactccagttgaagacgggacgcgtgcccgatctcaagagagcccccgacccgtccgtggggaaccacatcgacgcttcttctcagcctccagtctccagttccaaggatgggtcatctccaaccacttgccctgcctcagtttctccatctccctgctgcagccccgaggaactgggcaccctcgagccgtgcatggcccgcgctgcgctccgaggtcccgcgccgggtcgcgccgcagtcttcctcaagtatgcgcggccccagcgccaggggaccagccttgccgccgcctgcctgctccgccgcctccagtctgagcctccctgagtactgggactcagtcacaaaaaaatcaacaacaaaaaacaaaaccctcccagtgtgtgtccgtctctcatctcaataaaagaatttattttattctga

SEQ ID NO: 123592 - DNA, 787 bp, Homo sapiens
  Payload ID: 4262
  Gene Symbol: CNTD2
  Gene Name: cyclin N-terminal domain containing 2
  ENST ID: ENST00000513948
  CDS Start-End: 178-783
cagtttgggtgtggcatgcctaagatgtccaactgactggaggaggctgctgcatccagggctggagctcaggagaaaggcagaggcacaggtgtggagagtgaagcgtccctgccccaaccccaggtgtgccgcgtgctgcccctgagagccctgccccgcgctgtgaccccggagatgcgcgccctggtggtagactggctggtccaggtgcacgagtacctgggtctggctggtgacacactttatctggcggttcacctgcttgattcctacctgagcgctggccgcgtgcgtctacatcgcctgcagctgctgggcgtggcttgcctgtttgtggcgtgcaaaatggaagagtgcgtgcttcccgagcccgccttcctctgcctcctgagcgcggactccttctcacgggcggagctgctgcgcgccgagcgtcgcatcctgagccgcctggatttccggctgcaccaccccggcccgctgctgtgcctcgggctgctggccgcgctggcagggagcagcccccaggtgatgttacttgccacctacttcctggagctgtctttgctggaggccgaggcggcgggatgggagccgggtcgtcgtgcggctgcggctctgagcctggcgcaccgcttgctcgacggggcgggctccaggctccagccagaactttacaggtgtagtcttggcggaggaagtgtatggggtcaccgcagcttcagggacttaccttcctggtcatttttacggtctcggagaatgagagacaattattgaggag

SEQ ID NO: 123593 - DNA, 582 bp, Homo sapiens
  Payload ID: 4262
  Gene Symbol: CNTD2
  Gene Name: cyclin N-terminal domain containing 2
  ENST ID: ENST00000599263
  CDS Start-End: 1-483
cccgagcccgccttcctctgcctcctgagcgcggactccttctcacgggcggagctgctgcgcgccgagcgtcgcatcctgagccgcctggatttccggctgcaccaccccggcccgctgctgtgcctcgggctgctggccgcgctggcagggagcagcccccaggtgatgttacttgccacctacttcctggagctgtctttgctggaggccgaggcggcgggatgggagccgggtcgtcgtgcggctgcggctctgagcctggcgcaccgcttgctcgacggggcgggctccaggctccagccagaactttacagccccgaggaactgggcaccctcgagccgtgcatggcccgcgctgcgctccgaggtcccgcgccgggtcgcgccgcagtcttcctcaagtatgcgcggccccagcgccaggggaccagccttgccgccgcctgcctgctccgccgcctccagtctgagcctccctgagtactgggactcagtcacaaaaaaatcaacaacaaaaaacaaaaccctcccagtgtgtgtccgtctctcatctcaataaaagaatttattttattctga

SEQ ID NO: 123594 - DNA, 1433 bp, Homo sapiens
  Payload ID: 4263
  Gene Symbol: CCNO
  Gene Name: cyclin O
  Uniprot ID: P22674
  ENST ID: ENST00000282572
  CDS Start-End: 158-1210
agtgagaggccgggggtgtggtagagagaaggagccggccgggtacttaggaccgcgccagcctctgagcccggcctccttcgcactttcgagtgcgcgtttgctgcccgccgcagcccgggcgttgaaggtagtaaagcggccacccggccgcatcatggtgaccccctgtcccaccagcccctcgagccccgccgcccgagcggggaggcgggacaacgaccagaaccttcgcgccccggtgaagaagagcaggcgtccgcgcctccggaggaagcagccgctgcatcccctgaacccgtgcccgctcccgggagactccggcatttgcgacctgttcgagtcccccagctccggctcagacggcgcagagagcccctctgcggcgcggggtggtagccccctgcccggcccggcccagcccgtggcgcagctagatctacagaccttccgcgactacggccagagctgctacgccttccgcaaggcgcaggagagccacttccacccgcgggaggcgctggcacggcagccacaagtgacggcggaatcccgctgtaagctgctcagctggctgatcccggtgcaccgccaattcggcctctccttcgagtcgctgtgcctgacggtgaacactctggaccgcttcctcaccaccacgccggtggctgcagactgcttccagctgcttggggtcacctccttgctcatcgcttgcaaacaggtggaggtgcacccgccgcgcgtgaagcagcttctggccctctgctgcggcgccttctcccggcagcagctctgcaacctcgagtgcatcgtgctgcacaagctgcacttcaccctgggtgcgcccaccattagcttcttcctggagcatttcacgcacgctcgcgtggaggcggggcaggctgaggcctccgaagctctggaagcgcaagccctggcgcggggggtggcagagctgagtctggccgactatgccttcaccagctactccccttccctcctggcgatctgctgcctggcgctggcggaccgcatgctgcgggtctcgcggcccgtggacttgcgactgggagaccacccggaggcggcgctggaggactgtatgggcaagttgcagctgctggtggccataaacagtacttccttgactcacatgctgcccgttcagatctgcgagaagtgcagcctgcccccgagctcgaaataaaacagatccttcgtttccttttagtccctggcccggctgctggacctctcccgtagcctcagaagagtgcagtactggtccacagagaaggcttcaggacctgcttggtcagctgcaggttgtaaatagtgtacgatactagcatctggtattttatttattttgcagcgagcacatgaggaagctgagtctttcaccaataaacagttgtggtttgtctaaa

SEQ ID NO: 123595 - DNA, 1726 bp, Homo sapiens
  Payload ID: 4263
  Gene Symbol: CCNO
  Gene Name: cyclin O
  Uniprot ID: P22674
  ENST ID: ENST00000501463
  CDS Start-End: 75-470
cactttcgagtgcgcgtttgctgcccgccgcagcccgggcgttgaaggtagtaaagcggccacccggccgcatcatggtgaccccctgtcccaccagcccctcgagccccgccgcccgagcggggaggcgggacaacgaccagaaccttcgcgccccggtgaagaagagcaggcgtccgcgcctccggaggaagcagccgctgcatcccctgaacccgtgcccgctcccgggagactccggcatttgcgacctgttcgagtcccccagctccggctcagacggcgcagagagcccctctgcggcgcggggtggtagccccctgcccggcccggcccagcccgtggcgcagctagatctacagaccttccgcgactacggccagagctgctacgccttccgcaaggcgcaggagagccacttccacccgcgggaggcgctggcacggcagccacaagtgaggtgctggtagagccagctccacgccgccgctcttcctctcctcccaggctctctcctctcctgccggctcggccctccgagcgcccgggcccgcgacagcccaggtcccgccccgagtcgaagcacaaggggccgtggaggggcgtcaccggcctcattttacagatggagaaaagtggggcgtagacggcttgagggacttgccccgtcccaagctggctactggggcacggtagagaggaattcgtttccgggttgagtctggactcctaccgaactcgggcaagttatttaacacccctgagcttctttcttcatctgcaaaatggaacccctccccttcctttgaattgctgagcccattacgcgaggtgacggcggaatcccgctgtaagctgctcagctggctgatcccggtgcaccgccaattcggcctctccttcgagtcgctgtgcctgacggtgaacactctggaccgcttcctcaccaccacgccggtggctgcagactgcttccagctgcttggggtcacctccttgctcatcgcttgcaaacaggtggaggtgcacccgccgcgcgtgaagcagcttctggccctctgctgcggcgccttctcccggcagcagctctgcaacctcgagtgcatcgtgctgcacaagctgcacttcaccctgggtgcgcccaccattagcttcttcctggagcatttcacgcacgctcgcgtggaggcggggcaggctgaggcctccgaagctctggaagcgcaagccctggcgcggggggtggcagagctgagtctggccgactatgccttcaccagctactccccttccctcctggcgatctgctgcctggcgctggcggaccgcatgctgcgggtctcgcggcccgtggacttgcgactgggagaccacccggaggcggcgctggaggactgtatgggcaagttgcagctgctggtggccataaacagtacttccttgactcacatgctgcccgttcagatctgcgagaagtgcagcctgcccccgagctcgaaataaaacagatccttcgtttccttttagtccctggcccggctgctggacctctcccgtagcctcagaagagtgcagtactggtccacagagaaggcttcaggacctgcttggtcagctgcaggttgtaaatagtgtacgatactagcatctggtattttatttattttgcagcgagcacatgaggaagctgagtctttcaccaataaacagttgtggtttgtctaaa

SEQ ID NO: 123596 - DNA, 2060 bp, Homo sapiens
  Payload ID: 4264
  Gene Symbol: CNPPD1
  Gene Name: cyclin Pas1/PHO80 domain containing 1
  Uniprot ID: Q9BV87
  ENST ID: ENST00000360507
  CDS Start-End: 139-1371
gcgagggcgagggcgaggacggcggcccgccccggggaggcaggctggcaggtggacaggcgggcaaggacagctccgcgagccccctacaactcgtttccttccgttcaccttcgcagggcggcgactggcggcgcgatggacctgaccgggctcctgctggacgaagaaggcaccttctccctcgccggcttccaggacttcacgttcctcccaggacaccagaagctgagtgcccggatccgaaggaggctctactatggctgggactgggaagccgactgtagcctggaggagctctccagcccggtggcagacattgctgtcgaactgctccagaaggcagcccccagccctattcgccgactccagaagaaatatgtagctcatgtgtcccgggaggcatgcatctccccatgtgctatgatgctggctctggtgtacattgaacggctccggcaccgaaacccagactacttgcagcatgtgtcatcctctgacttgttcctgatctccatgatggtggccagtaagtacctctatgatgaaggggaggaggaggaggtcttcaacgacgaatggggagctgctgggggtgtggccgtgcccactctcaatgccttggagaggggcttcctgagtgccatggattggcatctctacactgaccctcgggagatctttgaggtgctgagctggttggagagctgtgtggctgagcagcagggacggtggcgaggctggtacacctacacagacctgtgtgtgctgctggagcagccgacctggcagttggccctgggctccctctgccagcggctggtaaagctgtcttgcctgttagctgtggcatatgtgagcagtgtggccctggctgtggcatcggtggccgtaatacatcagtctttggggctgtcctgcatccctacacctgggccgcctgaccttggactgacctcccgttgcctcctggagccctgcataccttctgtgccacaatgcctgccgtctctcgctaatgtctccagctgcctggaaggcagcatggggctgcggtcactctggggcagtcttctggcctcactgactcctccaccattgcctcccccagacccccctgcccctcccactcttcttcataactgccacctttgccagaagctccagagagactccccaacctgccatgcctgcctccaccccaaccgtacagtccccactgcgctgtccagcccctggtaccatacctatggcctggctcccccctggccttggagcccggtgctcctttcacttcctcagcctcagcaatgttcccttttcagtgtcatggagctggctcgcctcaagtctttcgttttcccaggctaggtagggctgtgaggaatgcattaagagggtttgggagtttctgagaacctggaggagcaaagcttgattcagatcctgtctgcctcgctgggtccttggcaggtcccctgtcctcctgggtgggagcttatggggtggtggggcagaaggactgaaggtaattcactcctagatcgcagtggctggctgcttggccaggacagtgatgccgccagggagagcttccgcttggtgaccagggacatgtcccagatggacatagaagcccctctctgcctccctgggattttttagacttttacttttgatttccctaggatggaagagtataggtgggagataagggaagtggggtgagaggagaaaggaaatgttggcatgggcctgtgtgatgtccctgaggcagaagagccggggactgatgggttcaggtgggagctgctgggtgaggcagggaacccttttcactcccattccttagctttagtctaatggagccaaggactgctgggaccttcaaccctgatcttttgtcttccagtcttctcttagtgtcctgctcctaggtttccctctcttctggttcttctcccaggtattctcttcccaggcctctctggccactgctttgtatcagggtttttcacgcttttgtagaactgaggtttcaataaacagtttcagttgca

SEQ ID NO: 123597 - DNA, 2073 bp, Homo sapiens
  Payload ID: 4264
  Gene Symbol: CNPPD1
  Gene Name: cyclin Pas1/PHO80 domain containing 1
  Uniprot ID: Q9BV87
  ENST ID: ENST00000409789
  CDS Start-End: 429-1661
tgacgaagtaccccgggttccgagtccgggtctaggtccaggcagtcgagcccgttttcttatcccacagtaggcagggcggctagggagtgtggtgctgccccggtatccccgtgtggggcaggaagtgggcttccagattcccagtatccccggtagggtctgcttctgctcgctcgggaagggcggtggccgtcccattactcaaccaaccctcaacgcactggtcctcccagttccctcccctcagtgggtaaacaaacacacaccagcgcttgactcgacagactcgaaaacaacatctactcagaaaagttgtttctttcctatctccttaaactttcccacttccacatatcggagcttcttcccacctcggcctactcaagcatgagatcggaggcgggagggcggcgactggcggcgcgatggacctgaccgggctcctgctggacgaagaaggcaccttctccctcgccggcttccaggacttcacgttcctcccaggacaccagaagctgagtgcccggatccgaaggaggctctactatggctgggactgggaagccgactgtagcctggaggagctctccagcccggtggcagacattgctgtcgaactgctccagaaggcagcccccagccctattcgccgactccagaagaaatatgtagctcatgtgtcccgggaggcatgcatctccccatgtgctatgatgctggctctggtgtacattgaacggctccggcaccgaaacccagactacttgcagcatgtgtcatcctctgacttgttcctgatctccatgatggtggccagtaagtacctctatgatgaaggggaggaggaggaggtcttcaacgacgaatggggagctgctgggggtgtggccgtgcccactctcaatgccttggagaggggcttcctgagtgccatggattggcatctctacactgaccctcgggagatctttgaggtgctgagctggttggagagctgtgtggctgagcagcagggacggtggcgaggctggtacacctacacagacctgtgtgtgctgctggagcagccgacctggcagttggccctgggctccctctgccagcggctggtaaagctgtcttgcctgttagctgtggcatatgtgagcagtgtggccctggctgtggcatcggtggccgtaatacatcagtctttggggctgtcctgcatccctacacctgggccgcctgaccttggactgacctcccgttgcctcctggagccctgcataccttctgtgccacaatgcctgccgtctctcgctaatgtctccagctgcctggaaggcagcatggggctgcggtcactctggggcagtcttctggcctcactgactcctccaccattgcctcccccagacccccctgcccctcccactcttcttcataactgccacctttgccagaagctccagagagactccccaacctgccatgcctgcctccaccccaaccgtacagtccccactgcgctgtccagcccctggtaccatacctatggcctggctcccccctggccttggagcccggtgctcctttcacttcctcagcctcagcaatgttcccttttcagtgtcatggagctggctcgcctcaagtctttcgttttcccaggctaggtagggctgtgaggaatgcattaagagggtttgggagtttctgagaacctggaggagcaaagcttgattcagatcctgtctgcctcgctgggtccttggcaggtcccctgtcctcctgggtgggagcttatggggtggtggggcagaaggactgaaggtaattcactcctagatcgcagtggctggctgcttggccaggacagtgatgccgccagggagagcttccgcttggtgaccagggacatgtcccagatggacatagaagcccctctctgcctccctgggattttttagacttttacttttgatttccctaggatggaagagtataggtgggagataagggaagtggggtgagaggagaaaggaaatgttggcatgggcctgtgtgatgtccctgaggcagaagagc

SEQ ID NO: 123598 - DNA, 919 bp, Homo sapiens
  Payload ID: 4264
  Gene Symbol: CNPPD1
  Gene Name: cyclin Pas1/PHO80 domain containing 1
  ENST ID: ENST00000451647
  CDS Start-End: 71-919
gacagctccgcgagccccctacaactcgtttccttccgttcaccttcgcagggcggcgactggcggcgcgatggacctgaccgggctcctgctggacgaagaaggcaccttctccctcgccggcttccaggacttcacgttcctcccaggacaccagaagctgagtgcccggatccgaaggaggctctactatggctgggactgggaagccgactgtagcctggaggagctctccagcccggtggcagacattgctgtcgaactgctccagaaggcagcccccagccctattcgccgactccagaagaaatatgtagctcatgtgtcccgggaggcatgcatctccccatgtgctatgatgctggctctggtgtacattgaacggctccggcaccgaaacccagactacttgcagcatgtgtcatcctctgacttgttcctgatctccatggtaagacaccccctccccatctccctaaagagccaagagcctgctatgagctctgctccaccacttctggttcctctgcagatggtggccagtaagtacctctatgatgaaggggaggaggaggaggtcttcaacgacgaatggggagctgctgggggtgtggccgtgcccactctcaatgccttggagaggggcttcctgagtgccatggattggcatctctacactgaccctcgggagatctttgaggtgctgagctggttggagagctgtgtggctgagcagcagggacggtggcgaggctggtacacctacacagacctgtgtgtgctgctggagcagccgacctggcagttggccctgggctccctctgccagcggctggtaaagctgtcttgcctgttagctgtggcatatgtgagcagtgtggccctggctgtggcatcggtggccgtaatacatcagtct

SEQ ID NO: 123599 - DNA, 1154 bp, Homo sapiens
  Payload ID: 4264
  Gene Symbol: CNPPD1
  Gene Name: cyclin Pas1/PHO80 domain containing 1
  ENST ID: ENST00000453038
  CDS Start-End: 230-1154
aggcgcctggggcttggccacgttccgtgagaccaggagttcgagtccggttcctgcccgcgggtcggggcgggaggctgggccagatgggcggcaggaagtgccaggcgctgacttgcaggcggcacccccgcggcttgtaaacgccgggcggacgcggcacaggcggagtacgcgcctcgcagccgcatctcctttctgctccgcgagggcggcgactggcggcgcgatggacctgaccgggctcctgctggacgaagaaggcaccttctccctcgccggcttccaggacttcacgttcctcccaggacaccagaagctgagtgcccggatccgaaggaggctctactatggctgggactgggaagccgactgtagcctggaggagctctccagcccggtggcagacattgctgtcgaactgctccagaaggcagcccccagccctattcgccgactccagaagaaatatgtagctcatgtgtcccgggaggcatgcatctccccatgtgctatgatgctggctctggtgtacattgaacggctccggcaccgaaacccagactacttgcagcatgtgtcatcctctgacttgttcctgatctccatgatggtggccagtaagtacctctatgatgaaggggaggaggaggaggtcttcaacgacgaatggggagctgctgggggtgtggccgtgcccactctcaatgccttggagaggggcttcctgagtgccatggattggcatctctacactgaccctcgggagatctttgaggtgctgagctggttggagagctgtgtggctgagcagcagggacggtggcgaggctggtacacctacacagacctgtgtgtgctgctggagcagccgacctggcagttggccctgggctccctctgccagcggctggtaaagctgtcttgcctgttagctgtggcatatgtgagcagtgtggccctggctgtggcatcggtggccgtaatacatcagtctttggggctgtcctgcatccctacacctgggccgcctgaccttggactgacctcccgttgcctcctggagccctgcataccttctgtgccacaatgcctgccgtctctcgctaatgtctccagctgcctggaaggcagcatggggctgcggtcactct

SEQ ID NO: 123600 - DNA, 6973 bp, Homo sapiens
  Payload ID: 4265
  Gene Symbol: CCNT1
  Gene Name: cyclin T1
  Uniprot ID: O60563
  ENST ID: ENST00000261900
  CDS Start-End: 224-2404
gcatattggctgttaactcggctacggggtgtagcgaggtgcattccggaagtaggtcctttgacttttgcttcctctacggaggcaagtaacaacccggcggtcgacgcttagcggaagttcgtcaagtcgcagttgcccccgcacagcggatgtgggtcgcctcttaggtgacgctgggaagtgcctgcagccttcgccgctgccttctggttgaagcactatggagggagagaggaagaacaacaacaaacggtggtatttcactcgagaacagctggaaaatagcccatcccgtcgttttggcgtggacccagataaagaactttcttatcgccagcaggcggccaatctgcttcaggacatggggcagcgtcttaacgtctcacaattgactatcaacactgctatagtatacatgcatcgattctacatgattcagtccttcacacagttccctggaaattctgtggctccagcagccttgtttctagcagctaaagtggaggagcagcccaaaaaattggaacatgtcatcaaggtagcacatacttgtctccatcctcaggaatcccttcctgatactagaagtgaggcttatttgcaacaagttcaagatctggtcattttagaaagcataattttgcagactttaggctttgaactaacaattgatcacccacatactcatgtagtaaagtgcactcaacttgttcgagcaagcaaggacttagcacagacttcttacttcatggcaaccaacagcctgcatttgaccacatttagcctgcagtacacacctcctgtggtggcctgtgtctgcattcacctggcttgcaagtggtccaattgggagatcccagtctcaactgacgggaagcactggtgggagtatgttgacgccactgtgaccttggaacttttagatgaactgacacatgagtttctacagattttggagaaaactcccaacaggctcaaacgcatttggaattggagggcatgcgaggctgccaagaaaacaaaagcagatgaccgaggaacagatgaaaagacttcagagcagacaatcctcaatatgatttcccagagctcttcagacacaaccattgcaggtttaatgagcatgtcaacttctaccacaagtgcagtgccttccctgccagtctccgaagagtcatccagcaacttaaccagtgtggagatgttgccgggcaagcgttggctgtcctcccaaccttctttcaaactagaacctactcagggtcatcggactagtgagaatttagcacttacaggagttgatcattccttaccacaggatggttcaaatgcatttatttcccagaagcagaatagtaagagtgtgccatcagctaaagtgtcactgaaagaataccgcgcgaagcatgcagaagaattggctgcccagaagaggcaactggagaacatggaagccaatgtgaagtcacaatatgcatatgctgcccagaatctcctttctcatcatgatagccattcttcagtcattctaaaaatgcccatagagggttcagaaaaccccgagcggccttttctggaaaaggctgacaaaacagctctcaaaatgagaatcccagtggcaggtggagataaagctgcgtcttcaaaaccagaggagataaaaatgcgcataaaagtccatgctgcagctgataagcacaattctgtagaggacagtgttacaaagagccgagagcacaaagaaaagcacaagactcacccatctaatcatcatcatcatcataatcaccactcacacaagcactctcattcccaacttccagttggtactgggaacaaacgtcctggtgatccaaaacatagtagccagacaagcaacttagcacataaaacctatagcttgtctagttctttttcctcttccagttctactcgtaaaaggggaccctctgaagagactggaggggctgtgtttgatcatccagccaagattgccaagagtactaaatcctcttccctaaatttctccttcccttcacttcctacaatgggtcagatgcctgggcatagctcagacacaagtggcctttccttttcacagcccagctgtaaaactcgtgtccctcattcgaaactggataaagggcccactggggccaatggtcacaacacgacccagacaatagactatcaagacactgtgaatatgcttcactccctgctcagtgcccagggtgttcagcccactcagcccactgcatttgaatttgttcgtccttatagtgactatctgaatcctcggtctggtggaatctcctcgagatctggcaatacagacaaaccccggccaccacctctgccatcagaacctcctccaccacttccaccccttcctaagtaaaaaaagaaaaagaagaggagaaaaaaacttctttaaaaaaacacataatttttcttttttttttttggactaagaaaattacttatgaaatatgtcatccttggactagggaataaattgatattgagacatagttaggagggtggtagaaggccttggctatatatctgctgtctcatgcatttaactattttcttacagtttttactggtattagagaggtgttgaagctgtgaaggattaaggacacattctgaattcttggcctctccaccatctaattaggttgattggagttgatatcttccctcttcttgccagagctgaaaaatggagggtttcttgtatcagacaattgtggatcctttcggtgtttaatatatcagaagagaggaagtatttaaacgtcaaatcttttaatagacttaataatttaaagaaagtaagttatctgtttagtttttttatataattgggaaggggatagggattttgctgtgtgtatatgatacatagcagtaactcctggtgggtgggattggagggtgggaatgtgtgagggtgggtgggaggctaggtttttggctaggagttctgaaataggctcaggccacttttttcagacttttaagtgtgtatgtaagtgtgggtatgtgtgtttttaagtgtgtgtgtttaaaaataatgttttatcttccctccctgttccttaccgttttcattttccaacagtctactagagaaaaacatggttggccttgagaacataaaggaagaggcatgtatttgacatggtatttttccctttctttatgttataattgagtagtagccctctaatttgtagtttgggcaagtacagccaacaccctgactcttaaccttattatgagaacttcctttttacccctttttttgtttttgtgcaaaacagagatggggttgaggaaggagggttggcgagcaaggccagcttctgccctacagaattgggtgtgtcttttttttcaagtgaggctttgggaaagtgttcaaatgagagcagtcttaaggtctctaagagatggggaatgtgctatgtatatcctgcctgtgaaagcccaaaccatatgggagaagctagaggatactaaaaacaatgaaattgtgatttggaagtttagaacattgttttaaaaattacattataaatgtaagacatgctttttatgtgtatatccgaagggaaacagctacatcctcaagtttttgcagcctatatgacttgagattggagcttgtgaatttaacagtactggtgccatgagaatgagcaaagcctagccaatggatactattgtgtttagattgttcatctttggtagctttaggttcttgatcgaggttcttaagatttctaagtcctttataaaaataggtcaagagtcctgttgttatggaggcttgattatcccagatattaggagtgaacatttttaataaatctttcagaaaatcttggctagaaagaattctaagttagttgtctaaccactgaaaactacctagccagagatcatttaatgagatattctttgatcttcattgcattttttttgctctggaaaaggtggttcaatttgagtttgttttcatgatttgattgcagcttacttcatgccaaggattttttagggagaggtcgaattatttttcatttggaagtcatagggagacaggagttgtacttatgctgctacttgccaggaacaggttgggaagaaaattgtggctgttggaattgatgatgtactggcctaatatagaaaggaatttgtaggcaggagtaaacgttaactgacggtgggttagtgccctgcatcttgcatatttgaactgtctagagttcctgccattgctgggtataaaacgaggagctctctgttgacctgtaaatcattaatacttcttgacttagagtgtcacttcactttatagatgacattttcctctttccccttgatattttctatgttgtgttagataattggtagatatatagttgtggtttagtacatttagggcttctatttatttagattttgtttgttggagtctgtttccaaaagggaatgtgccatttagtctgcatctgtatctttgtggacttgatgatcactggtttgattttgaaaaatgtcttttccagcttttagttactctcatcaaatgtcacatattttctaatcacatgcactcctttaccacagaggcacataatcatttggcctcatagcagttatccatggccgtactgtagtaaagttccttagaactttgccaggagtgaactagaaaaaagtgcttactagggcctaagagttgctttgtgccgtgtagtccggcctttgcactagtagatcattgctgacataggtcagtttagagacctttctgtgttaatgcctcctggtactgtcttaagatacgtacagtgtctgtttttagatctatgcatatgtcatgaagctccttgtgggctctgcatgaagctgctgctttgtttttgggttaacagatgtgcctgtcaactagcatgtgtattgtccaaattccataaacttaaggtttttaagggctgtgtggtttctgagctctatgtgtctttcctatccttgtaccttcaaagggtgagaaatgagatttatacatccaaagttagtctgataaatatggctttttgtttctccatgtaacctagactgtcaaaaataagtgatggtgataagtaggcctggagcctcagcttctgtaaatctcattcctaaaattttgctagactcgtgttggcaaaaacaaatacctgtggattgtccttaaggcttttaatcagatacctgtgttgctgttagctgaactgtagtgaagcatcgatccaaatcggtcttctgaagtatcagttatgcttttgagtttagaaaatacttaggtgttagtctagtcttcccattcatgaatcagtgtatgtccatatcagagagcctcaacttcttttttcttcctttttaaaaatgattttagtgttttgatttagtgtatactacatagttcagtattattggctttaccagtgttgacagaaaaattttaaatctccagttgcaaacagcaatggattaggatatggaaataaaatcatggtgacatcactgctgagttatcttaaacctctgctacttaattctccatattgaaatgcatactcctccacatacatggcttccaagtaaaggcaattgtagaggggccctgtctatcccagtatggttggattttaaacatatctgtgtttccgttattttgggaactgattaatatttacaattttttttgtttatgagttattttgatactaagaaaagagagaatctagaacatcttgcagttgaaatacaaattttattcttttggtcttgggagaatttaagcagtctatgcaactcatcaaatggtgagaaatagccctccgaggttccagtaagctttcagtgactttgatacctccccaagtttcttgagttgctgcttgttaacacccagcttttaactgagtgtttgctcctgatggtttaggagattttcatgttgtatcacactgtcaagttttattttgtctttttatccctccgtggatgtgagtttgaaacaagcacggtacagtaatcctgcctgatagagtagtctggaatgagaattactttttgggtgagagagttctccattttaatgtttctaaagtttttcatatgaacttggcattggaaaagggaggtaaagaaaaaggacgtttactaaaagcagtgtctactcttcccctttgtgagtgtttattcatggctaatgaaaaaaagagaaggactcttgggttttgtgttgccatgttaagcatggagagggatgcttgacagcatgctaattgaagccagagcaagtatgtccttcatcaggtaatcaggaactcttcagttgaagctgaggaactaactgattagttgttgatcataatataattggttacaaagtggaagtgccagctggcttaagtacccaaagaaaagaatgcagcagcctaacttagtgttaccatatgttactgaatttgaaactgaccttttttcccaccctacttcacacacctaaaactcttttcttgtcagaccaaagagcgaaaagaaaaaaaaaagtaaaacactttaccaatctgtcactcaggtacaattttgtggtgagatttttgtctgttctctttgtattgctcttaagagtcctttctcagcatattattctgccattgcctctgtcttccttggggcacctcagctctggatgctacccctgggatatctactgctgttatgtgaatgataggaggtaagtgaccattatagtaagggctctttgtaaaaaaattcaaaaaatttaaaaaggatgtatacattttatagtctggctatcagtttgatatcttgctgtcaagtatgtttctcaatctgtatttatccatcccatcaataaatgttaatggtaaaa

SEQ ID NO: 123601 - DNA, 2017 bp, Homo sapiens
  Payload ID: 4265
  Gene Symbol: CCNT1
  Gene Name: cyclin T1
  Uniprot ID: O60563
  ENST ID: ENST00000417344
  CDS Start-End: 1-555
atggagggagagaggaagaacaacaacaaacggtggtatttcactcgagaacagctggaaaatagcccatcccgtcgttttggcgtggacccagataaagaactttcttatcgccagcaggcggccaatctgcttcaggacatggggcagcgtcttaacgtctcacaattgactatcaacactgctatagtatacatgcatcgattctacatgattcagtccttcacacagttccctggaaattctgtggctccagcagccttgtttctagcagctaaagtggaggagcagcccaaaaaattggaacatgtcatcaaggtagcacatacttgtctccatcctcaggaatcccttcctgatactagaagtgaggcttatttgcaacaagttcaagatctggtcattttagaaagcataattttgcagactttaggctttgaactaacaattgatcacccacatactcatgtagtaaagtgcactcaacttgttcgagcaagcaaggacttagcacagacttcttacttcatggcaaccaacagaactgacacatgagtttctacagattttggagaaaactcccaacaggctcaaacgcatttggaattggagggcatgcgaggctgccaagaaaacaaaagcagatgaccgaggaacagatgaaaagacttcagagcagacaatcctcaatatgatttcccagagctcttcagacacaaccattgcaggtttaatgagcatgtcaacttctaccacaagtgcagtgccttccctgccagtctccgaagagtcatccagcaacttaaccagtgtggagatgttgccgggcaagcgttggctgtcctcccaaccttctttcaaactagaacctactcagggtcatcggactagtgagaatttagcacttacaggagttgatcattccttaccacaggatggttcaaatgcatttatttcccagaagcagaatagtaagagtgtgccatcagctaaagtgtcactgaaagaataccgcgcgaagcatgcagaagaattggctgcccagaagaggcaactggagaacatggaagccaatgtgaagtcacaatatgcatatgctgcccagaatctcctttctcatcatgatagccattcttcagtcattctaaaaatgcccatagagggttcagaaaaccccgagcggccttttctggaaaaggctgacaaaacagctctcaaaatgagaatcccagtggcaggtggagataaagctgcgtcttcaaaaccagaggagataaaaatgcgcataaaagtccatgctgcagctgataagcacaattctgtagaggacagtgttacaaagagccgagagcacaaagaaaagcacaagactcacccatctaatcatcatcatcatcataatcaccactcacacaagcactctcattcccaacttccagttggtactgggaacaaacgtcctggtgatccaaaacatagtagccagacaagcaacttagcacataaaacctatagcttgtctagttctttttcctcttccagttctactcgtaaaaggggaccctctgaagagactggaggggctgtgtttgatcatccagccaagattgccaagagtactaaatcctcttccctaaatttctccttcccttcacttcctacaatgggtcagatgcctgggcatagctcagacacaagtggcctttccttttcacagcccagctgtaaaactcgtgtccctcattcgaaactggataaagggcccactggggccaatggtcacaacacgacccagacaatagactatcaagacactgtgaatatgcttcactccctgctcagtgcccagggtgttcagcccactcagcccactgcatttgaatttgttcgtccttatagtgactatctgaatcctcggtctggtggaatctcctcgagatctggcaatacagacaaaccccggccaccacctctgccatcagaacctcctccaccacttccaccccttcctaagtaa

SEQ ID NO: 123602 - DNA, 6915 bp, Homo sapiens
  Payload ID: 4265
  Gene Symbol: CCNT1
  Gene Name: cyclin T1
  Uniprot ID: O60563
  ENST ID: ENST00000618666
  CDS Start-End: 324-878
gggaagatacacggtttttaagaaagaacttctaaccccactccaccgcccaacggtcacgtgacgcgcctgcgtcctcgcctcaaggttttttctggtcgcatattggctgttaactcggctacggggtgtagcgaggtgcattccggaagtaggtcctttgacttttgcttcctctacggaggcaagtaacaacccggcggtcgacgcttagcggaagttcgtcaagtcgcagttgcccccgcacagcggatgtgggtcgcctcttaggtgacgctgggaagtgcctgcagccttcgccgctgccttctggttgaagcactatggagggagagaggaagaacaacaacaaacggtggtatttcactcgagaacagctggaaaatagcccatcccgtcgttttggcgtggacccagataaagaactttcttatcgccagcaggcggccaatctgcttcaggacatggggcagcgtcttaacgtctcacaattgactatcaacactgctatagtatacatgcatcgattctacatgattcagtccttcacacagttccctggaaattctgtggctccagcagccttgtttctagcagctaaagtggaggagcagcccaaaaaattggaacatgtcatcaaggtagcacatacttgtctccatcctcaggaatcccttcctgatactagaagtgaggcttatttgcaacaagttcaagatctggtcattttagaaagcataattttgcagactttaggctttgaactaacaattgatcacccacatactcatgtagtaaagtgcactcaacttgttcgagcaagcaaggacttagcacagacttcttacttcatggcaaccaacagaactgacacatgagtttctacagattttggagaaaactcccaacaggctcaaacgcatttggaattggagggcatgcgaggctgccaagaaaacaaaagcagatgaccgaggaacagatgaaaagacttcagagcagacaatcctcaatatgatttcccagagctcttcagacacaaccattgcaggtttaatgagcatgtcaacttctaccacaagtgcagtgccttccctgccagtctccgaagagtcatccagcaacttaaccagtgtggagatgttgccgggcaagcgttggctgtcctcccaaccttctttcaaactagaacctactcagggtcatcggactagtgagaatttagcacttacaggagttgatcattccttaccacaggatggttcaaatgcatttatttcccagaagcagaatagtaagagtgtgccatcagctaaagtgtcactgaaagaataccgcgcgaagcatgcagaagaattggctgcccagaagaggcaactggagaacatggaagccaatgtgaagtcacaatatgcatatgctgcccagaatctcctttctcatcatgatagccattcttcagtcattctaaaaatgcccatagagggttcagaaaaccccgagcggccttttctggaaaaggctgacaaaacagctctcaaaatgagaatcccagtggcaggtggagataaagctgcgtcttcaaaaccagaggagataaaaatgcgcataaaagtccatgctgcagctgataagcacaattctgtagaggacagtgttacaaagagccgagagcacaaagaaaagcacaagactcacccatctaatcatcatcatcatcataatcaccactcacacaagcactctcattcccaacttccagttggtactgggaacaaacgtcctggtgatccaaaacatagtagccagacaagcaacttagcacataaaacctatagcttgtctagttctttttcctcttccagttctactcgtaaaaggggaccctctgaagagactggaggggctgtgtttgatcatccagccaagattgccaagagtactaaatcctcttccctaaatttctccttcccttcacttcctacaatgggtcagatgcctgggcatagctcagacacaagtggcctttccttttcacagcccagctgtaaaactcgtgtccctcattcgaaactggataaagggcccactggggccaatggtcacaacacgacccagacaatagactatcaagacactgtgaatatgcttcactccctgctcagtgcccagggtgttcagcccactcagcccactgcatttgaatttgttcgtccttatagtgactatctgaatcctcggtctggtggaatctcctcgagatctggcaatacagacaaaccccggccaccacctctgccatcagaacctcctccaccacttccaccccttcctaagtaaaaaaagaaaaagaagaggagaaaaaaacttctttaaaaaaacacataatttttcttttttttttttggactaagaaaattacttatgaaatatgtcatccttggactagggaataaattgatattgagacatagttaggagggtggtagaaggccttggctatatatctgctgtctcatgcatttaactattttcttacagtttttactggtattagagaggtgttgaagctgtgaaggattaaggacacattctgaattcttggcctctccaccatctaattaggttgattggagttgatatcttccctcttcttgccagagctgaaaaatggagggtttcttgtatcagacaattgtggatcctttcggtgtttaatatatcagaagagaggaagtatttaaacgtcaaatcttttaatagacttaataatttaaagaaagtaagttatctgtttagtttttttatataattgggaaggggatagggattttgctgtgtgtatatgatacatagcagtaactcctggtgggtgggattggagggtgggaatgtgtgagggtgggtgggaggctaggtttttggctaggagttctgaaataggctcaggccacttttttcagacttttaagtgtgtatgtaagtgtgggtatgtgtgtttttaagtgtgtgtgtttaaaaataatgttttatcttccctccctgttccttaccgttttcattttccaacagtctactagagaaaaacatggttggccttgagaacataaaggaagaggcatgtatttgacatggtatttttccctttctttatgttataattgagtagtagccctctaatttgtagtttgggcaagtacagccaacaccctgactcttaaccttattatgagaacttcctttttacccctttttttgtttttgtgcaaaacagagatggggttgaggaaggagggttggcgagcaaggccagcttctgccctacagaattgggtgtgtcttttttttcaagtgaggctttgggaaagtgttcaaatgagagcagtcttaaggtctctaagagatggggaatgtgctatgtatatcctgcctgtgaaagcccaaaccatatgggagaagctagaggatactaaaaacaatgaaattgtgatttggaagtttagaacattgttttaaaaattacattataaatgtaagacatgctttttatgtgtatatccgaagggaaacagctacatcctcaagtttttgcagcctatatgacttgagattggagcttgtgaatttaacagtactggtgccatgagaatgagcaaagcctagccaatggatactattgtgtttagattgttcatctttggtagctttaggttcttgatcgaggttcttaagatttctaagtcctttataaaaataggtcaagagtcctgttgttatggaggcttgattatcccagatattaggagtgaacatttttaataaatctttcagaaaatcttggctagaaagaattctaagttagttgtctaaccactgaaaactacctagccagagatcatttaatgagatattctttgatcttcattgcattttttttgctctggaaaaggtggttcaatttgagtttgttttcatgatttgattgcagcttacttcatgccaaggattttttagggagaggtcgaattatttttcatttggaagtcatagggagacaggagttgtacttatgctgctacttgccaggaacaggttgggaagaaaattgtggctgttggaattgatgatgtactggcctaatatagaaaggaatttgtaggcaggagtaaacgttaactgacggtgggttagtgccctgcatcttgcatatttgaactgtctagagttcctgccattgctgggtataaaacgaggagctctctgttgacctgtaaatcattaatacttcttgacttagagtgtcacttcactttatagatgacattttcctctttccccttgatattttctatgttgtgttagataattggtagatatatagttgtggtttagtacatttagggcttctatttatttagattttgtttgttggagtctgtttccaaaagggaatgtgccatttagtctgcatctgtatctttgtggacttgatgatcactggtttgattttgaaaaatgtcttttccagcttttagttactctcatcaaatgtcacatattttctaatcacatgcactcctttaccacagaggcacataatcatttggcctcatagcagttatccatggccgtactgtagtaaagttccttagaactttgccaggagtgaactagaaaaaagtgcttactagggcctaagagttgctttgtgccgtgtagtccggcctttgcactagtagatcattgctgacataggtcagtttagagacctttctgtgttaatgcctcctggtactgtcttaagatacgtacagtgtctgtttttagatctatgcatatgtcatgaagctccttgtgggctctgcatgaagctgctgctttgtttttgggttaacagatgtgcctgtcaactagcatgtgtattgtccaaattccataaacttaaggtttttaagggctgtgtggtttctgagctctatgtgtctttcctatccttgtaccttcaaagggtgagaaatgagatttatacatccaaagttagtctgataaatatggctttttgtttctccatgtaacctagactgtcaaaaataagtgatggtgataagtaggcctggagcctcagcttctgtaaatctcattcctaaaattttgctagactcgtgttggcaaaaacaaatacctgtggattgtccttaaggcttttaatcagatacctgtgttgctgttagctgaactgtagtgaagcatcgatccaaatcggtcttctgaagtatcagttatgcttttgagtttagaaaatacttaggtgttagtctagtcttcccattcatgaatcagtgtatgtccatatcagagagcctcaacttcttttttcttcctttttaaaaatgattttagtgttttgatttagtgtatactacatagttcagtattattggctttaccagtgttgacagaaaaattttaaatctccagttgcaaacagcaatggattaggatatggaaataaaatcatggtgacatcactgctgagttatcttaaacctctgctacttaattctccatattgaaatgcatactcctccacatacatggcttccaagtaaaggcaattgtagaggggccctgtctatcccagtatggttggattttaaacatatctgtgtttccgttattttgggaactgattaatatttacaattttttttgtttatgagttattttgatactaagaaaagagagaatctagaacatcttgcagttgaaatacaaattttattcttttggtcttgggagaatttaagcagtctatgcaactcatcaaatggtgagaaatagccctccgaggttccagtaagctttcagtgactttgatacctccccaagtttcttgagttgctgcttgttaacacccagcttttaactgagtgtttgctcctgatggtttaggagattttcatgttgtatcacactgtcaagttttattttgtctttttatccctccgtggatgtgagtttgaaacaagcacggtacagtaatcctgcctgatagagtagtctggaatgagaattactttttgggtgagagagttctccattttaatgtttctaaagtttttcatatgaacttggcattggaaaagggaggtaaagaaaaaggacgtttactaaaagcagtgtctactcttcccctttgtgagtgtttattcatggctaatgaaaaaaagagaaggactcttgggttttgtgttgccatgttaagcatggagagggatgcttgacagcatgctaattgaagccagagcaagtatgtccttcatcaggtaatcaggaactcttcagttgaagctgaggaactaactgattagttgttgatcataatataattggttacaaagtggaagtgccagctggcttaagtacccaaagaaaagaatgcagcagcctaacttagtgttaccatatgttactgaatttgaaactgaccttttttcccaccctacttcacacacctaaaactcttttcttgtcagaccaaagagcgaaaagaaaaaaaaaagtaaaacactttaccaatctgtcactcaggtacaattttgtggtgagatttttgtctgttctctttgtattgctcttaagagtcctttctcagcatattattctgccattgcctctgtcttccttggggcacctcagctctggatgctacccctgggatatctactgctgttatgtgaatgataggaggtaagtgaccattatagtaagggctctttgtaaaaaaattcaaaaaatttaaaaaggatgtatacattttatagtctggctatcagtttgatatcttgctgtcaagtatgtttctcaatctgtatttatccatcccatcaataaatgttaatggtaaaacactca

SEQ ID NO: 123603 - DNA, 6917 bp, Homo sapiens
  Payload ID: 4266
  Gene Symbol: CCNT2
  Gene Name: cyclin T2
  Uniprot ID: O60583
  ENST ID: ENST00000264157
  CDS Start-End: 31-2223
aatgaaggagcgggcggaggaggaagtgtcatggcgtcgggccgtggagcttcttctcgctggttctttactcgggaacagctggagaacacgccgagccgccgctgcggagtggaggcggataaagagctctcgtgccgccagcaggcggccaacctcatccaggagatgggacagcgtctcaatgtctctcagcttacaataaacactgcgattgtttatatgcacaggttttatatgcaccattctttcaccaaattcaacaaaaatataatatcgtctactgcattatttttggctgcaaaagtggaagaacaggctcgaaaacttgaacatgttatcaaagtagcacatgcttgtcttcatcctctagagccactgctggatactaaatgtgatgcttaccttcaacagactcaagaactggttatacttgaaaccataatgctacaaactctaggttttgagatcaccattgaacacccacacacagatgtggtgaaatgtacccagttagtaagagcaagcaaggatttggcacagacatcctatttcatggctaccaacagtctgcatcttacaaccttctgtcttcagtacaaaccaacagtgatagcatgtgtatgcattcatttggcttgcaaatggtccaattgggagatccctgtatcaactgatggaaagcattggtgggaatatgtggatcctacagttactctagaattattagatgagctaacacatgagtttctacaaatattggagaaaacgcctaataggttgaagaagattcgaaactggagggctaatcaggcagctaggaaaccaaaagtagatggacaggtatcagagacaccacttcttggttcatctttggtccagaattccattttagtagatagtgtcactggtgtgcctacaaacccaagttttcagaaaccatctacatcagcattccctgcgccagtacctctaaattcaggaaatatttctgttcaagacagccatacatctgataatttgtcaatgctagcaacaggaatgccaagtacttcatacggtttatcatcacaccaggaatggcctcaacatcaagactcagcaaggacagaacagctatattcacagaaacaggagacatctttgtctggtagccagtacaacatcaacttccagcagggaccttctatatcactgcattcaggattacatcacagacctgacaaaatttcagatcattcttctgttaagcaagaatatactcataaagcagggagcagtaaacaccatgggccaatttccactactccaggaataattcctcagaaaatgtctttagataaatatagagaaaagcgtaaactagaaactcttgatctcgatgtaagggatcattatatagctgcccaggtagaacagcagcacaaacaagggcagtcacaggcagccagcagcagttctgttacttctcccattaaaatgaaaatacctatcgcaaatactgaaaaatacatggcagacaaaaaggaaaagagtgggtcactgaaattacggattccaataccacccactgataaaagcgccagtaaagaagaactgaaaatgaaaataaaagtttcttcttcagaaagacacagctcttctgatgaaggcagtgggaagagcaaacattcaagcccacatattagcagagaccataaggagaagcacaaggagcatccttcaagccgccaccacaccagcagccacaagcattcccactcgcatagtggcagcagcagcggtggcagtaaacacagtgccgacggaataccacccactgttctgaggagtcctgttggcctgagcagtgatggcatttcctctagctccagctcttcaaggaagaggctgcatgtcaatgatgcatctcacaaccaccactccaaaatgagcaaaagttccaaaagttcaggtagttcatctagttcttcctcctctgttaagcagtatatatcctctcacaactctgtttttaaccatcccttaccccctcctccccctgtcacataccaggtgggctacggacatctcagcaccctcgtgaaactggacaagaagccagtggagaccaacggtcctgatgccaatcacgagtacagtacaagcagccagcatatggactacaaagacacattcgacatgctggactcactgttaagtgcccaaggaatgaacatgtaataatttgtttaggtcaatttttcctttacttttttaatttaaaaattgttagaatggaaaaattccttctgatctagcagtggtaacccctgctgttgctgccactgcttcaatatttgtaagtgctgctttattcttcattctgaaaagaagagattatagtaaacaagtctttatctccacatatgatagtgttataaatactgtaaaagcatggaaggtgcaaaactcagtatttctacaattgcagctaagaacattaggatgaatggctggctgcttctaggaatataagatgcctcaagcattcattatttatgatttgaatactgtagctattttttgttgcttggcttttgaatgagtgtaaattgttttcttttgtgtatttatacttgtatgtatgatttgcatgtttcaatgataaagggataaaacagtatactgacaactgtttacaagaaagtggagaaaaatgtacatacatttttgtatgtttagatattaccgtaaatactcaggattggagctgcttgtaagtataacaatatacagaataactttattttatcttgtcagagtccatcactaatctaaaacaaaggtggcacttttttatgttaaccttaaactctaggccttactggaagccactgataggggacacttcactaccagatgtgtgcagtgcaacagatggtcatatacactgtgaggcactgaaattttgccttcagaggttctgaccagattggctgctgaaatagcccctaactttctgaaggcttgaagaggaaaaaataaagtttacatactcttgatgtgaagtgcatttaaatgtttgttggcttgttgcagttctatgaaacagagctgttaataatggttatgtggattactgtgatttgaaaactaaattcacaataacttacctagtagagatttagtgagttgtttcctttaaagaattttacactacatattttaatagtaaacagggatcacttttcctttagcattcagaatgacaccatattcttaaatatactccttccctgaagcgtgtttgtgtgtgatgccatatttctttttcaggtaaatgtagtcttccttataaaaatgaaattaaacctatgctctcaattcttttatattctaacaataaataaaaaagaaaagattactgactgtgcattgtacctgtatttatagtttatggttatcaggaagctctgtaagaaagaaaaggtcagcctcccaggcaaaccagtagtggaggttttacatttgtttgcacatctcagtatatttctgttgaggtaaagtttgcacagtcatctgacttctgatcaagcattagattttaacttgtttagattttgtcttaaacaccagtaatatggctcttgtttatcagctaatcttgaatttattctgtggtaaatcttttgagttgttgagtatatttgagattgattggattcgacctcttgttgaactgaaaacttaattttttctctgtatttttgttacaaagccactgatacgtgcacaattgtaattaagtatgttgcagttgtaaatattagagtttaatctcatgctctacctttatttagcaattacctaatttgccagtagctttataatttttaaagataattgttcattattttgtcaatgttatttgaacttggggtacttaggagcctctttgtagggactgtgcctaggtagcatgtcctaacatttgttctggtcttgcataacttcagtaatctttgtcattatatgtaactttgttgctctgtatggcataatattgtatccataaacatggtaattttgatacagttatacttttacagtggtacataatccaaggactagtatagaattaagctgagtgcaagatgagggagggaagggctttcttggtaatttagatgtgaaacctctacagagctatcatgtaaaaactacataaggtggttgtgctactgtataattgggggtgataataccaggaattttaataagattttgtaaagaatatccagaaaagtagtgaacttattttcagtagacatagaaaacaatgtgaatatttaaggtctgtgactatagttaaacttcactaagaatttgcagaattgttttgagatgtgtgaataaaggtaattttattgaatcttcattggtgctaatgatggacagttaaaaagatagctagtgtatattgttatgggtcagtacttattagtacttccaaaattgaatttgaaatgctatgtattcacttttcactctgtaaatgtaattctttacaatgactttatttattaaagggcagccagttgtcatttttacaggattgtgtgagctattcaaactcttcaacccctgaacagggtattaagcttccaaaataatgatggggataaatatggaaatcctttttaagttgtatttccattaaacaaaaacccttataattcatactatcatgaatttgctttatccatctcatttgcataacagttcatctgtctggtcccattaggctctaccaaagaaagactctgatgagtggacattattactgtgactcttgtaagtagccataaataaaccaaaatagtatcaaatttaggtatgaaattccacatgtgcaaagtactgttaaggtgataacatttttgatgagatttaaaaaaatatttgaaatattaaaaagcattatctttaaacatcctataaaagagtgagtcatttttaagttgtgttttccctagatcactgatttgttacctttacacagaagcacattgcaaagaaaggctttatttctacctcttccattcagttttccaatattgagctgtgtccctctgaatatttgccttagctatttcaaaataggtattttcagaaccaaagcaaagggtggtttgttcactgaaacattcttagaggcctacttaacgggcggcagtatccggtagtggtaaaacctcacagtttcctaattgcaggtatgtaaataccaaaaaagtcctgttgtcagccctaggtttatctttgaaagcagttaaatgtgcaccttggtcttcctccgtgtgttcagattccttctggttaaagttcttattcagagtcatctaaaagaaatttctaacatgatgtatggtttcttgaatgtcatgagtggctgcgtatattgctttgtagcaacagattgtattaataattaatagaatacctaatttttttggcctatcctctttgaactagaaatgactacttgagggctatttcagagaaccaatatgaaatgtttttgttagtacaaaataccattgccttaaaaggtttcaagcacattttcttttctatttgagaacttaaattgctgacttgtattcgttaagcaaccttagaaataaaccactgcttatatctgcatgaatattatgcatttcatgagtacagttagttgattagatatttcagggttttgcattttctatagacatggggacttttttaacatggtaacgtcttaggaaaaccattctctcaaggtattacaccatttccaattttatccaaatgaaaagcatatctgcttaaatttaggatgtctttgctgagaatatttggaggctcttgttaggaagaatcatggattcagtatttctaacctgattactgcctcagaggctgtcttgaagggagacagtaggattcactgactacctttacccagatgagggatcaacaaatctcacacttaaactaaatgagttgacaggacaataggtgctaatctcatgtgccctaagatggacttatttagatagggatttttgcattggaaaagcagcacattctctgaccttgggtaccaagctatgatactaatttgagaatcacattctgatacgttaatatcagaaatcagtgagcaacctaattgctgtaagctgacatacatggaagccgaaatcaaaaggttgcttttgttagtttccctggagcatctatttttgtaatacattttgccagtgggactgaaaagctcaaaatgttttagacctaatatcatacattaattttctgctctgcagtgtcaatttgggcacagccagtttttacctctgtggcaccttctttataatttactgttacctattctgcctgacagattgattaagtaggttgataagatccatcgaagattgaatggctaggagtaattctgttctcgtataggcaacttaacttcactgtggaatccatttatctcaaagtttgagggctgtctactttattttcaagtttggggcggaaactcaaaatcccgagcattgccactttagtagtttgtttgatttgcctattgtttaataatgagtacattcttattaagtgatgagtacattcttaattttaaggtatgtttttttcaagcagcttcattttattaggaaaaatacatactcatttgttgtaaacagtgattgtggggtttcattttctgaatgtactcaaaactcccaacaacaattgaacaggatgtttgctaatagaaaatctaaaacaggaatatgtgtatatggcatgaattagtcattgactttaagcttcttatccatacaaggaactaataaaatgtttattgacaacataaa

SEQ ID NO: 123604 - DNA, 4491 bp, Homo sapiens
  Payload ID: 4266
  Gene Symbol: CCNT2
  Gene Name: cyclin T2
  Uniprot ID: O60583
  ENST ID: ENST00000295238
  CDS Start-End: 31-2022
aatgaaggagcgggcggaggaggaagtgtcatggcgtcgggccgtggagcttcttctcgctggttctttactcgggaacagctggagaacacgccgagccgccgctgcggagtggaggcggataaagagctctcgtgccgccagcaggcggccaacctcatccaggagatgggacagcgtctcaatgtctctcagcttacaataaacactgcgattgtttatatgcacaggttttatatgcaccattctttcaccaaattcaacaaaaatataatatcgtctactgcattatttttggctgcaaaagtggaagaacaggctcgaaaacttgaacatgttatcaaagtagcacatgcttgtcttcatcctctagagccactgctggatactaaatgtgatgcttaccttcaacagactcaagaactggttatacttgaaaccataatgctacaaactctaggttttgagatcaccattgaacacccacacacagatgtggtgaaatgtacccagttagtaagagcaagcaaggatttggcacagacatcctatttcatggctaccaacagtctgcatcttacaaccttctgtcttcagtacaaaccaacagtgatagcatgtgtatgcattcatttggcttgcaaatggtccaattgggagatccctgtatcaactgatggaaagcattggtgggaatatgtggatcctacagttactctagaattattagatgagctaacacatgagtttctacaaatattggagaaaacgcctaataggttgaagaagattcgaaactggagggctaatcaggcagctaggaaaccaaaagtagatggacaggtatcagagacaccacttcttggttcatctttggtccagaattccattttagtagatagtgtcactggtgtgcctacaaacccaagttttcagaaaccatctacatcagcattccctgcgccagtacctctaaattcaggaaatatttctgttcaagacagccatacatctgataatttgtcaatgctagcaacaggaatgccaagtacttcatacggtttatcatcacaccaggaatggcctcaacatcaagactcagcaaggacagaacagctatattcacagaaacaggagacatctttgtctggtagccagtacaacatcaacttccagcagggaccttctatatcactgcattcaggattacatcacagacctgacaaaatttcagatcattcttctgttaagcaagaatatactcataaagcagggagcagtaaacaccatgggccaatttccactactccaggaataattcctcagaaaatgtctttagataaatatagagaaaagcgtaaactagaaactcttgatctcgatgtaagggatcattatatagctgcccaggtagaacagcagcacaaacaagggcagtcacaggcagccagcagcagttctgttacttctcccattaaaatgaaaatacctatcgcaaatactgaaaaatacatggcagacaaaaaggaaaagagtgggtcactgaaattacggattccaataccacccactgataaaagcgccagtaaagaagaactgaaaatgaaaataaaagtttcttcttcagaaagacacagctcttctgatgaaggcagtgggaagagcaaacattcaagcccacatattagcagagaccataaggagaagcacaaggagcatccttcaagccgccaccacaccagcagccacaagcattcccactcgcatagtggcagcagcagcggtggcagtaaacacagtgccgacggaataccacccactgttctgaggagtcctgttggcctgagcagtgatggcatttcctctagctccagctcttcaaggaagaggctgcatgtcaatgatgcatctcacaaccaccactccaaaatgagcaaaagttccaaaagttcaggtgggctacggacatctcagcaccctcgtgaaactggacaagaagccagtggagaccaacggtcctgatgccaatcacgagtacagtacaagcagccagcatatggactacaaagacacattcgacatgctggactcactgttaagtgcccaaggaatgaacatgtaataatttgtttaggtcaatttttcctttacttttttaatttaaaaattgttagaatggaaaaattccttctgatctagcagtggtaacccctgctgttgctgccactgcttcaatatttgtaagtgctgctttattcttcattctgaaaagaagagattatagtaaacaagtctttatctccacatatgatagtgttataaatactgtaaaagcatggaaggtgcaaaactcagtatttctacaattgcagctaagaacattaggatgaatggctggctgcttctaggaatataagatgcctcaagcattcattatttatgatttgaatactgtagctattttttgttgcttggcttttgaatgagtgtaaattgttttcttttgtgtatttatacttgtatgtatgatttgcatgtttcaatgataaagggataaaacagtatactgacaactgtttacaagaaagtggagaaaaatgtacatacatttttgtatgtttagatattaccgtaaatactcaggattggagctgcttgtaagtataacaatatacagaataactttattttatcttgtcagagtccatcactaatctaaaacaaaggtggcacttttttatgttaaccttaaactctaggccttactggaagccactgataggggacacttcactaccagatgtgtgcagtgcaacagatggtcatatacactgtgaggcactgaaattttgccttcagaggttctgaccagattggctgctgaaatagcccctaactttctgaaggcttgaagaggaaaaaataaagtttacatactcttgatgtgaagtgcatttaaatgtttgttggcttgttgcagttctatgaaacagagctgttaataatggttatgtggattactgtgatttgaaaactaaattcacaataacttacctagtagagatttagtgagttgtttcctttaaagaattttacactacatattttaatagtaaacagggatcacttttcctttagcattcagaatgacaccatattcttaaatatactccttccctgaagcgtgtttgtgtgtgatgccatatttctttttcaggtaaatgtagtcttccttataaaaatgaaattaaacctatgctctcaattcttttatattctaacaataaataaaaaagaaaagattactgactgtgcattgtacctgtatttatagtttatggttatcaggaagctctgtaagaaagaaaaggtcagcctcccaggcaaaccagtagtggaggttttacatttgtttgcacatctcagtatatttctgttgaggtaaagtttgcacagtcatctgacttctgatcaagcattagattttaacttgtttagattttgtcttaaacaccagtaatatggctcttgtttatcagctaatcttgaatttattctgtggtaaatcttttgagttgttgagtatatttgagattgattggattcgacctcttgttgaactgaaaacttaattttttctctgtatttttgttacaaagccactgatacgtgcacaattgtaattaagtatgttgcagttgtaaatattagagtttaatctcatgctctacctttatttagcaattacctaatttgccagtagctttataatttttaaagataattgttcattattttgtcaatgttatttgaacttggggtacttaggagcctctttgtagggactgtgcctaggtagcatgtcctaacatttgttctggtcttgcataacttcagtaatctttgtcattatatgtaactttgttgctctgtatggcataatattgtatccataaacatggtaattttgatacagttatacttttacagtggtacataatccaaggactagtatagaattaagctgagtgcaagatgagggagggaagggctttcttggtaatttagatgtgaaacctctacagagctatcatgtaaaaactacataaggtggttgtgctactgtataattgggggtgataataccaggaattttaataagattttgtaaagaatatccagaaaagtagtgaacttattttcagtagacatagaaaacaatgtgaatatttaaggtctgtgactatagttaaacttcactaagaatttgcagaattgttttgagatgtgtgaataaaggtaattttattgaatcttcattggtgctaatgatggacagttaaaaagatagctagtgtatattgttatgggtcagtacttattagtacttccaaaattgaatttgaaatgctatgtattcacttttcactctgtaaatgtaattctttacaatgactttatttattaaagggcagccagttgtcattttta

SEQ ID NO: 123605 - DNA, 638 bp, Homo sapiens
  Payload ID: 4266
  Gene Symbol: CCNT2
  Gene Name: cyclin T2
  ENST ID: ENST00000452521
  CDS Start-End: 1-448
caacagtctgcatcttacaaccttctgtcttcagtacaaaccaacagtgatagcatgtgtatgcattcatttggcttgcaaatggtccaattgggagatccctgtatcaactgatggaaagcattggtgggaatatgtggatcctacagttactctagaattattagatgagctaacacatgagtttctacaaatattggagaaaacgcctaataggttgaagaagattcgaaactggagggctaatcaggcagctaggaaaccaaaagtagatggacaggtgggctacggacatctcagcaccctcgtgaaactggacaagaagccagtggagaccaacggtcctgatgccaatcacgagtacagtacaagcagccagcatatggactacaaagacacattcgacatgctggactcactgttaagtgcccaaggaatgaacatgtaataatttgtttaggtcaatttttcctttacttttttaatttaaaaattgttagaatggaaaaattccttctgatctagcagtggtaacccctgctgttgctgccactgcttcaatatttgtaagtgctgctttattcttcattctgaaaagaagagattatagtaaacaagtctttatctccacatatgat

SEQ ID NO: 123606 - DNA, 663 bp, Homo sapiens
  Payload ID: 4266
  Gene Symbol: CCNT2
  Gene Name: cyclin T2
  ENST ID: ENST00000446247
  CDS Start-End: 271-663
tgttggtggcggaggccggagtcgcacgcctacgagactgcgcggacccgcccaaaaggaaaatggaagtagtggcgtgaggctgcgacagtgaagataatatcgtctactgcattatttttggctgcaaaagtggaagaacaggctcgaaaacttgaacatgttatcaaagtagcacatgcttgtcttcatcctctagagccactgctggatactaaatgtgatgcttaccttcaacagactcaagaactggttatacttgaaaccataatgctacaaactctagcaagcaaggatttggcacagacatcctatttcatggctaccaacagtctgcatcttacaaccttctgtcttcagtacaaaccaacagtgatagcatgtgtatgcattcatttggcttgcaaatggtccaattgggagatccctgtatcaactgatggaaagcattggtgggaatatgtggatcctacagttactctagaattattagatgagctaacacatgagtttctacaaatattggagaaaacgcctaataggttgaagaagattcgaaactggagggctaatcaggcagctaggaaaccaaaagtagatggacaggtatcagagacaccacttcttggttcatctttggtccagaattccattttagtagat

SEQ ID NO: 123607 - DNA, 2363 bp, Homo sapiens
  Payload ID: 4266
  Gene Symbol: CCNT2
  Gene Name: cyclin T2
  ENST ID: ENST00000452839
  CDS Start-End: 34-555
gtgaatgaaggagcgggcggaggaggaagtgtcatggcgtcgggccgtggagcttcttctcgctggttctttactcgggaacagctggagaacacgccgagccgccgctgcggagtggaggcggataaagagctctcgtgccgccagcaggcggccaacctcatccaggagatgggacagcgtctcaatgtctctcagcttacaataaacactgcgattgtttatatgcacaggttttatatgcaccattctttcaccaaattcaacaaaaatataatatcgtctactgcattatttttggctgcaaaagtggaagaacaggctcgaaaacttgaacatgttatcaaagtagcacatgcttgtcttcatcctctagagccactgctggatactaaatgtgatgcttaccttcaacagactcaagaactggttatacttgaaaccataatgctacaaactctaggttttgagatcaccattgaacacccacacacagatgtggtgaaatgtacccagttagtaagagatctttgggggatagcaagaaacatttgagtgaatgttgttgaagattttcagtagtatagaaaatgatggcgctcttgtgatatttcaagcaaggatttggcacagacatcctatttcatggctaccaacagtctgcatcttacaaccttctgtcttcagtacaaaccaacagtgatagcatgtgtatgcattcatttggcttgcaaatggtccaattgggagatccctgtatcaactgatggaaagcattggtgggaatatgtggatcctacagttactctagaattattagatgagctaacacatgagtttctacaaatattggagaaaacgcctaataggttgaagaagattcgaaactggagggctaatcaggcagctaggaaaccaaaagtagatggacaggtatcagagacaccacttcttggttcatctttggtccagaattccattttagtagatagtgtcactggtgtgcctacaaacccaagttttcagaaaccatctacatcagcattccctgcgccagtacctctaaattcaggaaatatttctgttcaagacagccatacatctgataatttgtcaatgctagcaacaggaatgccaagtacttcatacggtttatcatcacaccaggaatggcctcaacatcaagactcagcaaggacagaacagctatattcacagaaacaggagacatctttgtctggtagccagtacaacatcaacttccagcagggaccttctatatcactgcattcaggattacatcacagacctgacaaaatttcagatcattcttctgttaagcaagaatatactcataaagcagggagcagtaaacaccatgggccaatttccactactccaggaataattcctcagaaaatgtctttagataaatatagagaaaagcgtaaactagaaactcttgatctcgatgtaagggatcattatatagctgcccaggtagaacagcagcacaaacaagggcagtcacaggcagccagcagcagttctgttacttctcccattaaaatgaaaatacctatcgcaaatactgaaaaatacatggcagacaaaaaggaaaagagtgggtcactgaaattacggattccaataccacccactgataaaagcgccagtaaagaagaactgaaaatgaaaataaaagtttcttcttcagaaagacacagctcttctgatgaaggcagtgggaagagcaaacattcaagcccacatattagcagagaccataaggagaagcacaaggagcatccttcaagccgccaccacaccagcagccacaagcattcccactcgcatagtggcagcagcagcggtggcagtaaacacagtgccgacggaataccacccactgttctgaggagtcctgttggcctgagcagtgatggcatttcctctagctccagctcttcaaggaagaggctgcatgtcaatgatgcatctcacaaccaccactccaaaatgagcaaaagttccaaaagttcaggtgggctacggacatctcagcaccctcgtgaaactggacaagaagccagtggagaccaacggtcctgatgccaatcacgagtacagtacaagcagccagcatatggactacaaagacacattcgacatgctggactcactgttaagtgcccaaggaatgaacatgtaataatttgtttaggtcaatttttcctttacttttttaatttaaaaattgttagaatggaaaaattccttctgatctagcagtggtaacccctgctgttgctgccactgcttcaatatttgtaagtgctgctttattcttcattctgaaaaga

SEQ ID NO: 123608 - DNA, 811 bp, Homo sapiens
  Payload ID: 4266
  Gene Symbol: CCNT2
  Gene Name: cyclin T2
  ENST ID: ENST00000417175
  CDS Start-End: 9-530
gaagtgtcatggcgtcgggccgtggagcttcttctcgctggttctttactcgggaacagctggagaacacgccgagccgccgctgcggagtggaggcggataaagagctctcgtgccgccagcaggcggccaacctcatccaggagatgggacagcgtctcaatgtctctcagcttacaataaacactgcgattgtttatatgcacaggttttatatgcaccattctttcaccaaattcaacaaaaatataatatcgtctactgcattatttttggctgcaaaagtggaagaacaggctcgaaaacttgaacatgttatcaaagtagcacatgcttgtcttcatcctctagagccactgctggatactaaatgtgatgcttaccttcaacagactcaagaactggttatacttgaaaccataatgctacaaactctaggttttgagatcaccattgaacacccacacacagatgtggtgaaatgtacccagttagtaagaggagaatgctttattgcaacttttagctgactagatgcttaacttagtaacaagtttagcccttgtaactggctagctaaaagcaaatcggcttgtttctcagatctttgggggatagcaagaaacatttgagtgaatgttgttgaagattttcagtagtatagaaaatgatggcgctcttgtgatatttgtaagtacaagcaaggatttggcacagacatcctatttcatggctaccaacaggttgttatcctgaccctctttgttgcactgttgtagcacactatagcttcctttaatgcagggccccc

SEQ ID NO: 123609 - DNA, 5414 bp, Homo sapiens
  Payload ID: 4266
  Gene Symbol: CCNT2
  Gene Name: cyclin T2
  ENST ID: ENST00000419781
  CDS Start-End: 621-1142
ggagactgttggtggcggaggccggagtcgcacgcctacgagactgcgcggacccgcccaaaaggaaaatggaagtagtggcgtgaggctgcgacagtgaaggttatttttctctttttaaagggccgctagacctcccgtctaaaggaagcgcccgacgggcctccgaagtacacgcccaggcccccacagcgcagccgcccgaccgcctctcttcacaccggccagagtccaccctctcccactttcccctcccctcccctccccgccccttccctccccaccccttcgccccgccaaccctagacccggcatgcgctgcgccgaccttttccttccgagccgacctctccaccttcggcgcctcccaatgacaagcggcgcggagcattgtggtcccgtgcgcaagagcgaggccgagggcagaaaaagaaagcaaaagactagggcgagtcggtagagcgggccccgcgcatgcgcaagggcggaggcggtggtgaaaaagggtggtgcgtggtctacggcgagcggagtggggcggggtcgcgcgccttggcggggagtccgcgagccaggaggggcggggggtgaatgaaggagcgggcggaggaggaagtgtcatggcgtcgggccgtggagcttcttctcgctggttctttactcgggaacagctggagaacacgccgagccgccgctgcggagtggaggcggataaagagctctcgtgccgccagcaggcggccaacctcatccaggagatgggacagcgtctcaatgtctctcagcttacaataaacactgcgattgtttatatgcacaggttttatatgcaccattctttcaccaaattcaacaaaaatataatatcgtctactgcattatttttggctgcaaaagtggaagaacaggctcgaaaacttgaacatgttatcaaagtagcacatgcttgtcttcatcctctagagccactgctggatactaaatgtgatgcttaccttcaacagactcaagaactggttatacttgaaaccataatgctacaaactctaggttttgagatcaccattgaacacccacacacagatgtggtgaaatgtacccagttagtaagagatctttgggggatagcaagaaacatttgagtgaatgttgttgaagattttcagtagtatagaaaatgatggcgctcttgtgatatttcaagcaaggatttggcacagacatcctatttcatggctaccaacaggttgttatcctgaccctctttgttgcactgttgtagcacactatagcttcctttaatgcagggccccctcaatgtgtctcttacccttgttgcgacaggagactggaccatctactgtggtggtaccttcctgtttgctttgcggtgtattgtacaagggactttgggcacagaggggttaaatgcacaatgtgaagtgtagtggtgctttctgatgacatattctcgatttgtgagtgcataagtctaaaattggtagcctgaatagcagctaaagattacaaagagctaaacttaacgtagaaattcgagcaacttgtctgcatcttacaaccttctgtcttcagtacaaaccaacagtgatagcatgtgtatgcattcatttggcttgcaaatggtccaattgggagatccctgtatcaactgatggaaagcattggtgggaatatgtggatcctacagttactctagaattattagatgagctaacacatgagtttctacaaatattggagaaaacgcctaataggttgaagaagattcgaaactggagggctaatcaggcagctaggaaaccaaaagtagatggacaggtatcagagacaccacttcttggttcatctttggtccagaattccattttagtagatagtgtcactggtgtgcctacaaacccaagttttcagaaaccatctacatcagcattccctgcgccagtacctctaaattcaggaaatatttctgttcaagacagccatacatctgataatttgtcaatgctagcaacaggaatgccaagtacttcatacggtttatcatcacaccaggaatggcctcaacatcaagactcagcaaggacagaacagctatattcacagaaacaggagacatctttgtctggtagccagtacaacatcaacttccagcagggaccttctatatcactgcattcaggattacatcacagacctgacaaaatttcagatcattcttctgttaagcaagaatatactcataaagcagggagcagtaaacaccatgggccaatttccactactccaggaataattcctcagaaaatgtctttagataaatatagagaaaagcgtaaactagaaactcttgatctcgatgtaagggatcattatatagctgcccaggtagaacagcagcacaaacaagggcagtcacaggcagccagcagcagttctgttacttctcccattaaaatgaaaatacctatcgcaaatactgaaaaatacatggcagacaaaaaggaaaagagtgggtcactgaaattacggattccaataccacccactgataaaagcgccagtaaagaagaactgaaaatgaaaataaaagtttcttcttcagaaagacacagctcttctgatgaaggcagtgggaagagcaaacattcaagcccacatattagcagagaccataaggagaagcacaaggagcatccttcaagccgccaccacaccagcagccacaagcattcccactcgcatagtggcagcagcagcggtggcagtaaacacagtgccgacggaataccacccactgttctgaggagtcctgttggcctgagcagtgatggcatttcctctagctccagctcttcaaggaagaggctgcatgtcaatgatgcatctcacaaccaccactccaaaatgagcaaaagttccaaaagttcaggtagttcatctagttcttcctcctctgttaagcagtatatatcctctcacaactctgtttttaaccatcccttaccccctcctccccctgtcacataccaggtgggctacggacatctcagcaccctcgtgaaactggacaagaagccagtggagaccaacggtcctgatgccaatcacgagtacagtacaagcagccagcatatggactacaaagacacattcgacatgctggactcactgttaagtgcccaaggaatgaacatgtaataatttgtttaggtcaatttttcctttacttttttaatttaaaaattgttagaatggaaaaattccttctgatctagcagtggtaacccctgctgttgctgccactgcttcaatatttgtaagtgctgctttattcttcattctgaaaagaagagattatagtaaacaagtctttatctccacatatgatagtgttataaatactgtaaaagcatggaaggtgcaaaactcagtatttctacaattgcagctaagaacattaggatgaatggctggctgcttctaggaatataagatgcctcaagcattcattatttatgatttgaatactgtagctattttttgttgcttggcttttgaatgagtgtaaattgttttcttttgtgtatttatacttgtatgtatgatttgcatgtttcaatgataaagggataaaacagtatactgacaactgtttacaagaaagtggagaaaaatgtacatacatttttgtatgtttagatattaccgtaaatactcaggattggagctgcttgtaagtataacaatatacagaataactttattttatcttgtcagagtccatcactaatctaaaacaaaggtggcacttttttatgttaaccttaaactctaggccttactggaagccactgataggggacacttcactaccagatgtgtgcagtgcaacagatggtcatatacactgtgaggcactgaaattttgccttcagaggttctgaccagattggctgctgaaatagcccctaactttctgaaggcttgaagaggaaaaaataaagtttacatactcttgatgtgaagtgcatttaaatgtttgttggcttgttgcagttctatgaaacagagctgttaataatggttatgtggattactgtgatttgaaaactaaattcacaataacttacctagtagagatttagtgagttgtttcctttaaagaattttacactacatattttaatagtaaacagggatcacttttcctttagcattcagaatgacaccatattcttaaatatactccttccctgaagcgtgtttgtgtgtgatgccatatttctttttcaggtaaatgtagtcttccttataaaaatgaaattaaacctatgctctcaattcttttatattctaacaataaataaaaaagaaaagattactgactgtgcattgtacctgtatttatagtttatggttatcaggaagctctgtaagaaagaaaaggtcagcctcccaggcaaaccagtagtggaggttttacatttgtttgcacatctcagtatatttctgttgaggtaaagtttgcacagtcatctgacttctgatcaagcattagattttaacttgtttagattttgtcttaaacaccagtaatatggctcttgtttatcagctaatcttgaatttattctgtggtaaatcttttgagttgttgagtatatttgagattgattggattcgacctcttgttgaactgaaaacttaattttttctctgtatttttgttacaaagccactgatacgtgcacaattgtaattaagtatgttgcagttgtaaatattagagtttaatctcatgctctacctttatttagcaattacctaatttgccagtagctttataatttttaaagataattgttcattattttgtcaatgttatttgaacttggggtacttaggagcctctttgtagggactgtgcctaggtagcatgtcctaacatttgttctggtcttgcataacttcagtaatctttgtcattatatgtaactttgttgctctgtatggcataatattgtatccataaacatggtaattttgatacagttatacttttacagtggtacataatccaaggactagtatagaattaagctgagtgcaagatgagggagggaagggctttcttggtaatttagatgtgaaacctctacagagctatcatgtaaaaactacataaggtggttgtgctactgtataattgggggtgataataccaggaattttaataagattttgtaaagaatatccagaaaagtagtgaacttattttcagtagacatagaaaacaatgtgaatatttaaggtctgtgactatagttaaacttcactaagaatttgcagaattgttttgagatgtgtgaataaaggtaattttattgaatctt

SEQ ID NO: 123610 - DNA, 632 bp, Homo sapiens
  Payload ID: 4266
  Gene Symbol: CCNT2
  Gene Name: cyclin T2
  ENST ID: ENST00000438691
  CDS Start-End: 1-202
gatccctgtatcaactgatggaaagcattggtgggaatatgtggatcctacagttactctagaattattagatgagctaacacatgagtttctacaaatattggagaaaacgcctaataggttgaagaagattcgaaactggagggtaagagaattgacagggtttaacagaatttcagtcttttatgtaacatttacatagctaaccagtttgaatttttgtggttaaataatctttgcagtattcctgaataattcaacgtatctcaagttacatatactcacatattcaactactgagtccagtggactttgctaaagtacattatacttttaaaaaattttttgcagtgattatgacaaaagtatcctcttcattttacaaatggggaaactgaagcctagacaagttaaattactttctgaagtgctgggctaggatttaacttgtatctgattctaaaatgggtgttttcaattttttatagccttttatgcctctaaggcatttatttactgacaacataaaatcttgaaccccaggtcattttatttccatatgtttaatatataatgtttttaatatataacttttataagacaagaaatttgcattaaattattttgctata

SEQ ID NO: 123611 - DNA, 4768 bp, Homo sapiens
  Payload ID: 4267
  Gene Symbol: CCNY
  Gene Name: cyclin Y
  Uniprot ID: Q8ND76
  ENST ID: ENST00000265375
  CDS Start-End: 406-1269
aggccccgccgccgccgccgctgctgacccggcggccggccgccgttccgccccctcccgtggcggcgagcgggcgggcctccccacacgcccccgccgcccgcgccccgcgtccacccgcgccccgctcccggggactgggagaacaggatagcagcaggagtcggggggccgccgaagatggggaacactacctcgtgctgcgtgtcgtccagtcccaagctccggaggaatgcccactcccggctggagtcctaccggccagacacggacctgagccgcgaggacacgggctgcaacctgcagcacatcagcgaccgggagaacatagacggtgaccccagtggctgaaagcaggagaaagtgtttcatcacgggccctctccttctgaatactatttgaacatggaattcaatccttcagatcatcctcgggccagcacaatattcctcagtaaatctcagacggacgtgagagaaaaacgcaagagtctcttcattaaccatcatcctccaggacaaatagcaaggaaatacagttcctgctccaccattttcctagatgatagcacagtcagtcaaccaaacctcaagtatacaattaaatgtgtcgctcttgcaatatattatcacatcaaaaacagggacccagatggaaggatgctcttagatatttttgatgaaaatcttcaccctctttcgaaatccgaagtgccaccagattatgacaaacacaacccagagcagaagcagatttaccggttcgttcggacactgttcagtgctgctcagctgacggctgaatgtgccatcgtcaccctggtgtaccttgaaagacttttaacatacgcagagatagatatctgtccggccaactggaagcggattgttttaggggcgatcctgctggcctccaaggtgtgggatgaccaggctgtatggaatgtggattactgccagatcctgaaagacatcacggtggaggacatgaacgagctagagcgacagtttcttgaattgctgcagttcaacatcaatgttccttccagtgtctatgccaagtattattttgatcttcgttctctggcagaagcgaacaacctgagctttcccttggagcccctgagcagggagagggctcacaagcttgaggccatctctcgcctctgcgaggacaagtacaaggacctaagaagatccgcgaggaagcgctcagccagtgcagacaacctgactctgccccggtggtccccagccatcatctcttaactacggaggcccgccggaggccacaccatcccttagtttctcctttagtttgagaaaagacagacttggggtgggtttgtttttgttttttctttccttttctttttttacgcatagctccgtcaagctgcctggatgagcgcccatgcagcaaggcttggaggaagcgtcagtgccctggagatcccagctcgctctccccactgtcagcaacagcacttccttcgtggaggaagtggactcgaatcctggaggaggaaataaagggaaagggaagtcgtggagaggcagggaaaatggttaagcagcccggccctctggagtccccatgggggcggtagctgaagttggcgagcgcagcggtggatgcagagctggctgcacccagggctgggccagtgtgtcctgtaagacttcttgcattccttctgctgcttttttgggatgggggtatttttgttcatttgtttttgccctgttttgattttggtcccacagagcaggggatgtagtttgtacccaccatggcgcagacttccaaataaatagtactggtcatttctctctgcactatttctgcgcgctgtcttctgagctttcttcctcaccagtgggctgtgcttgttccatttctgtacacccttattttataccgtttttcttcaacaatggcgaaattgactgtagtgctgaaccaaaagtatccctttccctccttattcctcaccccaagaacattctagatcacatgggtgcttgtgccttccgattttcttgcatttgtttttttcctgacctgaagttgttgttacaaaatcagtcagactttgtgggctgaaggacacggtgcagcagagggtgtccctgtgagagttctgcagagtgctgggcatgtgcctggaactaccgagtaggagccatttctttgtacccctgcctaatccattcctctccttccaagtccattgttgcaagcaatattcttctcaatttttatatgtttactttaaatcaaagttagtctatttgtataaaatttttaaaaaatctaaaagaaaaagaaaaaaaacaagggtgggttgggtattccagtgggaagatcattgaagggaaaaatgttactatttactgaggtatttttcacagaatgattgaattaaaaaaaactcaacttgcattttcattgtgggtgcttagagaagttctacaaaattcaaactgtgaaggtttatgcttcattaattatgaccatactttttcattttctgacgatccctgatttccttatggactcaataagaatcttttatatcaagtaaaatgaaagttgatgatagaatatcaaatagtgaatttgatatgaaatctaagagtgtgagtcacttgcatatgtaatgctttgggtttttgcatattttcttaggtcacagtgacaggtttctgagttgtttcccttttcaagtctctgggaggccagtggcagcagcaggtctgtgtttcaccttcttcccatgtgagcttggaaaactttggcatcttaattagtcttgaatcatacacctgatccccaaacattgcctgctctcaatgaaacatgctttggaaatggaagggactcagaaagtcgaaatcccaagaactccaagccaaaagtgttaggttttagtgaaatttgtgtcaggtataagcatacctgtttgggccagaattattatcacagcctttctgacccaaactttcaaaagcaaataaacagcatataaaacgttaattatctttccattgtaattgtgatgatctactctgtatgggtaccaaaatcaccttctctcttcaagtcaaagttgaatttagaactttgaatacaggtcaaaaaatgtagaaaatatcattttatattccctaatctatatagctgaaaaagggttgtattttcttagctgaatatgaatacctcttaaacataaattagttcctctccagtgaagtatcttattttaccaatccatttcaggaaagaggttctgctgccgtaaaggcagaaattttatttttatcccttttatttgaatgagagatttgaaaatcgaattatgtaaatatttcaatgcatctgctattattttgtggagtttattaaactactttaaaaaaattgtatagtctatttattgtatgtatgtacatacagtctgatacctaaaatttaaagtggattccataaaaccagactcaagtcttgtttagactactgaatactgttttagcctgtgccctggattctacctctgtataggaaaattttccatattcattaattagtgttgatctgtattaattggttatgtttcttgcactaaggatgtttaaaactccgctgtaagtgtagattttagttttactggcaggatgaatcacttgacacataggtagatacttgaggttcattttcttttctttttctacatgatgatgaatagttatgttttcttctctgatttgttcaaagtttgccaaaagaaaacacaaaaccagtacagtacttactgataaatcgtagtgactgtaatttgtttgtaaggcgaattaatgctctacaattaaagctggattactattgaggaacacattgtcttagtgtagtttttgaatggaaagtttttgtcattaaggatgaaggaaacgacacaatttgttactttaattttatatttgatttaaacaacaaataaagtcattgggacaataaatatatatcccgatgaatctttttgatttgttttacttttcttatttttttttttttaactagaaaaagggaaagaagaagtcaggagtttaaaaccaaattggagggcagatgagaaatcctgccaagatcgggatgtgccttcatgcatgaggtgaggccagaggtgtgggcacctgtacctgcctcctcttctgggctggctttcctgtctgcctgctctcgggcttgggcagagccatctccatcctggggtttcctttaagctaagctgaaagcaaaatttggggagtgaatgatttaaacttttcctgctgcttttggtaacttctcacctggggccatattttacagatttgaatttttttttttctttttttgagatggagtctcgctcttgtcacccaggctggtgtgcaatggtgcgatctgggctcactgcaacccccacttcccggattcaagcaattctgcctcagcctcccgagtagctaggatcacaggcacccaccaccatgcccagctgatttttgtagttttagtagagacagagtttcaccacgttggccaggctggtctcaaactcctgacctcaagtgatccacccccctcagcctcccaaagtgctgagattacaggcgtgagccactgcccctggcccagatttgaaattttttaaaaataaaacatgattcttggttattgtaggtatttaataaatgttaaataaatatatacatagaacaaagt

SEQ ID NO: 123612 - DNA, 4630 bp, Homo sapiens
  Payload ID: 4267
  Gene Symbol: CCNY
  Gene Name: cyclin Y
  Uniprot ID: Q8ND76
  ENST ID: ENST00000339497
  CDS Start-End: 181-1131
aggccccgccgccgccgccgctgctgacccggcggccggccgccgttccgccccctcccgtggcggcgagcgggcgggcctccccacacgcccccgccgcccgcgccccgcgtccacccgcgccccgctcccggggactgggagaacaggatagcagcaggagtcggggggccgccgaagatggggaacactacctcgtgctgcgtgtcgtccagtcccaagctccggaggaatgcccactcccggctggagtcctaccggccagacacggacctgagccgcgaggacacgggctgcaacctgcagcacatcagcgaccgggagaacatagacgtgagagaaaaacgcaagagtctcttcattaaccatcatcctccaggacaaatagcaaggaaatacagttcctgctccaccattttcctagatgatagcacagtcagtcaaccaaacctcaagtatacaattaaatgtgtcgctcttgcaatatattatcacatcaaaaacagggacccagatggaaggatgctcttagatatttttgatgaaaatcttcaccctctttcgaaatccgaagtgccaccagattatgacaaacacaacccagagcagaagcagatttaccggttcgttcggacactgttcagtgctgctcagctgacggctgaatgtgccatcgtcaccctggtgtaccttgaaagacttttaacatacgcagagatagatatctgtccggccaactggaagcggattgttttaggggcgatcctgctggcctccaaggtgtgggatgaccaggctgtatggaatgtggattactgccagatcctgaaagacatcacggtggaggacatgaacgagctagagcgacagtttcttgaattgctgcagttcaacatcaatgttccttccagtgtctatgccaagtattattttgatcttcgttctctggcagaagcgaacaacctgagctttcccttggagcccctgagcagggagagggctcacaagcttgaggccatctctcgcctctgcgaggacaagtacaaggacctaagaagatccgcgaggaagcgctcagccagtgcagacaacctgactctgccccggtggtccccagccatcatctcttaactacggaggcccgccggaggccacaccatcccttagtttctcctttagtttgagaaaagacagacttggggtgggtttgtttttgttttttctttccttttctttttttacgcatagctccgtcaagctgcctggatgagcgcccatgcagcaaggcttggaggaagcgtcagtgccctggagatcccagctcgctctccccactgtcagcaacagcacttccttcgtggaggaagtggactcgaatcctggaggaggaaataaagggaaagggaagtcgtggagaggcagggaaaatggttaagcagcccggccctctggagtccccatgggggcggtagctgaagttggcgagcgcagcggtggatgcagagctggctgcacccagggctgggccagtgtgtcctgtaagacttcttgcattccttctgctgcttttttgggatgggggtatttttgttcatttgtttttgccctgttttgattttggtcccacagagcaggggatgtagtttgtacccaccatggcgcagacttccaaataaatagtactggtcatttctctctgcactatttctgcgcgctgtcttctgagctttcttcctcaccagtgggctgtgcttgttccatttctgtacacccttattttataccgtttttcttcaacaatggcgaaattgactgtagtgctgaaccaaaagtatccctttccctccttattcctcaccccaagaacattctagatcacatgggtgcttgtgccttccgattttcttgcatttgtttttttcctgacctgaagttgttgttacaaaatcagtcagactttgtgggctgaaggacacggtgcagcagagggtgtccctgtgagagttctgcagagtgctgggcatgtgcctggaactaccgagtaggagccatttctttgtacccctgcctaatccattcctctccttccaagtccattgttgcaagcaatattcttctcaatttttatatgtttactttaaatcaaagttagtctatttgtataaaatttttaaaaaatctaaaagaaaaagaaaaaaaacaagggtgggttgggtattccagtgggaagatcattgaagggaaaaatgttactatttactgaggtatttttcacagaatgattgaattaaaaaaaactcaacttgcattttcattgtgggtgcttagagaagttctacaaaattcaaactgtgaaggtttatgcttcattaattatgaccatactttttcattttctgacgatccctgatttccttatggactcaataagaatcttttatatcaagtaaaatgaaagttgatgatagaatatcaaatagtgaatttgatatgaaatctaagagtgtgagtcacttgcatatgtaatgctttgggtttttgcatattttcttaggtcacagtgacaggtttctgagttgtttcccttttcaagtctctgggaggccagtggcagcagcaggtctgtgtttcaccttcttcccatgtgagcttggaaaactttggcatcttaattagtcttgaatcatacacctgatccccaaacattgcctgctctcaatgaaacatgctttggaaatggaagggactcagaaagtcgaaatcccaagaactccaagccaaaagtgttaggttttagtgaaatttgtgtcaggtataagcatacctgtttgggccagaattattatcacagcctttctgacccaaactttcaaaagcaaataaacagcatataaaacgttaattatctttccattgtaattgtgatgatctactctgtatgggtaccaaaatcaccttctctcttcaagtcaaagttgaatttagaactttgaatacaggtcaaaaaatgtagaaaatatcattttatattccctaatctatatagctgaaaaagggttgtattttcttagctgaatatgaatacctcttaaacataaattagttcctctccagtgaagtatcttattttaccaatccatttcaggaaagaggttctgctgccgtaaaggcagaaattttatttttatcccttttatttgaatgagagatttgaaaatcgaattatgtaaatatttcaatgcatctgctattattttgtggagtttattaaactactttaaaaaaattgtatagtctatttattgtatgtatgtacatacagtctgatacctaaaatttaaagtggattccataaaaccagactcaagtcttgtttagactactgaatactgttttagcctgtgccctggattctacctctgtataggaaaattttccatattcattaattagtgttgatctgtattaattggttatgtttcttgcactaaggatgtttaaaactccgctgtaagtgtagattttagttttactggcaggatgaatcacttgacacataggtagatacttgaggttcattttcttttctttttctacatgatgatgaatagttatgttttcttctctgatttgttcaaagtttgccaaaagaaaacacaaaaccagtacagtacttactgataaatcgtagtgactgtaatttgtttgtaaggcgaattaatgctctacaattaaagctggattactattgaggaacacattgtcttagtgtagtttttgaatggaaagtttttgtcattaaggatgaaggaaacgacacaatttgttactttaattttatatttgatttaaacaacaaataaagtcattgggacaataaatatatatcccgatgaatctttttgatttgttttacttttcttatttttttttttttaactagaaaaagggaaagaagaagtcaggagtttaaaaccaaattggagggcagatgagaaatcctgccaagatcgggatgtgccttcatgcatgaggtgaggccagaggtgtgggcacctgtacctgcctcctcttctgggctggctttcctgtctgcctgctctcgggcttgggcagagccatctccatcctggggtttcctttaagctaagctgaaagcaaaatttggggagtgaatgatttaaacttttcctgctgcttttggtaacttctcacctggggccatattttacagatttgaatttttttttttctttttttgagatggagtctcgctcttgtcacccaggctggtgtgcaatggtgcgatctgggctcactgcaacccccacttcccggattcaagcaattctgcctcagcctcccgagtagctaggatcacaggcacccaccaccatgcccagctgatttttgtagttttagtagagacagagtttcaccacgttggccaggctggtctcaaactcctgacctcaagtgatccacccccctcagcctcccaaagtgctgagattacaggcgtgagccactgcccctggcccagatttgaaattttttaaaaataaaacatgattcttggttattgtaggtatttaataaatgttaaataaatatatacatagaacaaagt

SEQ ID NO: 123613 - DNA, 3960 bp, Homo sapiens
  Payload ID: 4267
  Gene Symbol: CCNY
  Gene Name: cyclin Y
  Uniprot ID: Q8ND76
  ENST ID: ENST00000374704
  CDS Start-End: 181-1206
aggccccgccgccgccgccgctgctgacccggcggccggccgccgttccgccccctcccgtggcggcgagcgggcgggcctccccacacgcccccgccgcccgcgccccgcgtccacccgcgccccgctcccggggactgggagaacaggatagcagcaggagtcggggggccgccgaagatggggaacactacctcgtgctgcgtgtcgtccagtcccaagctccggaggaatgcccactcccggctggagtcctaccggccagacacggacctgagccgcgaggacacgggctgcaacctgcagcacatcagcgaccgggagaacatagacgatttgaacatggaattcaatccttcagatcatcctcgggccagcacaatattcctcagtaaatctcagacggacgtgagagaaaaacgcaagagtctcttcattaaccatcatcctccaggacaaatagcaaggaaatacagttcctgctccaccattttcctagatgatagcacagtcagtcaaccaaacctcaagtatacaattaaatgtgtcgctcttgcaatatattatcacatcaaaaacagggacccagatggaaggatgctcttagatatttttgatgaaaatcttcaccctctttcgaaatccgaagtgccaccagattatgacaaacacaacccagagcagaagcagatttaccggttcgttcggacactgttcagtgctgctcagctgacggctgaatgtgccatcgtcaccctggtgtaccttgaaagacttttaacatacgcagagatagatatctgtccggccaactggaagcggattgttttaggggcgatcctgctggcctccaaggtgtgggatgaccaggctgtatggaatgtggattactgccagatcctgaaagacatcacggtggaggacatgaacgagctagagcgacagtttcttgaattgctgcagttcaacatcaatgttccttccagtgtctatgccaagtattattttgatcttcgttctctggcagaagcgaacaacctgagctttcccttggagcccctgagcagggagagggctcacaagcttgaggccatctctcgcctctgcgaggacaagtacaaggacctaagaagatccgcgaggaagcgctcagccagtgcagacaacctgactctgccccggtggtccccagccatcatctcttaactacggaggcccgccggaggccacaccatcccttagtttctcctttagtttgagaaaagacagacttggggtgggtttgtttttgttttttctttccttttctttttttacgcatagctccgtcaagctgcctggatgagcgcccatgcagcaaggcttggaggaagcgtcagtgccctggagatcccagctcgctctccccactgtcagcaacagcacttccttcgtggaggaagtggactcgaatcctggaggaggaaataaagggaaagggaagtcgtggagaggcagggaaaatggttaagcagcccggccctctggagtccccatgggggcggtagctgaagttggcgagcgcagcggtggatgcagagctggctgcacccagggctgggccagtgtgtcctgtaagacttcttgcattccttctgctgcttttttgggatgggggtatttttgttcatttgtttttgccctgttttgattttggtcccacagagcaggggatgtagtttgtacccaccatggcgcagacttccaaataaatagtactggtcatttctctctgcactatttctgcgcgctgtcttctgagctttcttcctcaccagtgggctgtgcttgttccatttctgtacacccttattttataccgtttttcttcaacaatggcgaaattgactgtagtgctgaaccaaaagtatccctttccctccttattcctcaccccaagaacattctagatcacatgggtgcttgtgccttccgattttcttgcatttgtttttttcctgacctgaagttgttgttacaaaatcagtcagactttgtgggctgaaggacacggtgcagcagagggtgtccctgtgagagttctgcagagtgctgggcatgtgcctggaactaccgagtaggagccatttctttgtacccctgcctaatccattcctctccttccaagtccattgttgcaagcaatattcttctcaatttttatatgtttactttaaatcaaagttagtctatttgtataaaatttttaaaaaatctaaaagaaaaagaaaaaaaacaagggtgggttgggtattccagtgggaagatcattgaagggaaaaatgttactatttactgaggtatttttcacagaatgattgaattaaaaaaaactcaacttgcattttcattgtgggtgcttagagaagttctacaaaattcaaactgtgaaggtttatgcttcattaattatgaccatactttttcattttctgacgatccctgatttccttatggactcaataagaatcttttatatcaagtaaaatgaaagttgatgatagaatatcaaatagtgaatttgatatgaaatctaagagtgtgagtcacttgcatatgtaatgctttgggtttttgcatattttcttaggtcacagtgacaggtttctgagttgtttcccttttcaagtctctgggaggccagtggcagcagcaggtctgtgtttcaccttcttcccatgtgagcttggaaaactttggcatcttaattagtcttgaatcatacacctgatccccaaacattgcctgctctcaatgaaacatgctttggaaatggaagggactcagaaagtcgaaatcccaagaactccaagccaaaagtgttaggttttagtgaaatttgtgtcaggtataagcatacctgtttgggccagaattattatcacagcctttctgacccaaactttcaaaagcaaataaacagcatataaaacgttaattatctttccattgtaattgtgatgatctactctgtatgggtaccaaaatcaccttctctcttcaagtcaaagttgaatttagaactttgaatacaggtcaaaaaatgtagaaaatatcattttatattccctaatctatatagctgaaaaagggttgtattttcttagctgaatatgaatacctcttaaacataaattagttcctctccagtgaagtatcttattttaccaatccatttcaggaaagaggttctgctgccgtaaaggcagaaattttatttttatcccttttatttgaatgagagatttgaaaatcgaattatgtaaatatttcaatgcatctgctattattttgtggagtttattaaactactttaaaaaaattgtatagtctatttattgtatgtatgtacatacagtctgatacctaaaatttaaagtggattccataaaaccagactcaagtcttgtttagactactgaatactgttttagcctgtgccctggattctacctctgtataggaaaattttccatattcattaattagtgttgatctgtattaattggttatgtttcttgcactaaggatgtttaaaactccgctgtaagtgtagattttagttttactggcaggatgaatcacttgacacataggtagatacttgaggttcattttcttttctttttctacatgatgatgaatagttatgttttcttctctgatttgttcaaagtttgccaaaagaaaacacaaaaccagtacagtacttactgataaatcgtagtgactgtaatttgtttgtaaggcgaattaatgctctacaattaaagctggattactattgaggaacacattgtcttagtgtagtttttgaatggaaagtttttgtcattaaggatgaaggaaacgacacaatttgttactttaattttatatttgatttaaacaacaaataaagtcattgggacaataaatata

SEQ ID NO: 123614 - DNA, 3940 bp, Homo sapiens
  Payload ID: 4267
  Gene Symbol: CCNY
  Gene Name: cyclin Y
  Uniprot ID: Q8ND76
  ENST ID: ENST00000374706
  CDS Start-End: 323-1186
aggagagatgtgagcctcgtaccaggaagatcatactgaggccaccaggttgagagccgcctggctggggggcttgtccggggacagcaggggcagaggcatggaggttcacagccaggaaatcgtgcagtgaacctgtcccctccggtcacaacatcaagagctgaactgggactagaagtcatcgccccagagctttttgctaccagaactgccgggtgaaaatctttggaagagaagtttgagaacctgttaaacaagctctctaggtaattctgtgcacgttcagtctgagaactgctgcatctgaagagatttgaacatggaattcaatccttcagatcatcctcgggccagcacaatattcctcagtaaatctcagacggacgtgagagaaaaacgcaagagtctcttcattaaccatcatcctccaggacaaatagcaaggaaatacagttcctgctccaccattttcctagatgatagcacagtcagtcaaccaaacctcaagtatacaattaaatgtgtcgctcttgcaatatattatcacatcaaaaacagggacccagatggaaggatgctcttagatatttttgatgaaaatcttcaccctctttcgaaatccgaagtgccaccagattatgacaaacacaacccagagcagaagcagatttaccggttcgttcggacactgttcagtgctgctcagctgacggctgaatgtgccatcgtcaccctggtgtaccttgaaagacttttaacatacgcagagatagatatctgtccggccaactggaagcggattgttttaggggcgatcctgctggcctccaaggtgtgggatgaccaggctgtatggaatgtggattactgccagatcctgaaagacatcacggtggaggacatgaacgagctagagcgacagtttcttgaattgctgcagttcaacatcaatgttccttccagtgtctatgccaagtattattttgatcttcgttctctggcagaagcgaacaacctgagctttcccttggagcccctgagcagggagagggctcacaagcttgaggccatctctcgcctctgcgaggacaagtacaaggacctaagaagatccgcgaggaagcgctcagccagtgcagacaacctgactctgccccggtggtccccagccatcatctcttaactacggaggcccgccggaggccacaccatcccttagtttctcctttagtttgagaaaagacagacttggggtgggtttgtttttgttttttctttccttttctttttttacgcatagctccgtcaagctgcctggatgagcgcccatgcagcaaggcttggaggaagcgtcagtgccctggagatcccagctcgctctccccactgtcagcaacagcacttccttcgtggaggaagtggactcgaatcctggaggaggaaataaagggaaagggaagtcgtggagaggcagggaaaatggttaagcagcccggccctctggagtccccatgggggcggtagctgaagttggcgagcgcagcggtggatgcagagctggctgcacccagggctgggccagtgtgtcctgtaagacttcttgcattccttctgctgcttttttgggatgggggtatttttgttcatttgtttttgccctgttttgattttggtcccacagagcaggggatgtagtttgtacccaccatggcgcagacttccaaataaatagtactggtcatttctctctgcactatttctgcgcgctgtcttctgagctttcttcctcaccagtgggctgtgcttgttccatttctgtacacccttattttataccgtttttcttcaacaatggcgaaattgactgtagtgctgaaccaaaagtatccctttccctccttattcctcaccccaagaacattctagatcacatgggtgcttgtgccttccgattttcttgcatttgtttttttcctgacctgaagttgttgttacaaaatcagtcagactttgtgggctgaaggacacggtgcagcagagggtgtccctgtgagagttctgcagagtgctgggcatgtgcctggaactaccgagtaggagccatttctttgtacccctgcctaatccattcctctccttccaagtccattgttgcaagcaatattcttctcaatttttatatgtttactttaaatcaaagttagtctatttgtataaaatttttaaaaaatctaaaagaaaaagaaaaaaaacaagggtgggttgggtattccagtgggaagatcattgaagggaaaaatgttactatttactgaggtatttttcacagaatgattgaattaaaaaaaactcaacttgcattttcattgtgggtgcttagagaagttctacaaaattcaaactgtgaaggtttatgcttcattaattatgaccatactttttcattttctgacgatccctgatttccttatggactcaataagaatcttttatatcaagtaaaatgaaagttgatgatagaatatcaaatagtgaatttgatatgaaatctaagagtgtgagtcacttgcatatgtaatgctttgggtttttgcatattttcttaggtcacagtgacaggtttctgagttgtttcccttttcaagtctctgggaggccagtggcagcagcaggtctgtgtttcaccttcttcccatgtgagcttggaaaactttggcatcttaattagtcttgaatcatacacctgatccccaaacattgcctgctctcaatgaaacatgctttggaaatggaagggactcagaaagtcgaaatcccaagaactccaagccaaaagtgttaggttttagtgaaatttgtgtcaggtataagcatacctgtttgggccagaattattatcacagcctttctgacccaaactttcaaaagcaaataaacagcatataaaacgttaattatctttccattgtaattgtgatgatctactctgtatgggtaccaaaatcaccttctctcttcaagtcaaagttgaatttagaactttgaatacaggtcaaaaaatgtagaaaatatcattttatattccctaatctatatagctgaaaaagggttgtattttcttagctgaatatgaatacctcttaaacataaattagttcctctccagtgaagtatcttattttaccaatccatttcaggaaagaggttctgctgccgtaaaggcagaaattttatttttatcccttttatttgaatgagagatttgaaaatcgaattatgtaaatatttcaatgcatctgctattattttgtggagtttattaaactactttaaaaaaattgtatagtctatttattgtatgtatgtacatacagtctgatacctaaaatttaaagtggattccataaaaccagactcaagtcttgtttagactactgaatactgttttagcctgtgccctggattctacctctgtataggaaaattttccatattcattaattagtgttgatctgtattaattggttatgtttcttgcactaaggatgtttaaaactccgctgtaagtgtagattttagttttactggcaggatgaatcacttgacacataggtagatacttgaggttcattttcttttctttttctacatgatgatgaatagttatgttttcttctctgatttgttcaaagtttgccaaaagaaaacacaaaaccagtacagtacttactgataaatcgtagtgactgtaatttgtttgtaaggcgaattaatgctctacaattaaagctggattactattgaggaacacattgtcttagtgtagtttttgaatggaaagtttttgtcattaaggatgaaggaaacgacacaatttgttactttaattttatatttgatttaaacaacaaataaagtcattgggacaataaatata

SEQ ID NO: 123615 - DNA, 793 bp, Homo sapiens
  Payload ID: 4267
  Gene Symbol: CCNY
  Gene Name: cyclin Y
  ENST ID: ENST00000490012
  CDS Start-End: 639-793
aggagagatgtgagcctcgtaccaggaagatcatactgaggccaccaggttgagagccgcctggctggggggcttgtccggggacagcaggggcagaggcatggaggttcacagccaggaaatcgtgcagtgaacctgtcccctccggtcacaacatcaagagctgaactgggactagaagtcatcgccccagagctttttgctaccagaactgccgggtgaaaatctttggaagagaagtttgagaacctgttaaacaagctctctaggtaattctgtgcacgttcagtctgagaactgctgcatctgaagaggccctccagaaaaaggaagaaaagtgggaagcactgtatacacagaagcttcccaaggaaaagctatgaactctacactttggaggaggttgaggcagtgggggtgagagaaggtgactcagggagttgtgcaaatgactgactcatatttcatggatacgagtatggctgatgtaagactgcagttatctcctcctgattcaattaagcacagggaatctactagagggccctgcctccacttccatcaaacaagggaagagaatgctcttcatgaggtcactgttaactgagccagcatagggaggctcagcagatttgaacatggaattcaatccttcagatcatcctcgggccagcacaatattcctcagtaaatctcagacggacgtgagagaaaaacgcaagagtctcttcattaaccatcatcctccaggacaaatagcaaggaaatacagttcctgctccaccattttcct

SEQ ID NO: 123616 - DNA, 816 bp, Homo sapiens
  Payload ID: 4267
  Gene Symbol: CCNY
  Gene Name: cyclin Y
  ENST ID: ENST00000493157
  CDS Start-End: 514-816
ggaagatcatactgaggccaccaggttgagagccgcctggctggggggcttgtccggggacagcaggggcagaggcatggaggttcacagccaggaaatcgtgcagtgaacctgtcccctccggtcacaacatcaagagctgaactgggactagaagtcatcgccccagagctttttgctaccagaactgccgggtgaaaatctttggaagagaagtttgagaacctgttaaacaagctctctaggtaattctgtgcacgttcagtctgagaactgctgcatctgaagagggtattaaaaaccagtgacatgtagcatgaaggcggatgaggcccatattgctaatgtgatgcagatgtggacgttcattgtggctttggtttttacccacaaaggctcacagggaatctactagagggccctgcctccacttccatcaaacaagggaagagaatgctcttcatgaggtcactgttaactgagccagcatagggaggctcagcagatttgaacatggaattcaatccttcagatcatcctcgggccagcacaatattcctcagtaaatctcagacggacgtgagagaaaaacgcaagagtctcttcattaaccatcatcctccaggacaaatagcaaggaaatacagttcctgctccaccattttcctagatgatagcacagtcagtcaaccaaacctcaagtatacaattaaatgtgtcgctcttgcaatatattatcacatcaaaaacagggacccagatggaaggatgctcttagatatttttgatgaaaatcttcaccctctttcggtaatc

SEQ ID NO: 123617 - DNA, 3767 bp, Homo sapiens
  Payload ID: 4268
  Gene Symbol: CCNYL1
  Gene Name: cyclin Y-like 1
  Uniprot ID: Q8N7R7
  ENST ID: ENST00000295414
  CDS Start-End: 212-1291
gtgcggccgaggcccgagccctgcccggggccgggccgcggggcgggcgggcgaaccgcgggcgaggcggcgtctgcttgcgcggtgcagccccagcgtagcccggggctgccggtgccggccgcgccattgttgggggagggggcggctgttgagggcggcggagtagggggcgagcgaaggcggtggcagagaggagcggaggcttcccatggggaacacgctgacctgttgcgtgtcccccaatgccagccccaagctgggccggcgcgcggggtcggcggagctgtactgcgcgtccgacatctacgaggcggtgtccggggacgcggtggcggtagcgcccgctgtggtggagcctgccgagttggatttcggagagggcgagggccaccacctgcagcacatcagcgaccgcgagatgcccgaagatttagctttggagtcaaacccttctgaccatccaagggcaagcacaattttcctgagcaaatctcaaacggatgtgcgagaaaagaggaagagcaaccatttgaaccatgtatctccagggcagcttactaaaaagtatagctcatgctcaacaatatttctagatgacagcacagtcagccagcctaatcttagaaccacagtaaaatgtgtgaccttagcaatatattaccacataaagaacagagatgcaaatagatccctggatatttttgatgagagatcacatccacttacacgagaaaaagttccagaggaatactttaagcatgatcctgagcacaaatttatttacagatttgttcgtactctttttagtgctgcacagctaacagctgaatgtgcaatagtaactttggtttacttagaaaggcttttaacttatgctgaaatcgacatttgtcccaccaactggaaaaggattgttctgggagccattcttcttgcctccaaggtttgggacgatcaggctgtatggaatgtggactactgccagatcctcaaggacattacagttgaggacatgaatgaaatggaaaggcattttctggagcttcttcagtttaatattaatgttcctgccagtgtttatgccaaatactactttgaccttcgctccttagcagatgacaacaacctgaattttctatttgctcctcttagcaaagaaagagcacagaacctagaggctatttctagattgtgtgaagacaaagacttgtgtagagccgctatgagaaggtctttcagtgctgataacttcattggtattcagcgctctaaagccatcctctcttaaaaggagaaatgaggggttataacgtcatgggaccttcatctacaaagactggagaaataccacctttcctgctcaaaaaccagcaaaattagtgttttcatcaaaaggaaagatctcaaattcaagagactcatggacaacaaggattatactccacaggaaagaatgggaccttgtcaatgcaacaaaacactcttctgtcctttttaatgtaaacagagttacaaaaaccactccaaagtgaaggctcccatcctacacacagatatttgcttactgtgtgggccgatagctgtgaactatgtaaggttttttaaacaatagtttaaatttttagactttaaagacactaaccatataacttttatgtttcttccagtttctctccctccccccgcattttgctgcatatgcctttaaaatcaatgcagtattaccattaaaacatgggactctaactaaagccacttaggagcagacagcagcgttgttaggtactgaagggttcttcctccctactgttaccattgaagctgctagtcattggcaatcattttaaaccaaaaagctgctggataacatttgtcattcatattctttgcaagcattactttagcattttagcatgtttggggtcataaacagaggaagtatcagttattgatatctacttctattggagtccatgttgcatttcttgtgaactataaatggtgcttctcattttctgataatttttctcttgctaaataaatgtattaaaagatattttcataatgccaaccaacatggtggttcagtgacgatgagaaaaagtgaagcagttttaagcttgaatatagtttgggccctccaaggcactgcagcatgagtataaatgctataaacctttaaaaaacatgatttgaaagttttttgttttgttttgtttgtttttaaagagatgggggtcttactgcgttgtccaggctggagtgcagtggcttttcacaggtgcaatcattgtgcactcactgcagcctagaacttcctggtctcaagccatcctctagcctcagccacacaagtagctgggactacaagtgcaactggcacctgtctcctgaatattaagcttttaattttttgtttcggtcactcttgatagcagacattgactgaaacaaaaaattaaaagctttatattcaaaatttgcaaaatgaagctgggtgtggtggtgcacgcctatagtcccagctacttgggaggctgaggctggaggattgcttgaggtcaagtattggaggctgcagtgtaccatgatggtgcctataggaatagctactacactccaacctggacaacgttatcaagaccccatctcttagaaaaatgcaaaattaaatgcaaaagaaatgggctgggcatagtgattcatgcctgtaatctcagtaccctgggaggctgaggtggaaggattgcttgagtgcaggagttcaagaccagtctaggcaacatagtgagaccctgcctgtaaaaaaaaataataaaaatagttggatatggtggcatgtgtctgtagtcccagccactctggaggctaaggtgggaggatcagtagagcccaggaggtcaaggctgcagtgggccatgatcatgtcactgctctccaacctgggcgacatccagaccctgtctcaaagaaaaaagcagaagaaaaatgttcagacaaggttttgtaaaggtttgtagcatttatatttctacaagtatcaaagcttaaaattacactgaacttttggaataccttgtatctccataaaatgccctctttttaaaagtagttacccgcagagctgtgctctatatgctttgattaccgcagtttctttaaaggaagattttgaagagcagtgttaattaacatgtaataaaaggaattggaccctaattatagaaggtgatatgaacagctgttttatcatcctacatgctaccaagctgtaggtgtcccattaagtcctgctatttaagaaatacttacataacccttaggaactcttcaggctttaaaaggcaaggagcaaataattttaggagaccgataatgtcacctaaatttgaaatactaagaagaggttagtgttctcaactatgtgaaatctgtttctcctactttctcaaatctaatcctaggaatcttgcttataaacaaagcatttctgggacaggagtacttcctctattatagcaatgcttcacatcatattgtgctgcagtttccatcatttttaaaggacagagacataaatgataaataatggtatacaaatattacaatctaccacctcaaaaaaacaaatattgtttatggaattcagagtttggagattcaagtattgattgcagttttattttgaaaagaatgctacaatttatgtggtttttatttctcatgtttatattaaaagctaataaactctattttaattaaaa

SEQ ID NO: 123618 - DNA, 2619 bp, Homo sapiens
  Payload ID: 4268
  Gene Symbol: CCNYL1
  Gene Name: cyclin Y-like 1
  Uniprot ID: Q8N7R7
  ENST ID: ENST00000339882
  CDS Start-End: 147-1073
ggcggcgtctgcttgcgcggtgcagccccagcgtagcccggggctgccggtgccggccgcgccattgttgggggagggggcggctgttgagggcggcggagtagggggcgagcgaaggcggtggcagagaggagcggaggcttcccatggggaacacgctgacctgttgcgtgtcccccaatgccagccccaagctgggccggcgcgcggggtcggcggagctgtactgcgcgtccgacatctacgaggcggtgtccggggacgcggtggcggtagcgcccgctgtggtggagcctgccgagttggatttcggagagggcgagggccaccacctgcagcacatcagcgaccgcgagatgcccgaagatttagctttggagtcaaacccttctgaccatccaagggcaagcacaattttcctgagcaaatctcaaacggatgtgcgagaaaagaggaagagcaaccatttgaaccattgtgaccttagcaatatattaccacataaagaacagcgagaaaaagttccagaggaatactttaagcatgatcctgagcacaaatttatttacagatttgttcgtactctttttagtgctgcacagctaacagctgaatgtgcaatagtaactttggtttacttagaaaggcttttaacttatgctgaaatcgacatttgtcccaccaactggaaaaggattgttctgggagccattcttcttgcctccaaggtttgggacgatcaggctgtatggaatgtggactactgccagatcctcaaggacattacagttgaggacatgaatgaaatggaaaggcattttctggagcttcttcagtttaatattaatgttcctgccagtgtttatgccaaatactactttgaccttcgctccttagcagatgacaacaacctgaattttctatttgctcctcttagcaaagaaagagcacagaacctagaggctatttctagattgtgtgaagacaaagacttgtgtagagccgctatgagaaggtctttcagtgctgataacttcattggtattcagcgctctaaagccatcctctcttaaaaggagaaatgaggggttataacgtcatgggaccttcatctacaaagactggagaaataccacctttcctgctcaaaaaccagcaaaattagtgttttcatcaaaaggaaagatctcaaattcaagagactcatggacaacaaggattatactccacaggaaagaatgggaccttgtcaatgcaacaaaacactcttctgtcctttttaatgtaaacagagttacaaaaaccactccaaagtgaaggctcccatcctacacacagatatttgcttactgtgtgggccgatagctgtgaactatgtaaggttttttaaacaatagtttaaatttttagactttaaagacactaaccatataacttttatgtttcttccagtttctctccctccccccgcattttgctgcatatgcctttaaaatcaatgcagtattaccattaaaacatgggactctaactaaagccacttaggagcagacagcagcgttgttaggtactgaagggttcttcctccctactgttaccattgaagctgctagtcattggcaatcattttaaaccaaaaagctgctggataacatttgtcattcatattctttgcaagcattactttagcattttagcatgtttggggtcataaacagaggaagtatcagttattgatatctacttctattggagtccatgttgcatttcttgtgaactataaatggtgcttctcattttctgataatttttctcttgctaaataaatgtattaaaagatattttcataatgccaaccaacatggtggttcagtgacgatgagaaaaagtgaagcagttttaagcttgaatatagtttgggccctccaaggcactgcagcatgagtataaatgctataaacctttaaaaaacatgatttgaaagttttttgttttgttttgtttgtttttaaagagatgggggtcttactgcgttgtccaggctggagtgcagtggcttttcacaggtgcaatcattgtgcactcactgcagcctagaacttcctggtctcaagccatcctctagcctcagccacacaagtagctgggactacaagtgcaactggcacctgtctcctgaatattaagcttttaattttttgtttcggtcactcttgatagcagacattgactgaaacaaaaaattaaaagctttatattcaaaatttgcaaaatgaagctgggtgtggtggtgcacgcctatagtcccagctacttgggaggctgaggctggaggattgcttgaggtcaagtattggaggctgcagtgtaccatgatggtgcctataggaatagctactacactccaacctggacaacgttatcaagaccccatctcttagaaaaatgcaaaattaaatgcaaaagaaatgggctgggcatagtgattcatgcctgtaatctcagtaccctgggaggctgaggtggaaggattgcttgagtgcaggagttcaagaccagtctaggcaacatagtgagaccctgcctgtaaaaaaaaataataaaaatagttggatatgg

SEQ ID NO: 123619 - DNA, 1952 bp, Homo sapiens
  Payload ID: 4268
  Gene Symbol: CCNYL1
  Gene Name: cyclin Y-like 1
  Uniprot ID: Q8N7R7
  ENST ID: ENST00000392209
  CDS Start-End: 316-1185
gaggagctccagccgcgctctctcccggcagtggctgtgcttcacagcgcttgttgggttccccaccccttttaaataagccgggctggtcaccgccctcgcagacgagtcagcttaagggaggcggcggcagcgcggcggtggggccccaagctgggccggcgcgcggggtcggcggagctgtactgcgcgtccgacatctacgaggcggtgtccggggacgcggtggcggtagcgcccgctgtggtggagcctgccgagttggatttcggagagggcgagggccaccacctgcagcacatcagcgaccgcgagatgcccgaagatttagctttggagtcaaacccttctgaccatccaagggcaagcacaattttcctgagcaaatctcaaacggatgtgcgagaaaagaggaagagcaaccatttgaaccatgtatctccagggcagcttactaaaaagtatagctcatgctcaacaatatttctagatgacagcacagtcagccagcctaatcttagaaccacagtaaaatgtgtgaccttagcaatatattaccacataaagaacagagatgcaaatagatccctggatatttttgatgagagatcacatccacttacacgagaaaaagttccagaggaatactttaagcatgatcctgagcacaaatttatttacagatttgttcgtactctttttagtgctgcacagctaacagctgaatgtgcaatagtaactttggtttacttagaaaggcttttaacttatgctgaaatcgacatttgtcccaccaactggaaaaggattgttctgggagccattcttcttgcctccaaggtttgggacgatcaggctgtatggaatgtggactactgccagatcctcaaggacattacagttgaggacatgaatgaaatggaaaggcattttctggagcttcttcagtttaatattaatgttcctgccagtgtttatgccaaatactactttgaccttcgctccttagcagatgacaacaacctgaattttctatttgctcctcttagcaaagaaagagcacagaacctagaggctatttctagattgtgtgaagacaaagacttgtgtagagccgctatgagaaggtctttcagtgctgataacttcattggtattcagcgctctaaagccatcctctcttaaaaggagaaatgaggggttataacgtcatgggaccttcatctacaaagactggagaaataccacctttcctgctcaaaaaccagcaaaattagtgttttcatcaaaaggaaagatctcaaattcaagagactcatggacaacaaggattatactccacaggaaagaatgggaccttgtcaatgcaacaaaacactcttctgtcctttttaatgtaaacagagttacaaaaaccactccaaagtgaaggctcccatcctacacacagatatttgcttactgtgtgggccgatagctgtgaactatgtaaggttttttaaacaatagtttaaatttttagactttaaagacactaaccatataacttttatgtttcttccagtttctctccctccccccgcattttgctgcatatgcctttaaaatcaatgcagtattaccattaaaacatgggactctaactaaagccacttaggagcagacagcagcgttgttaggtactgaagggttcttcctccctactgttaccattgaagctgctagtcattggcaatcattttaaaccaaaaagctgctggataacatttgtcattcatattctttgcaagcattactttagcattttagcatgtttggggtcataaacagaggaagtatcagttattgatatctacttctattggagtccatgttgcatttcttgtgaactataaatggtgcttctcattttctgataatttttctcttgctaaataaatgtattaaaagat

SEQ ID NO: 123620 - DNA, 709 bp, Homo sapiens
  Payload ID: 4268
  Gene Symbol: CCNYL1
  Gene Name: cyclin Y-like 1
  ENST ID: ENST00000452312
  CDS Start-End: 1-358
ccgcgagatgcccgaagatttagctttggagtcaaacccttctgaccatccaagggcaagcacaattttcctgagcaaatctcaaacggatgtgcgagaaaagaggaagagcaaccatttgaaccatgtatctccagggcagcttactaaaaagtatagctcatgctcaacaatatttctagatgacagcacagtcagccagcctaatcttagaaccacagtaaaatgtgtgaccttagcaatatattaccacataaagaacagcgagaaaaagttccagaggaatactttaagcatgatcctgagcacaaatttatttacagatttgttcgtactctttttagtgctgcacagctaacagctgaatgtgcaatagtaactttggtttacttagaaaggcttttaacttatgctgaaatcgacatttgtcccaccaactggaaaaggattgttctgggagccattcttcttgcctccaaggtttgggacgatcaggctgtatggaatgtggactactgccagatcctcaaggacattacagttgaggacatgaatgaaatggaaaggcattttctggagcttcttcagtttaatattaatgttcctgccagtgtttatgccaaatactactttgaccttcgctccttagcagatgacaacaacctgaattttctatttgctcctcttagcaaagaaagagcacagaacc

SEQ ID NO: 123621 - DNA, 602 bp, Homo sapiens
  Payload ID: 4268
  Gene Symbol: CCNYL1
  Gene Name: cyclin Y-like 1
  ENST ID: ENST00000420321
  CDS Start-End: 1-444
atttacagatttgttcgtactctttttagtgctgcacagctaacagctgaatgtgcaatagtaactttggtttacttagaaaggcttttaacttatgctgaaatcgacatttgtcccaccaactggaaaaggattgttctgggagccattcttcttgcctccaaggtttgggacgatcaggctgtatggaatgtggactactgccagatcctcaaggacattacagttgaggacatgaatgaaatggaaaggcattttctggagcttcttcagtttaatattaatgttcctgccagtgtttatgccaaatactactttgaccttcgctccttagcagatgacaacaacctgaattttctatttgctcctcttagcaaagaaagagcacagaacctagagcttgtgactttgccctttgcccccttttccaatggggaaaaatgagtgacaagaaagcatggggaagatgtgctaactactgtgtcccggacatgtaaggtacagttgctcttctcttaggattcaactcaactatattttctagtctgcctctcctaactaccttatgcatcaatgtaataaacttcctagtgttcaccttg

SEQ ID NO: 123622 - DNA, 952 bp, Homo sapiens
  Payload ID: 4268
  Gene Symbol: CCNYL1
  Gene Name: cyclin Y-like 1
  ENST ID: ENST00000420822
  CDS Start-End: 250-555
gtcagcttaagggaggcggcggcagcgcggcggtgggggtgcggccgaggcccgagccctgcccggggccgggccgcggggcgggcgggcgaaccgcgggcgaggcggcgtctgcttgcgcggtgcagccccagcgtagcccggggctgccggtgccggccgcgccattgttgggggagggggcggctgttgagggcggcggagtagggggcgagcgaaggcggtggcagagaggagcggaggcttcccatggggaacacgctgacctgttgcgtgtcccccaatgccagccccaagctgggccggcgcgcggggtcggcggagctgtactgcgcgtccgacatctacgaggcggtgtccggggacgcggtggcggtagcgcccgctgtggtggagcctgccgagttggatttcggagagggcgagggccaccacctgcagcacatcagcgaccgcgagatgcccgaagagaaagagtctcactgtgttgaccaggctggcctcgaactcctggcctgggctcaagcagtcctcccacctcagcctcctgaatagctgggaccacgggcgtgtgccatcttgcctggctccatcttatgtctatacattcatttcagtggataagaataaaagtagaggtaacaaaatggcctaaatatacccatcaaataaacaggttgataaattttaaagagtttgttctggtaactgtgaattgaagctgagaatgcactggacagaggaatattagaagctggcaagagggaaggtaaggtaccaggcattaagcatgggatgatgataaagagtgctaaatcagaaaagttggaaaaagagaatttgtaagcacagaatttaccattgtatgttagtatgacagttacatttttatttcaatttgtctcaaaatttatttttgtggcattcaataaagtgataatagaaatctcca

SEQ ID NO: 123623 - DNA, 1733 bp, Homo sapiens
  Payload ID: 4269
  Gene Symbol: CDK1
  Gene Name: cyclin-dependent kinase 1
  Uniprot ID: P06493
  ENST ID: ENST00000316629
  CDS Start-End: 143-865
agcgcggtgagtttgaaactgctcgcacttggcttcaaagctggctcttggaaattgagcggagagcgacgcggttgttgtagctgccgctgcggccgccgcggaataataagccgggatctaccatacccattgactaactatggaagattataccaaaatagagaaaattggagaaggtacctatggagttgtgtataagggtagacacaaaactacaggtcaagtggtagccatgaaaaaaatcagactagaaagtgaagaggaaggggttcctagtactgcaattcgggaaatttctctattaaaggaacttcgtcatccaaatatagtcagtcttcaggatgtgcttatgcaggattccaggttatatctcatctttgagtttctttccatggatctgaagaaatacttggattctatccctcctggtcagtacatggattcttcacttgttaaggtagtaacactctggtacagatctccagaagtattgctggggtcagctcgttactcaactccagttgacatttggagtataggcaccatatttgctgaactagcaactaagaaaccacttttccatggggattcagaaattgatcaactcttcaggattttcagagctttgggcactcccaataatgaagtgtggccagaagtggaatctttacaggactataagaatacatttcccaaatggaaaccaggaagcctagcatcccatgtcaaaaacttggatgaaaatggcttggatttgctctcgaaaatgttaatctatgatccagccaaacgaatttctggcaaaatggcactgaatcatccatattttaatgatttggacaatcagattaagaagatgtagctttctgacaaaaagtttccatatgttatatcaacagatagttgtgtttttattgttaactcttgtctatttttgtcttatatatatttctttgttatcaaacttcagctgtacttcgtcttctaatttcaaaaatataacttaaaaatgtaaatattctatatgaatttaaatataattctgtaaatgtgtgtaggtctcactgtaacaactatttgttactataataaaactataatattgatgtcaggaatcaggaaaaaatttgagttggcttaaatcatctcagtccttatggcagttttattttcctgtagttggaactactaaaatttaggaaaatgctaagttcaagtttcgtaatgctttgaagtatttttatgctctgaatgtttaaatgttctcatcagtttcttgccatgttgttaactatacaacctggctaaagatgaatatttttctactggtattttaatttttgacctaaatgtttaagcattcggaatgagaaaactatacagatttgagaaatgatgctaaatttataggagttttcagtaacttaaaaagctaacatgagagcatgccaaaatttgctaagtcttacaaagatcaagggctgtccgcaacagggaagaacagttttgaaaatttatgaactatcttatttttaggtaggttttgaaagctttttgtctaagtgaattcttatgccttggtcagagtaataactgaaggagttgcttatcttggctttcgagtctgagtttaaaactacacattttgacatagtgtttattagcagccatctaaaaaggctctaatgtatatttaactaaaattactagctttgggaattaaactgttt

SEQ ID NO: 123624 - DNA, 1613 bp, Homo sapiens
  Payload ID: 4269
  Gene Symbol: CDK1
  Gene Name: cyclin-dependent kinase 1
  Uniprot ID: P06493
  ENST ID: ENST00000373809
  CDS Start-End: 14-736
ccattgactaactatggaagattataccaaaatagagaaaattggagaaggtacctatggagttgtgtataagggtagacacaaaactacaggtcaagtggtagccatgaaaaaaatcagactagaaagtgaagaggaaggggttcctagtactgcaattcgggaaatttctctattaaaggaacttcgtcatccaaatatagtcagtcttcaggatgtgcttatgcaggattccaggttatatctcatctttgagtttctttccatggatctgaagaaatacttggattctatccctcctggtcagtacatggattcttcacttgttaaggtagtaacactctggtacagatctccagaagtattgctggggtcagctcgttactcaactccagttgacatttggagtataggcaccatatttgctgaactagcaactaagaaaccacttttccatggggattcagaaattgatcaactcttcaggattttcagagctttgggcactcccaataatgaagtgtggccagaagtggaatctttacaggactataagaatacatttcccaaatggaaaccaggaagcctagcatcccatgtcaaaaacttggatgaaaatggcttggatttgctctcgaaaatgttaatctatgatccagccaaacgaatttctggcaaaatggcactgaatcatccatattttaatgatttggacaatcagattaagaagatgtagctttctgacaaaaagtttccatatgttatatcaacagatagttgtgtttttattgttaactcttgtctatttttgtcttatatatatttctttgttatcaaacttcagctgtacttcgtcttctaatttcaaaaatataacttaaaaatgtaaatattctatatgaatttaaatataattctgtaaatgtgtgtaggtctcactgtaacaactatttgttactataataaaactataatattgatgtcaggaatcaggaaaaaatttgagttggcttaaatcatctcagtccttatggcagttttattttcctgtagttggaactactaaaatttaggaaaatgctaagttcaagtttcgtaatgctttgaagtatttttatgctctgaatgtttaaatgttctcatcagtttcttgccatgttgttaactatacaacctggctaaagatgaatatttttctactggtattttaatttttgacctaaatgtttaagcattcggaatgagaaaactatacagatttgagaaatgatgctaaatttataggagttttcagtaacttaaaaagctaacatgagagcatgccaaaatttgctaagtcttacaaagatcaagggctgtccgcaacagggaagaacagttttgaaaatttatgaactatcttatttttaggtaggttttgaaagctttttgtctaagtgaattcttatgccttggtcagagtaataactgaaggagttgcttatcttggctttcgagtctgagtttaaaactacacattttgacatagtgtttattagcagccatctaaaaaggctctaatgtatatttaactaaaattactagctttgggaattaaactgtttaacaaataa

SEQ ID NO: 123625 - DNA, 1913 bp, Homo sapiens
  Payload ID: 4269
  Gene Symbol: CDK1
  Gene Name: cyclin-dependent kinase 1
  Uniprot ID: P06493
  ENST ID: ENST00000395284
  CDS Start-End: 143-1036
agcgcggtgagtttgaaactgctcgcacttggcttcaaagctggctcttggaaattgagcggagagcgacgcggttgttgtagctgccgctgcggccgccgcggaataataagccgggatctaccatacccattgactaactatggaagattataccaaaatagagaaaattggagaaggtacctatggagttgtgtataagggtagacacaaaactacaggtcaagtggtagccatgaaaaaaatcagactagaaagtgaagaggaaggggttcctagtactgcaattcgggaaatttctctattaaaggaacttcgtcatccaaatatagtcagtcttcaggatgtgcttatgcaggattccaggttatatctcatctttgagtttctttccatggatctgaagaaatacttggattctatccctcctggtcagtacatggattcttcacttgttaagagttatttataccaaatcctacaggggattgtgttttgtcactctagaagagttcttcacagagacttaaaacctcaaaatctcttgattgatgacaaaggaacaattaaactggctgattttggccttgccagagcttttggaatacctatcagagtatatacacatgaggtagtaacactctggtacagatctccagaagtattgctggggtcagctcgttactcaactccagttgacatttggagtataggcaccatatttgctgaactagcaactaagaaaccacttttccatggggattcagaaattgatcaactcttcaggattttcagagctttgggcactcccaataatgaagtgtggccagaagtggaatctttacaggactataagaatacatttcccaaatggaaaccaggaagcctagcatcccatgtcaaaaacttggatgaaaatggcttggatttgctctcgaaaatgttaatctatgatccagccaaacgaatttctggcaaaatggcactgaatcatccatattttaatgatttggacaatcagattaagaagatgtagctttctgacaaaaagtttccatatgttatatcaacagatagttgtgtttttattgttaactcttgtctatttttgtcttatatatatttctttgttatcaaacttcagctgtacttcgtcttctaatttcaaaaatataacttaaaaatgtaaatattctatatgaatttaaatataattctgtaaatgtgtgtaggtctcactgtaacaactatttgttactataataaaactataatattgatgtcaggaatcaggaaaaaatttgagttggcttaaatcatctcagtccttatggcagttttattttcctgtagttggaactactaaaatttaggaaaatgctaagttcaagtttcgtaatgctttgaagtatttttatgctctgaatgtttaaatgttctcatcagtttcttgccatgttgttaactatacaacctggctaaagatgaatatttttctactggtattttaatttttgacctaaatgtttaagcattcggaatgagaaaactatacagatttgagaaatgatgctaaatttataggagttttcagtaacttaaaaagctaacatgagagcatgccaaaatttgctaagtcttacaaagatcaagggctgtccgcaacagggaagaacagttttgaaaatttatgaactatcttatttttaggtaggttttgaaagctttttgtctaagtgaattcttatgccttggtcagagtaataactgaaggagttgcttatcttggctttcgagtctgagtttaaaactacacattttgacatagtgtttattagcagccatctaaaaaggctctaatgtatatttaactaaaattactagctttgggaattaaactgtttaacaaataa

SEQ ID NO: 123626 - DNA, 1948 bp, Homo sapiens
  Payload ID: 4269
  Gene Symbol: CDK1
  Gene Name: cyclin-dependent kinase 1
  ENST ID: ENST00000448257
  CDS Start-End: 202-1095
gctggctcttggaaattgagcggagagcgacgcggttgttgtagctgccgctgcggccgccgcggaataataagccgggtacagtggctggggtcagggtcgtgtctaggggacggccgagggcctcggagggcgagtattgaggaacggggtcctctaagaaggccggactggaggatctaccatacccattgactaactatggaagattataccaaaatagagaaaattggagaaggtacctatggagttgtgtataagggtagacacaaaactacaggtcaagtggtagccatgaaaaaaatcagactagaaagtgaagaggaaggggttcctagtactgcaattcgggaaatttctctattaaaggaacttcgtcatccaaatatagtcagtcttcaggatgtgcttatgcaggattccaggttatatctcatctttgagtttctttccatggatctgaagaaatacttggattctatccctcctggtcagtacatggattcttcacttgttaagagttatttataccaaatcctacaggggattgtgttttgtcactctagaagagttcttcacagagacttaaaacctcaaaatctcttgattgatgacaaaggaacaattaaactggctgattttggccttgccagagcttttggaatacctatcagagtatatacacatgaggcaataacactctggtacagatctccagaagtattgctggggtcagctcgttactcaactccagttgacatttggagtataggcaccatatttgctgaactagcaactaagaaaccacttttccatggggattcagaaattgatcaactcttcaggattttcagagctttgggcactcccaataatgaagtgtggccagaagtggaatctttacaggactataagaatacatttcccaaatggaaaccaggaagcctagcatcccatgtcaaaaacttggatgaaaatggcttggatttgctctcgaaaatgttaatctatgatccagccaaacgaatttctggcaaaatggcactgaatcatccatattttaatgatttggacaatcagattaagaagatgtagctttctgacaaaaagtttccatatgttatatcaacagatagttgtgtttttattgttaactcttgtctatttttgtcttatatatatttctttgttatcaaacttcagctgtacttcgtcttctaatttcaaaaatataacttaaaaatgtaaatattctatatgaatttaaatataattctgtaaatgtgtgtaggtctcactgtaacaactatttgttactataataaaactataatattgatgtcaggaatcaggaaaaaatttgagttggcttaaatcatctcagtccttatggcagttttattttcctgtagttggaactactaaaatttaggaaaatgctaagttcaagtttcgtaatgctttgaagtatttttatgctctgaatgtttaaatgttctcatcagtttcttgccatgttgttaactatacaacctggctaaagatgaatatttttctactggtattttaatttttgacctaaatgtttaagcattcggaatgagaaaactatacagatttgagaaatgatgctaaatttataggagttttcagtaacttaaaaagctaacatgagagcatgccaaaatttgctaagtcttacaaagatcaagggctgtccgcaacagggaagaacagttttgaaaatttatgaactatcttatttttaggtaggttttgaaagctttttgtctaagtgaattcttatgccttggtcagagtaataactgaaggagttgcttatcttggctttcgagtctgagtttaaaactacacattttgacatagtgtttattagcagccatctaaaaaggctctaatgtatatttaactaaaattactagctttg

SEQ ID NO: 123627 - DNA, 723 bp, Homo sapiens
  Payload ID: 4269
  Gene Symbol: CDK1
  Gene Name: cyclin-dependent kinase 1
  ENST ID: ENST00000519078
  CDS Start-End: 155-723
agccgccctttcctctttctttcgcgctctagccacccgggaaggcctgcccagcgtagctgggctctgattggctgctttgaaagtctacgggctacccgattggtgaatccggggccctttagcgcggatctaccatacccattgactaactatggaagattataccaaaatagagaaaattggagaaggtacctatggagttgtgtataagggtagacacaaaactacaggtcaagtggtagccatgaaaaaaatcagactagaaagtgaagaggaaggggttcctagtactgcaattcgggaaatttctctattaaaggaacttcgtcatccaaatatagtcagtcttcaggatgtgcttatgcaggattccaggttatatctcatctttgagtttctttccatggatctgaagaaatacttggattctatccctcctggtcagtacatggattcttcacttgttaagagttatttataccaaatcctacaggggattgtgttttgtcactctagaagagttcttcacagagacttaaaacctcaaaatctcttgattgatgacaaaggaacaattaaactggctgattttggccttgccagagcttttggaatacctatcagagtatatacacatgaggtagtaacactctggtacagatctccagaagtattgctggggtcagctcgttactcaactccagttgacatttggagtat

SEQ ID NO: 123628 - DNA, 1884 bp, Homo sapiens
  Payload ID: 4269
  Gene Symbol: CDK1
  Gene Name: cyclin-dependent kinase 1
  ENST ID: ENST00000614696
  CDS Start-End: 101-775
ggctcttggaaattgagcggagagcgacgcggttgttgtagctgccgctgcggccgccgcggaataataagccgggatctaccatacccattgactaactatggaagattataccaaaatagagaaaattggagaaggtacctatggagttgtgtataagggtagacacaaaactacaggtcaagtggtagccatgaaaaaaatcagactagaaagtgaagaggaaggggttcctagtactgcaattcgggaaatttctctattaaaggaacttcgtcatccaaatatagtcagtcttcaggatgtgcttatgcaggattccaggttatatctcatctttgagtttctttccatggatctgaagaaatacttggattctatccctcctggtcagtacatggattcttcacttgttaagagttatttataccaaatcctacaggggattgtgttttgtcactctagaagagttcttcacagagacttaaaacctcaaaatctcttgattgatgacaaaggaacaattaaactggctgattttggccttgccagagcttttggaatacctatcagagtatatacacatgaggtagtaacactctggtacagatctccagaagtattgctggggtcagctcgttactcaactccagttgacatttggagtataggcaccatatttgctgaactagcaactaagaaaccacttttccatggggattcagaaattgatcaactcttcaggattttcagaaatttttttcctgttttttagagctttgggcactcccaataatgaagtgtggccagaagtggaatctttacaggactataagaatacatttcccaaatggaaaccaggaagcctagcatcccatgtcaaaaacttggatgaaaatggcttggatttgctctcgaaaatgttaatctatgatccagccaaacgaatttctggcaaaatggcactgaatcatccatattttaatgatttggacaatcagattaagaagatgtagctttctgacaaaaagtttccatatgttatatcaacagatagttgtgtttttattgttaactcttgtctatttttgtcttatatatatttctttgttatcaaacttcagctgtacttcgtcttctaatttcaaaaatataacttaaaaatgtaaatattctatatgaatttaaatataattctgtaaatgtgtgtaggtctcactgtaacaactatttgttactataataaaactataatattgatgtcaggaatcaggaaaaaatttgagttggcttaaatcatctcagtccttatggcagttttattttcctgtagttggaactactaaaatttaggaaaatgctaagttcaagtttcgtaatgctttgaagtatttttatgctctgaatgtttaaatgttctcatcagtttcttgccatgttgttaactatacaacctggctaaagatgaatatttttctactggtattttaatttttgacctaaatgtttaagcattcggaatgagaaaactatacagatttgagaaatgatgctaaatttataggagttttcagtaacttaaaaagctaacatgagagcatgccaaaatttgctaagtcttacaaagatcaagggctgtccgcaacagggaagaacagttttgaaaatttatgaactatcttatttttaggtaggttttgaaagctttttgtctaagtgaattcttatgccttggtcagagtaataactgaaggagttgcttatcttggctttcgagtctgagtttaaaactacacattttgacatagtgtttattagcagccatctaaaaaggctctaatgtatatttaactaaaattactagctttgggaattaaactgttt

SEQ ID NO: 123629 - DNA, 3344 bp, Homo sapiens
  Payload ID: 4270
  Gene Symbol: CDK10
  Gene Name: cyclin-dependent kinase 10
  ENST ID: ENST00000331006
  CDS Start-End: 1742-2683
gttgtatgccacataagtaaccaaatttgcttgtcaattatgtcttttttttttcttttttctgagacagagtcttgctctgtggcccaggctggagtgcagtggtacagtcttggctcactgcaacctctgcctcccaggttcaagcgattctcatacctcagcctccagagtagctggactgcaggcgcatgctaccacggccagataatttttgtatttttaatagagacggggtttcttttttttttttttccctgacagagttttgcttttgttgcccaggcttggagtgcaatggcgcgatcttggctcactgcaacctccacttcctgggttcaagcaattcttctgcctcagcctcccaagtagctgggattacaggtgtacaccaccatgcctggctaattttgcatttttttagtagagacatggtttcaccatgttgatcagggtcgtctcaaactcctgacctcaagtgatccacccgcctcagtctcccaaagttttgggattataaatgtgcgccactgcacccggtcaagacagggttttgccatgttagccagggaggtctcaaactcctgacctcaagttatccgccctgcttggtctcccaaagtgctgggattgcacacatgagccactgtgcctggcctcaattatgtctttaactgtggctgttctaagacttttgtcatccacaattgttgttttacttttatcctttcacagagcagtttataatcagctatagaactctgaggtactcttcaatctaagtttctgatcacttttgagattgtgccattggaatagagcaaaaaacttccaagactctcattgagagctgctatattcatgaggattgttcatccaatattgggcaaaatgagagttaattttatggactaaactaatataagactgaaataatctttttatgtttttgcttaaaacattactgattctttctgttctttcagaaccaagaaaacttttttttttttttttttgagacagaatctcactctgtcgcccaggctggagtgcagtggcgccatctcggctcactgcaagctccgcctcccaggttcacaccattctcctgcttcagcctcccaagtagctgggactacaggcgcccaccaccgcgcccggctaattttttgtatttttagtagagacagggtttcaccgtgttagccaggatggtctcaatctcctgaccttgtgatccgcccacctcggcctcccagagtgctgggattacaggcgtgagccacggtgcccggctggtaacttttttaactttgagctatttgcagcttttagcaattgagtaaagtacactcctgtgaggaagatttggaacatatttctgttttcttttttgttttttatattttgcttgggtagcatatttctttctgatttctccaaaaattgggaactatctgtgagcactatttaaaaaaaaaaaaaaaacttttccctctcccttcccctatttgtattctaatgtcaatataatgatgtgtgcacgtgcagtaacaatctgttttctcttgtaataggacatagagacactgcatattttaccaaggctttgactggaatggcatgctttcaaatataaacagacggctttaaggaatcagagttgacctatagtgcccatcaaagcccttgggaaaactggcttcatactgtatccacccagtggattcttcttgcccagatggagcccatgtatcaagatcgggcccgggacacccagacagatgagattgtcgcactgaagaaggtgcggatggacaaggagaaggatggcatccccatcagcagcttgcgggagatcacgctgctgctccgcctgcgtcatccgaacatcgtggagctgaaggaggtggttgtggggaaccacctggagagcatcttcctggtgatgggttactgtgagcaggacctggccagcctcctggagaatatgccaacacccttctcggaggctcaggtcaagtgcatcgtgctgcaggtgctccggggcctccagtatctgcacaggaacttcattatccacagggacctgaaggtttccaacttgctcatgaccgacaagggttgtgtgaagacagcggatttcggcctggcccgggcctatggtgtcccagtaaagccaatgacccccaaggtggtcactctctggtaccgagcccctgaactgctgttgggaaccaccacgcagaccaccagcatcgacatgtgggctgtgggctgcatactggccgagctgctggcgcacaggcctcttctccccggcacttccgagatccaccagatcgacttgatcgtgcagctgctgggcacgcccagtgagaacatctggccgggcttttccaagctgccactggtcggccagtacagcctccggaagcagccctacaacaacctgaagcacaagttcccatggctgtcggaggccgggctgcgcctgctgcacttcctgttcatgtacgaccctaagaaaagggcgacggccggggactgcctggagagctcctatttcaaggagaagcccctaccctgtgagccggagctcatgccgacctttccccaccaccgcaacaagcgggccgccccagccacctccgagggccagagcaagcgctgtaaaccctgacggtgggcctggcacacgcctgtattcccacaccaggtcttccgatcagtggtgtctgtgaagggtgccgcgagccaggctgaccaggcgcccgggatccagctcatccccttggctgggaacatcctccactgacttcctcccactgtctgccctgaacccactgctgcccccagaaaaaggccgggtgacaccggggggctcccagcccgtgcaccctggaagggcaggtctggcggctccatccgtggctgcaggggtctcatgtggtcctcctcgctatgttggaaatgtgcaaccactgcttcttgggaggagtggtgggtgcagtccccccgctgtctttgagttgtggtggacgctggcctgggatgagagggcccagaagaccttcgtatcccctctcagtcgcccggggctgtcccgtgcatgggttggctgtggggaccccaggtgggcctggcaggactccagatgaggacaagagggacaaggtatggggtgggagccacaattgaggataccccgagactaccaggagagccctgggctggaggctgagctgcatccctgctccccacatggaggacccaacaggaggccgtggctctgatgctgagcgaagctataggctcttgttggataaaagcttttttaacag

SEQ ID NO: 123630 - DNA, 1798 bp, Homo sapiens
  Payload ID: 4270
  Gene Symbol: CDK10
  Gene Name: cyclin-dependent kinase 10
  Uniprot ID: Q15131
  ENST ID: ENST00000353379
  CDS Start-End: 44-1126
gcgtctgcgcctgcgcgcaagagaggcggggccagcgctcggcatggcggagccagatctggagtgcgagcagatccgtctgaagtgtattcgtaaggagggcttcttcacggtgcctccggaacacaggctgggacgatgccggagtgtgaaggagtttgagaagctgaaccgcattggagagggtacctacggcattgtgtatcgggcccgggacacccagacagatgagattgtcgcactgaagaaggtgcggatggacaaggagaaggatggcatccccatcagcagcttgcgggagatcacgctgctgctccgcctgcgtcatccgaacatcgtggagctgaaggaggtggttgtggggaaccacctggagagcatcttcctggtgatgggttactgtgagcaggacctggccagcctcctggagaatatgccaacacccttctcggaggctcaggtcaagtgcatcgtgctgcaggtgctccggggcctccagtatctgcacaggaacttcattatccacagggacctgaaggtttccaacttgctcatgaccgacaagggttgtgtgaagacagcggatttcggcctggcccgggcctatggtgtcccagtaaagccaatgacccccaaggtggtcactctctggtaccgagcccctgaactgctgttgggaaccaccacgcagaccaccagcatcgacatgtgggctgtgggctgcatactggccgagctgctggcgcacaggcctcttctccccggcacttccgagatccaccagatcgacttgatcgtgcagctgctgggcacgcccagtgagaacatctggccgggcttttccaagctgccactggtcggccagtacagcctccggaagcagccctacaacaacctgaagcacaagttcccatggctgtcggaggccgggctgcgcctgctgcacttcctgttcatgtacgaccctaagaaaagggcgacggccggggactgcctggagagctcctatttcaaggagaagcccctaccctgtgagccggagctcatgccgacctttccccaccaccgcaacaagcgggccgccccagccacctccgagggccagagcaagcgctgtaaaccctgacggtgggcctggcacacgcctgtattcccacaccaggtcttccgatcagtggtgtctgtgaagggtgccgcgagccaggctgaccaggcgcccgggatccagctcatccccttggctgggaacatcctccactgacttcctcccactgtctgccctgaacccactgctgcccccagaaaaaggccgggtgacaccggggggctcccagcccgtgcaccctggaagggcaggtctggcggctccatccgtggctgcaggggtctcatgtggtcctcctcgctatgttggaaatgtgcaaccactgcttcttgggaggagtggtgggtgcagtccccccgctgtctttgagttgtggtggacgctggcctgggatgagagggcccagaagaccttcgtatcccctctcagtcgcccggggctgtcccgtgcatgggttggctgtggggaccccaggtgggcctggcaggactccagatgaggacaagagggacaaggtatggggtgggagccacaattgaggataccccgagactaccaggagagccctgggctggaggctgagctgcatccctgctccccacatggaggacccaacaggaggccgtggctctgatgctgagcgaagctataggctcttgttggataaaagcttttttaacagacatggtttca

SEQ ID NO: 123631 - DNA, 551 bp, Homo sapiens
  Payload ID: 4270
  Gene Symbol: CDK10
  Gene Name: cyclin-dependent kinase 10
  ENST ID: ENST00000502547
  CDS Start-End: 28-237
gcaagagaggcggggccagcgctcggcatggcggagccagatctggagtgcgagcagatccgtctgaagtgtattcgtaaggagggcttcttcacggtgcctccggaacacaggggtctagcgctctcgcccaggctggaatgcagtggcgtgatcacggctcagtgcatcgtcagcctcctgggctcaagtgatcttcctgcctcggcctcccaagtgctggaattacaggcgtgagccaccgcccccagcctggcctggcatttctttgagttcaggaagtgtgacaaggatttggacacccagaaataagcgtgtcgagaagagcacaagcagaggatctgggacgatgccggagtgtgaaggagtttgagaagctgaaccgcattggagagggtacctacggcattgtgtatcgggcccgggacacccagacagatgagattgtcgcactgaagaaggtgcggatggacaaggagaaggatggcatccccatcagcagcttgcgggagatcacgctgctgctccgcctgcgtcatccgaacatcgtg

SEQ ID NO: 123632 - DNA, 555 bp, Homo sapiens
  Payload ID: 4270
  Gene Symbol: CDK10
  Gene Name: cyclin-dependent kinase 10
  ENST ID: ENST00000508723
  CDS Start-End: 42-170
gtctgcgcctgcgcgcaagagaggcggggccagcgctcggcatggcggagccagatctggagtgcgagcagatccgtctgaagtgtattcggtctagcgctctcgcccaggctggaatgcagtggcgtgatcacggctcagtgcatcgtcagcctcctgggctcaagtgatcttcctgcctcggcctcccaagtgctggaattacaggcgtgagccaccgcccccagcctggcctggcatttctttgagttcaggaagtgtgacaaggatttggacacccagaaataagcgtgtcgagaagagcacaagcagaggatctgggacgatgccggagtgtgaaggagtttgagaagctgaaccgcattggagagggtacctacggcattgtgtatcgggcccgggacacccagacagatgagattgtcgcactgaagaaggtgcggatggacaaggagaaggatggcatccccatcagcagcttgcgggagatcacgctgctgctccgcctgcgtcatccgaacatcgtggagctgaaggaggtggttgtggggaacc

SEQ ID NO: 123633 - DNA, 1424 bp, Homo sapiens
  Payload ID: 4270
  Gene Symbol: CDK10
  Gene Name: cyclin-dependent kinase 10
  Uniprot ID: Q15131
  ENST ID: ENST00000505473
  CDS Start-End: 217-1035
gtctgcgcctgcgcgcaagagaggcggggccagcgctcggcatggcggagccagatctggagtgcgagcagatccgtctgaagtgtattcctgggacgatgccggagtgtgaaggagtttgagaagctgaaccgcattggagagggtacctacggcattgtgtatcgggcccgggacacccagacagatgagattgtcgcactgaagaaggtgcggatggacaaggagaaggatggcatccccatcagcagcttgcgggagatcacgctgctgctccgcctgcgtcatccgaacatcgtggagctgaaggaggtggttgtggggaaccacctggagagcatcttcctggtgatgggttactgtgagcaggacctggccagcctcctggagaatatgccaacacccttctcggaggctcaggtcaagtgcatcgtgctgcaggtgctccggggcctccagtatctgcacaggaacttcattatccacagggacctgaaggtttccaacttgctcatgaccgacaagggttgtgtgaagacagcggatttcggcctggcccgggcctatggtgtcccagtaaagccaatgacccccaaggtggtcactctctggtaccgagcccctgaactgctgttgggaaccaccacgcagaccaccagcatcgacatgtgggctgtgggctgcatactggccgagctgctggcgcacaggcctcttctccccggcacttccgagatccaccagatcgacttgatcgtgcagctgctgggcacgcccagtgagaacatctggccgggcttttccaagctgccactggtcggccagtacagcctccggaagcagccctacaacaacctgaagcacaagttcccatggctgtcggaggccgggctgcgcctgctgcacttcctgttcatgtacgaccctaagaaaagggcgacggccggggactgcctggagagctcctatttcaaggagaagcccctacgtcttccgatcagtggtgtctgtgaagggtgccgcgagccaggctgaccaggcgcccgggatccagctcatccccttggctgggaacatcctccactgacttcctcccactgtctgccctgaacccactgctgcccccagaaaaaggccgggtgacaccggggggctcccagcccgtgcaccctggaagggcaggtctggcggctccatccgtggctgcaggggtctcatgtggtcctcctcgctatgttggaaatgtgcaaccactgcttcttgggaggagtggtgggtgcagtccccccgctgtctttgagttgtggtggacgctggcctgggatgagagggcccagaagaccttcgtatcccctctcagtcgcccggggctgtcccgtgcatgggttggctgtggggaccccaggtgggcctggcaggactcc

SEQ ID NO: 123634 - DNA, 707 bp, Homo sapiens
  Payload ID: 4270
  Gene Symbol: CDK10
  Gene Name: cyclin-dependent kinase 10
  ENST ID: ENST00000511415
  CDS Start-End: 32-202
gcgcgcaagagaggcggggccagcgctcggcatggcggagccagatctggagtgcgagcagatccgtctgaagtgtattcatcgtggctggatgacaacaggagccacactttactcatccagacgtgcagcaggcgctcaccgcgttgagagccgtgtgctggactctggggtgaagtactgggacgatgccggagtgtgaaggagtttgagaagctgaaccgcattggagagggtacctacggcattgtgtatcgggcccgggacacccagacagatgagattgtcgcactgaagaaggtgcggatggacaaggagaaggatggcatccccatcagcagcttgcgggagatcacgctgctgctccgcctgcgtcatccgaacatcgtggagctgaaggaggtggttgtggggaaccacctggagagcatcttcctggtgatgggttactgtgagcaggacctggccagcctcctggagaatatgccaacacccttctcggaggctcaggtcaagtgcatcgtgctgcaggtgctccggggcctccagtatctgcacaggaacttcattatccacagggacctgaaggtttccaacttgctcatgaccgacaagggttgtgtgaagacaggtgggtgcaacttgggccaggccctgtccctagatggcacttggtgacacacactcccctctctgctgcagcggat

SEQ ID NO: 123635 - DNA, 658 bp, Homo sapiens
  Payload ID: 4270
  Gene Symbol: CDK10
  Gene Name: cyclin-dependent kinase 10
  ENST ID: ENST00000512912
  CDS Start-End: 22-231
gaggcggggccagcgctcggcatggcggagccagatctggagtgcgagcagatccgtctgaagtgtattcgtaaggagggcttcttcacggtgcctccggaacacaggggtctagcgctctcgcccaggctggaatgcagtggcgtgatcacggctcagtgcatcgtcagcctcctgggctcaagtgatcttcctgcctcggcctcccaagtgctggaattacaggcgtgagccaccgcccccagcctggcctggcatttctttgagttcaggaagtgtgacaaggatttggacacccagaaataagcgtgtcgagaagagcacaagcagaggatatcgggcccgggacacccagacagatgagattgtcgcactgaagaaggtgcggatggacaaggagaaggatggcatccccatcagcagcttgcgggagatcacgctgctgctccgcctgcgtcatccgaacatcgtggagctgaaggaggtggttgtggggaaccacctggagagcatcttcctggtgatgggttactgtgagcaggacctggccagcctcctggagaatatgccaacacccttctcggaggctcaggtcaagtgcatcgtgctgcaggtgctccggggcctccagtatctgcacaggaacttcattatccac

SEQ ID NO: 123636 - DNA, 1376 bp, Homo sapiens
  Payload ID: 4270
  Gene Symbol: CDK10
  Gene Name: cyclin-dependent kinase 10
  ENST ID: ENST00000510811
  CDS Start-End: 21-149
aggcggggccagcgctcggcatggcggagccagatctggagtgcgagcagatccgtctgaagtgtattcgtaaggagggcttcttcacggtgcctccggaacacaggatcgggcccgggacacccagacagatgagattgtcgcactgaagaaggtgcggatggacaaggagaaggatggcatccccatcagcagcttgcgggagatcacgctgctgctccgcctgcgtcatccgaacatcgtggagctgaaggaggtggttgtggggaaccacctggagagcatcttcctggtgatgggttactgtgagcaggacctggccagcctcctggagaatatgccaacacccttctcggaggctcaggtcaagtgcatcgtgctgcaggtgctccggggcctccagtatctgcacaggaacttcattatccacagggacctgaaggtttccaacttgctcatgaccgacaagggttgtgtgaagacagcggatttcggcctggcccgggcctatggtgtcccagtaaagccaatgacccccaaggtggtcactctctggtaccgagcccctgaactgctgttgggaaccaccacgcagaccaccagcatcgacatgtgggctgtgggctgcatactggccgagctgctggcgcacaggcctcttctccccggcacttccgagatccaccagatcgacttgatcgtgcagctgctgggcacgcccagtgagaacatctggccgggcttttccaagctgccactggtcggccagtacagcctccggaagcagccctacaacaacctgaagcacaagttcccatggctgtcggaggccgggctgcgcctgctgcacttcctgttcatgtacgaccctaagaaaagggcgacggccggggactgcctggagagctcctatttcaaggagaagcccctaccctgtgagccggagctcatgccgacctttccccaccaccgcaacaagcgggccgccccagccacctccgagggccagagcaagcgctgtaaaccctgacggtgggcctggcacacgcctgtattcccacaccaggtcttccgatcagtggtgtctgtgaagggtgccgcgagccaggctgaccaggcgcccgggatccagctcatccccttggctgggaacatcctccactgacttcctcccactgtctgccctgaacccactgctgcccccagaaaaaggccgggtgacaccggggggctcccagcccgtgcaccctggaagggcaggtctggcggctccatccgtggctgcaggggtctcatgtggtcctcctcgctatgttggaaatgtgcaaccactgcttcttgggaggagtggtgggtgcagtccccccgctgtcttt

SEQ ID NO: 123637 - DNA, 724 bp, Homo sapiens
  Payload ID: 4270
  Gene Symbol: CDK10
  Gene Name: cyclin-dependent kinase 10
  ENST ID: ENST00000565470
  CDS Start-End: 1-113
ctgaactgctgttgggaaccaccacgcagaccaccagcatcgacatgtgggcttttccaagctgccactggtcggccagtacagcctccggaagcagccctacaacaacctgaagcacaagttcccatggctgtcggaggccgggctgcgcctgctgcacttcctgttcatggcgacggccggggactgcctggagagctcctatttcaaggagaagcccctaccctgtgagccggagctcatgccgacctttccccaccaccgcaacaagcgggccgccccagccacctccgagggccagagcaagcgctgtaaaccctgacggtgggcctggcacacgcctgtattcccacaccaggtcttccgatcagtggtgtctgtgaagggtgccgcgagccaggctgaccaggcgcccgggatccagctcatccccttggctgggaacatcctccactgacttcctcccactgtctgccctgaacccactgctgcccccagaaaaaggccgggtgacaccggggggctcccagcccgtgcaccctggaagggcaggtctggcggctccatccgtggctgcaggggtctcatgtggtcctcctcgctatgttggaaatgtgcaaccactgcttcttgggaggagtggtgggtgcagtccccccgctgtctttgagttgtggtggacgctggcctgggatgagagggcccagaagaccttcgtatcccc

SEQ ID NO: 123638 - DNA, 897 bp, Homo sapiens
  Payload ID: 4270
  Gene Symbol: CDK10
  Gene Name: cyclin-dependent kinase 10
  ENST ID: ENST00000564192
  CDS Start-End: 181-897
tcggcatggcggagccagatctggagtgcgagcagatccgtctgaagtgtattcctgggacgatgccggagtgtgaaggagtttgagaagctgaaccgcattggagagggtacctacggcattgtgtatcgggcccgggacacccagacagatgagattgtcgcactgaagaaggtgcggatggacaaggagaaggatggcatccccatcagcagcttgcgggagatcacgctgctgctccgcctgcgtcatccgaacatcgtggagctgaaggaggtggttgtggggaaccacctggagagcatcttcctggtgatgggttactgtgagcaggacctggccagcctcctggagaatatgccaacacccttctcggaggctcaggtcaagtgcatcgtgctgcaggtgctccggggcctccagtatctgcacaggaacttcattatccacagggacctgaaggtttccaacttgctcatgaccgacaagggttgtgtgaagacagcggatttcggcctggcccgggcctatggtgtcccagtaaagccaatgacccccaaggtggtcactctctggtaccgagcccctgaactgctgttgggaaccaccacgcagaccaccagcatcgacatgtgggtcagcaaaggtctggctgcagtcaggtcctctgttcctcgcgctggcggggtcagcagacgtctggccgcagtgaggtccactgttctctgcagggctgtgggctgcatactggccgagctgctggcgcacaggcctcttctccccggcacttccgagatccaccagatcgacttgatcgtgcagctgctgggcacgcccagtgagaacatctggccgggcttttccaagctgccactggtcggccagtacagcctccgg

SEQ ID NO: 123639 - DNA, 819 bp, Homo sapiens
  Payload ID: 4270
  Gene Symbol: CDK10
  Gene Name: cyclin-dependent kinase 10
  Uniprot ID: Q15131
  ENST ID: ENST00000617879
  CDS Start-End: 1-819
atggacaaggagaaggatggcatccccatcagcagcttgcgggagatcacgctgctgctccgcctgcgtcatccgaacatcgtggagctgaaggaggtggttgtggggaaccacctggagagcatcttcctggtgatgggttactgtgagcaggacctggccagcctcctggagaatatgccaacacccttctcggaggctcaggtcaagtgcatcgtgctgcaggtgctccggggcctccagtatctgcacaggaacttcattatccacagggacctgaaggtttccaacttgctcatgaccgacaagggttgtgtgaagacagcggatttcggcctggcccgggcctatggtgtcccagtaaagccaatgacccccaaggtggtcactctctggtaccgagcccctgaactgctgttgggaaccaccacgcagaccaccagcatcgacatgtgggctgtgggctgcatactggccgagctgctggcgcacaggcctcttctccccggcacttccgagatccaccagatcgacttgatcgtgcagctgctgggcacgcccagtgagaacatctggccgggcttttccaagctgccactggtcggccagtacagcctccggaagcagccctacaacaacctgaagcacaagttcccatggctgtcggaggccgggctgcgcctgctgcacttcctgttcatgtacgaccctaagaaaagggcgacggccggggactgcctggagagctcctatttcaaggagaagcccctacgtcttccgatcagtggtgtctgtgaagggtgccgcgagccaggctga

SEQ ID NO: 123640 - DNA, 140 bp, Homo sapiens
  Payload ID: 4270
  Gene Symbol: CDK10
  Gene Name: cyclin-dependent kinase 10
  ENST ID: ENST00000625631
  CDS Start-End: 12-140
cagcgctcggcatggcggagccagatctggagtgcgagcagatccgtctgaagtgtattcgtaaggagggcttcttcacggtgcctccggaacacaggatcgggcccgggacacccagacagatgagattgtcgcactga

SEQ ID NO: 123641 - DNA, 2653 bp, Homo sapiens
  Payload ID: 4271
  Gene Symbol: CDK11A
  Gene Name: cyclin-dependent kinase 11A
  ENST ID: ENST00000356200
  CDS Start-End: 236-2476
tgttttaactcaaatgggtgatgaaaaggactcttggaaagtgaaaactttagatgaaattcttcaggaaaagaaacgaaggaaggaacaagaggagaaagcagagataaaacgcttaaaaaatgtaagccatatttttttaagtaagtggttttcttaaaggagatttaatttctttgccctcatttttccattagaacaacgcttcttcggtgaagttcttttgtacttccaaatgtcgcagtctgatgaccgggattccaagcgggattcccttgaggagggggagctgagagatcactgcatggagatcacaataaggaactccccgtatagaagagaagactcaatggaagacagaggagaagaagatgattctttggccatcaaaccaccccagcaaatgtctcggaaagaaaaagttcatcacagaaaagatgaaaagagaaaagaaaaatgtaggcatcatagccattcagcagaaggggggaagcatgctagagtgaaagaaagagagcacgaacgtcggaaacgacatcgagaagaacaggataaagctcgccgggaatgggaaagacagaagagaagggaaatggcaagggagcattccaggagagaaagggaccgcttggagcagttagaaaggaagcgggagcgggagcgcaagatgcgggagcagcagaaggagcagcgggagcagaaggagcgcgagcggcgggcggaggagcggcgcaaggagcgggaggcccgcagggaagtgtctgcacatcaccgaacgatgagagaggactacagcgacaaagtgaaagccagccactggagtcgcagcccgcctcggccgccgcgggagcggttcgagttgggagacggccggaagccagtaaaagaagagaaaatggaagaaagggacctgctgtccgacttacaggacatcagcgacagcgagaggaagaccagctcggccgagtcctcgtcagcggaatcaggctcaggttctgaggaagaagaggaggaggaggaagaggaggaggaggaagggagcaccagtgaagaatcagaggaggaggaggaggaagaggaagaggaggaggaggagaccggcagcaactctgaggaggcatcagagcagtctgccgaagaagtaagtgaggaagaaatgagtgaagatgaagaacgagaaaatgaaaaccacctcttggttgttccagagtcacggttcgaccgagattccggggagagtgaagaagcagaggaagaagtgggtgagggaacgccgcagagcagcgccctgacagagggcgactatgtgcccgactcccctgccctgttgcccatcgagctcaagcaggagctgcccaagtacctgccggccctgcagggctgccggagcgtcgaggagttccagtgcctgaacaggatcgaggagggcacctatggagtggtctacagagcaaaagacaagaaaacagatgaaattgtggctctaaagcggctgaagatggagaaggagaaggagggcttcccgatcacgtccctgagggagatcaacaccatcctcaaggcccagcatcccaacattgtcaccgttagagagattgtggtgggcagcaacatggacaagatctacatcgtgatgaactacgtggagcacgacctcaagagcctgatggagaccatgaaacagcccttcctgccaggggaggtgaagaccctgatgatccagctgctgcggggggtgaaacacctgcacgacaactggatcctgcaccgtgacctcaagacgtccaacctgctgctgagccacgccggcatcctcaaggtgggtgattttgggctggcgcgggagtacggatcccctctgaaggcctacaccccggtcgtggtgacccagtggtaccgcgccccagagctgctgcttggtgccaaggaatactccacggccgtggacatgtggtcagtgggctgcatcttcggggagctgctgactcagaagcctctgttccccgggaattcggaaatcgatcagatcaacaaagtgttcaaggagctggggacccccagtgagaaaatctggcccggctacagtgagctcccagtagtcaaaaagatgaccttcagcgagcacccctacaacaacctccgcaagcgcttcggggctctgctctcagaccagggcttcgacctcatgaacaagttcctgacctacttccccgggaggaggatcagcgctgaggacggcctcaagcatgagtatttccgcgagacccccctccccatcgacccctccatgttccccacgtggcccgccaagagcgagcagcagcgtgtgaagcggggcaccagcccgaggccccctgagggaggcctgggctacagccagctgggtgacgacgacctgaaggagacgggcttccaccttaccaccacgaaccagggggcctctgccgcgggccccggcttcagcctcaagttctgaaggtcagagtggaccccgtcatggggagaactcagccgggaccacaggcgtggctactgcggctggagctgcgatgagactcggaactcctcgtcttactttgtgctccatgttttgtttttgtattttggtttgtaaatttgtagaattaaatcattttccttgttgtggaggaaa

SEQ ID NO: 123642 - DNA, 2446 bp, Homo sapiens
  Payload ID: 4271
  Gene Symbol: CDK11A
  Gene Name: cyclin-dependent kinase 11A
  ENST ID: ENST00000357760
  CDS Start-End: 81-2420
gatacttctggcgagcgccggttgctgtttcttctcaggctcagggaccggccgcggccccgtagggtgttttaactcaaatgggtgatgaaaaggactcttggaaagtgaaaactttagatgaaattcttcaggaaaagaaacgaaggaaggaacaagaggagaaagcagagataaaacgcttaaaaaattctgatgaccgggattccaagcgggattcccttgaggagggggagctgagagatcactgcatggagatcacaataaggaactccccgtatagaagagaagactcaatggaagacagaggagaagaagatgattctttggccatcaaaccaccccagcaaatgtctcggaaagaaaaagttcatcacagaaaagatgaaaagagaaaagaaaaatggaagcatgctagagtgaaagaaagagagcacgaacgtcggaaacgacatcgagaagaacaggataaagctcgccgggaatgggaaagacagaagagaagggaaatggcaagggagcattccaggagagaaagggggaatgatggcgtgtgcctcttcagggaccgcttggagcagttagaaaggaagcgggagcgggagcgcaagatgcgggagcagcagaaggagcagcgggagcagaaggagcgcgagcggcgggcggaggagcggcgcaaggagcgggaggcccgcagggaagtgtctgcacatcaccgaacgatgagagaggactacagcgacaaagtgaaagccagccactggagtcgcagcccgcctcggccgccgcgggagcggttcgagttgggagacggccggaagccagtaaaagaagagaaaatggaagaaagggacctgctgtccgacttacaggacatcagcgacagcgagaggaagaccagctcggccgagtcctcgtcagcggaatcaggctcaggttctgaggaagaagaggaggaggaggaagaggaggaggaggaagggagcaccagtgaagaatcagaggaggaggaggaggaagaggaagaggaggaggaggagaccggcagcaactctgaggaggcatcagagcagtctgccgaagaagtaagtgaggaagaaatgagtgaagatgaagaacgagaaaatgaaaaccacctcttggttgttccagagtcacggttcgaccgagattccggggagagtgaagaagcagaggaagaagtgggtgagggaacgccgcagagcagcgccctgacagagggcgactatgtgcccgactcccctgccctgttgcccatcgagctcaagcaggagctgcccaagtacctgccggccctgcagggctgccggagcgtcgaggagttccagtgcctgaacaggatcgaggagggcacctatggagtggtctacagagcaaaagacaagaaaacagatgaaattgtggctctaaagcggctgaagatggagaaggagaaggagggcttcccgatcacgtccctgagggagatcaacaccatcctcaaggcccagcatcccaacattgtcaccgttagagagattgtggtgggcagcaacatggacaagatctacatcgtgatgaactacgtggagcacgacctcaagagcctgatggagaccatgaaacagcccttcctgccaggggaggtgaagaccctgatgatccagctgctgcggggggtgaaacacctgcacgacaactggatcctgcaccgtgacctcaagacgtccaacctgctgctgagccacgccggcatcctcaaggtgggtgattttgggctggcgcgggagtacggatcccctctgaaggcctacaccccggtcgtggtgacccagtggtaccgcgccccagagctgctgcttggtgccaaggaatactccacggccgtggacatgtggtcagtgggctgcatcttcggggagctgctgactcagaagcctctgttccccgggaattcggaaatcgatcagatcaacaaagtgttcaaggagctggggacccccagtgagaaaatctggcccggctacagtgagctcccagtagtcaaaaagatgaccttcagcgagcacccctacaacaacctccgcaagcgcttcggggctctgctctcagaccagggcttcgacctcatgaacaagttcctgacctacttccccgggaggaggatcagcgctgaggacggcctcaagcatgagtatttccgcgagacccccctccccatcgacccctccatgttccccacgtggcccgccaagagcgagcagcagcgtgtgaagcggggcaccagcccgaggccccctgagggaggcctgggctacagccagctgggtgacgacgacctgaaggagacgggcttccaccttaccaccacgaaccagggggcctctgccgcgggccccggcttcagcctcaagttctgaaggtcagagtggaccccgtcatgggg

SEQ ID NO: 123643 - DNA, 2419 bp, Homo sapiens
  Payload ID: 4271
  Gene Symbol: CDK11A
  Gene Name: cyclin-dependent kinase 11A
  Uniprot ID: Q9UQ88
  ENST ID: ENST00000358779
  CDS Start-End: 81-2393
gatacttctggcgagcgccggttgctgtttcttctcaggctcagggaccggccgcggccccgtagggtgttttaactcaaatgggtgatgaaaaggactcttggaaagtgaaaactttagatgaaattcttcaggaaaagaaacgaaggaaggaacaagaggagaaagcagagataaaacgcttaaaaaattctgatgaccgggattccaagcgggattcccttgaggagggggagctgagagatcactgcatggagatcacaataaggaactccccgtatagaagagaagactcaatggaagacagaggagaagaagatgattctttggccatcaaaccaccccagcaaatgtctcggaaagaaaaagttcatcacagaaaagatgaaaagagaaaagaaaaatggaagcatgctagagtgaaagaaagagagcacgaacgtcggaaacgacatcgagaagaacaggataaagctcgccgggaatgggaaagacagaagagaagggaaatggcaagggagcattccaggagagaaagggaccgcttggagcagttagaaaggaagcgggagcgggagcgcaagatgcgggagcagcagaaggagcagcgggagcagaaggagcgcgagcggcgggcggaggagcggcgcaaggagcgggaggcccgcagggaagtgtctgcacatcaccgaacgatgagagaggactacagcgacaaagtgaaagccagccactggagtcgcagcccgcctcggccgccgcgggagcggttcgagttgggagacggccggaagccagtaaaagaagagaaaatggaagaaagggacctgctgtccgacttacaggacatcagcgacagcgagaggaagaccagctcggccgagtcctcgtcagcggaatcaggctcaggttctgaggaagaagaggaggaggaggaagaggaggaggaggaagggagcaccagtgaagaatcagaggaggaggaggaggaagaggaagaggaggaggaggagaccggcagcaactctgaggaggcatcagagcagtctgccgaagaagtaagtgaggaagaaatgagtgaagatgaagaacgagaaaatgaaaaccacctcttggttgttccagagtcacggttcgaccgagattccggggagagtgaagaagcagaggaagaagtgggtgagggaacgccgcagagcagcgccctgacagagggcgactatgtgcccgactcccctgccctgttgcccatcgagctcaagcaggagctgcccaagtacctgccggccctgcagggctgccggagcgtcgaggagttccagtgcctgaacaggatcgaggagggcacctatggagtggtctacagagcaaaagacaagaaaacagatgaaattgtggctctaaagcggctgaagatggagaaggagaaggagggcttcccgatcacgtccctgagggagatcaacaccatcctcaaggcccagcatcccaacattgtcaccgttagagagattgtggtgggcagcaacatggacaagatctacatcgtgatgaactacgtggagcacgacctcaagagcctgatggagaccatgaaacagcccttcctgccaggggaggtgaagaccctgatgatccagctgctgcggggggtgaaacacctgcacgacaactggatcctgcaccgtgacctcaagacgtccaacctgctgctgagccacgccggcatcctcaaggtgggtgattttgggctggcgcgggagtacggatcccctctgaaggcctacaccccggtcgtggtgacccagtggtaccgcgccccagagctgctgcttggtgccaaggaatactccacggccgtggacatgtggtcagtgggctgcatcttcggggagctgctgactcagaagcctctgttccccgggaattcggaaatcgatcagatcaacaaagtgttcaaggagctggggacccccagtgagaaaatctggcccggctacagtgagctcccagtagtcaaaaagatgaccttcagcgagcacccctacaacaacctccgcaagcgcttcggggctctgctctcagaccagggcttcgacctcatgaacaagttcctgacctacttccccgggaggaggatcagcgctgaggacggcctcaagcatgagtatttccgcgagacccccctccccatcgacccctccatgttccccacgtggcccgccaagagcgagcagcagcgtgtgaagcggggcaccagcccgaggccccctgagggaggcctgggctacagccagctgggtgacgacgacctgaaggagacgggcttccaccttaccaccacgaaccagggggcctctgccgcgggccccggcttcagcctcaagttctgaaggtcagagtggaccccgtcatgggg

SEQ ID NO: 123644 - DNA, 2458 bp, Homo sapiens
  Payload ID: 4271
  Gene Symbol: CDK11A
  Gene Name: cyclin-dependent kinase 11A
  Uniprot ID: Q9UQ88
  ENST ID: ENST00000378633
  CDS Start-End: 81-2432
gatacttctggcgagcgccggttgctgtttcttctcaggctcagggaccggccgcggccccgtagggtgttttaactcaaatgggtgatgaaaaggactcttggaaagtgaaaactttagatgaaattcttcaggaaaagaaacgaaggaaggaacaagaggagaaagcagagataaaacgcttaaaaaattctgatgaccgggattccaagcgggattcccttgaggagggggagctgagagatcactgcatggagatcacaataaggaactccccgtatagaagagaagactcaatggaagacagaggagaagaagatgattctttggccatcaaaccaccccagcaaatgtctcggaaagaaaaagttcatcacagaaaagatgaaaagagaaaagaaaaatggaagcatgctagagtgaaagaaagagagcacgaacgtcggaaacgacatcgagaagaacaggataaagctcgccgggaatgggaaagacagaagagaagggaaatggcaagggagcattccaggagagaaagggaccgcttggagcagttagaaaggaagcgggagcgggagcgcaagatgcgggagcagcagaaggagcagcgggagcagaaggagcgcgagcggcgggcggaggagcggcgcaaggagcgggaggcccgcagggaagtgtctgcacatcaccgaacgatgagagaggactacagcgacaaagtgaaagccagccactggagtcgcagcccgcctcggccgccgcgggagcggttcgagttgggagacggccggaagccaggtgaggccaggccggcgcctgcgcagaagccagcacagttaaaagaagagaaaatggaagaaagggacctgctgtccgacttacaggacatcagcgacagcgagaggaagaccagctcggccgagtcctcgtcagcggaatcaggctcaggttctgaggaagaagaggaggaggaggaagaggaggaggaggaagggagcaccagtgaagaatcagaggaggaggaggaggaagaggaagaggaggaggaggagaccggcagcaactctgaggaggcatcagagcagtctgccgaagaagtaagtgaggaagaaatgagtgaagatgaagaacgagaaaatgaaaaccacctcttggttgttccagagtcacggttcgaccgagattccggggagagtgaagaagcagaggaagaagtgggtgagggaacgccgcagagcagcgccctgacagagggcgactatgtgcccgactcccctgccctgttgcccatcgagctcaagcaggagctgcccaagtacctgccggccctgcagggctgccggagcgtcgaggagttccagtgcctgaacaggatcgaggagggcacctatggagtggtctacagagcaaaagacaagaaaacagatgaaattgtggctctaaagcggctgaagatggagaaggagaaggagggcttcccgatcacgtccctgagggagatcaacaccatcctcaaggcccagcatcccaacattgtcaccgttagagagattgtggtgggcagcaacatggacaagatctacatcgtgatgaactacgtggagcacgacctcaagagcctgatggagaccatgaaacagcccttcctgccaggggaggtgaagaccctgatgatccagctgctgcggggggtgaaacacctgcacgacaactggatcctgcaccgtgacctcaagacgtccaacctgctgctgagccacgccggcatcctcaaggtgggtgattttgggctggcgcgggagtacggatcccctctgaaggcctacaccccggtcgtggtgacccagtggtaccgcgccccagagctgctgcttggtgccaaggaatactccacggccgtggacatgtggtcagtgggctgcatcttcggggagctgctgactcagaagcctctgttccccgggaattcggaaatcgatcagatcaacaaagtgttcaaggagctggggacccccagtgagaaaatctggcccggctacagtgagctcccagtagtcaaaaagatgaccttcagcgagcacccctacaacaacctccgcaagcgcttcggggctctgctctcagaccagggcttcgacctcatgaacaagttcctgacctacttccccgggaggaggatcagcgctgaggacggcctcaagcatgagtatttccgcgagacccccctccccatcgacccctccatgttccccacgtggcccgccaagagcgagcagcagcgtgtgaagcggggcaccagcccgaggccccctgagggaggcctgggctacagccagctgggtgacgacgacctgaaggagacgggcttccaccttaccaccacgaaccagggggcctctgccgcgggccccggcttcagcctcaagttctgaaggtcagagtggaccccgtcatgggg

SEQ ID NO: 123645 - DNA, 2429 bp, Homo sapiens
  Payload ID: 4271
  Gene Symbol: CDK11A
  Gene Name: cyclin-dependent kinase 11A
  ENST ID: ENST00000378638
  CDS Start-End: 163-2403
tgttttaactcaaatgggtgatgaaaaggactcttggaaagtgaaaactttagatgaaattcttcaggaaaagaaacgaaggaaggaacaagaggagaaagcagagataaaacgcttaaaaaataacaacgcttcttcggtgaagttcttttgtacttccaaatgtcgcagtctgatgaccgggattccaagcgggattcccttgaggagggggagctgagagatcactgcatggagatcacaataaggaactccccgtatagaagagaagactcaatggaagacagaggagaagaagatgattctttggccatcaaaccaccccagcaaatgtctcggaaagaaaaagttcatcacagaaaagatgaaaagagaaaagaaaaatgtaggcatcatagccattcagcagaaggggggaagcatgctagagtgaaagaaagagagcacgaacgtcggaaacgacatcgagaagaacaggataaagctcgccgggaatgggaaagacagaagagaagggaaatggcaagggagcattccaggagagaaagggaccgcttggagcagttagaaaggaagcgggagcgggagcgcaagatgcgggagcagcagaaggagcagcgggagcagaaggagcgcgagcggcgggcggaggagcggcgcaaggagcgggaggcccgcagggaagtgtctgcacatcaccgaacgatgagagaggactacagcgacaaagtgaaagccagccactggagtcgcagcccgcctcggccgccgcgggagcggttcgagttgggagacggccggaagccagtaaaagaagagaaaatggaagaaagggacctgctgtccgacttacaggacatcagcgacagcgagaggaagaccagctcggccgagtcctcgtcagcggaatcaggctcaggttctgaggaagaagaggaggaggaggaagaggaggaggaggaagggagcaccagtgaagaatcagaggaggaggaggaggaagaggaagaggaggaggaggagaccggcagcaactctgaggaggcatcagagcagtctgccgaagaagtaagtgaggaagaaatgagtgaagatgaagaacgagaaaatgaaaaccacctcttggttgttccagagtcacggttcgaccgagattccggggagagtgaagaagcagaggaagaagtgggtgagggaacgccgcagagcagcgccctgacagagggcgactatgtgcccgactcccctgccctgttgcccatcgagctcaagcaggagctgcccaagtacctgccggccctgcagggctgccggagcgtcgaggagttccagtgcctgaacaggatcgaggagggcacctatggagtggtctacagagcaaaagacaagaaaacagatgaaattgtggctctaaagcggctgaagatggagaaggagaaggagggcttcccgatcacgtccctgagggagatcaacaccatcctcaaggcccagcatcccaacattgtcaccgttagagagattgtggtgggcagcaacatggacaagatctacatcgtgatgaactacgtggagcacgacctcaagagcctgatggagaccatgaaacagcccttcctgccaggggaggtgaagaccctgatgatccagctgctgcggggggtgaaacacctgcacgacaactggatcctgcaccgtgacctcaagacgtccaacctgctgctgagccacgccggcatcctcaaggtgggtgattttgggctggcgcgggagtacggatcccctctgaaggcctacaccccggtcgtggtgacccagtggtaccgcgccccagagctgctgcttggtgccaaggaatactccacggccgtggacatgtggtcagtgggctgcatcttcggggagctgctgactcagaagcctctgttccccgggaattcggaaatcgatcagatcaacaaagtgttcaaggagctggggacccccagtgagaaaatctggcccggctacagtgagctcccagtagtcaaaaagatgaccttcagcgagcacccctacaacaacctccgcaagcgcttcggggctctgctctcagaccagggcttcgacctcatgaacaagttcctgacctacttccccgggaggaggatcagcgctgaggacggcctcaagcatgagtatttccgcgagacccccctccccatcgacccctccatgttccccacgtggcccgccaagagcgagcagcagcgtgtgaagcggggcaccagcccgaggccccctgagggaggcctgggctacagccagctgggtgacgacgacctgaaggagacgggcttccaccttaccaccacgaaccagggggcctctgccgcgggccccggcttcagcctcaagttctgaaggtcagagtggaccccgtcatgggg

SEQ ID NO: 123646 - DNA, 450 bp, Homo sapiens
  Payload ID: 4271
  Gene Symbol: CDK11A
  Gene Name: cyclin-dependent kinase 11A
  ENST ID: ENST00000401096
  CDS Start-End: 340-450
gccgcggccccgtaggggtgagttccgactgggcggaccaggtgtgggagcgcgacgagaactgcgcaccgaggtctttcttccgagcaggcctcggagcggggcggacccgggcccgggggcgagcgacaccctcgcttccgcggacagtctcatcccgcacggaactttgggtggtggaggcggcgggtccaaacgctgtctggagccaacgtctgccaggctgaacctcaagtgtgcgggactgaacccgaggaaatagcccagtgcccgggtcaggtggccttgttcgcgagcacatctcggagcatctccccggtctcaagtgttttaactcaaatgggtgatgaaaaggactcttggaaagtgaaaactttagatgaaattcttcaggaaaagaaacgaaggaaggaacaagaggagaaagcagagataaaacgcttaaaaaat

SEQ ID NO: 123647 - DNA, 2449 bp, Homo sapiens
  Payload ID: 4271
  Gene Symbol: CDK11A
  Gene Name: cyclin-dependent kinase 11A
  Uniprot ID: Q9UQ88
  ENST ID: ENST00000404249
  CDS Start-End: 81-2423
gatacttctggcgagcgccggttgctgtttcttctcaggctcagggaccggccgcggccccgtagggtgttttaactcaaatgggtgatgaaaaggactcttggaaagtgaaaactttagatgaaattcttcaggaaaagaaacgaaggaaggaacaagaggagaaagcagagataaaacgcttaaaaaattctgatgaccgggattccaagcgggattcccttgaggagggggagctgagagatcactgcatggagatcacaataaggaactccccgtatagaagagaagactcaatggaagacagaggagaagaagatgattctttggccatcaaaccaccccagcaaatgtctcggaaagaaaaagttcatcacagaaaagatgaaaagagaaaagaaaaatgtaggcatcatagccattcagcagaaggggggaagcatgctagagtgaaagaaagagagcacgaacgtcggaaacgacatcgagaagaacaggataaagctcgccgggaatgggaaagacagaagagaagggaaatggcaagggagcattccaggagagaaagggaccgcttggagcagttagaaaggaagcgggagcgggagcgcaagatgcgggagcagcagaaggagcagcgggagcagaaggagcgcgagcggcgggcggaggagcggcgcaaggagcgggaggcccgcagggaagtgtctgcacatcaccgaacgatgagagaggactacagcgacaaagtgaaagccagccactggagtcgcagcccgcctcggccgccgcgggagcggttcgagttgggagacggccggaagccagtaaaagaagagaaaatggaagaaagggacctgctgtccgacttacaggacatcagcgacagcgagaggaagaccagctcggccgagtcctcgtcagcggaatcaggctcaggttctgaggaagaagaggaggaggaggaagaggaggaggaggaagggagcaccagtgaagaatcagaggaggaggaggaggaagaggaagaggaggaggaggagaccggcagcaactctgaggaggcatcagagcagtctgccgaagaagtaagtgaggaagaaatgagtgaagatgaagaacgagaaaatgaaaaccacctcttggttgttccagagtcacggttcgaccgagattccggggagagtgaagaagcagaggaagaagtgggtgagggaacgccgcagagcagcgccctgacagagggcgactatgtgcccgactcccctgccctgttgcccatcgagctcaagcaggagctgcccaagtacctgccggccctgcagggctgccggagcgtcgaggagttccagtgcctgaacaggatcgaggagggcacctatggagtggtctacagagcaaaagacaagaaaacagatgaaattgtggctctaaagcggctgaagatggagaaggagaaggagggcttcccgatcacgtccctgagggagatcaacaccatcctcaaggcccagcatcccaacattgtcaccgttagagagattgtggtgggcagcaacatggacaagatctacatcgtgatgaactacgtggagcacgacctcaagagcctgatggagaccatgaaacagcccttcctgccaggggaggtgaagaccctgatgatccagctgctgcggggggtgaaacacctgcacgacaactggatcctgcaccgtgacctcaagacgtccaacctgctgctgagccacgccggcatcctcaaggtgggtgattttgggctggcgcgggagtacggatcccctctgaaggcctacaccccggtcgtggtgacccagtggtaccgcgccccagagctgctgcttggtgccaaggaatactccacggccgtggacatgtggtcagtgggctgcatcttcggggagctgctgactcagaagcctctgttccccgggaattcggaaatcgatcagatcaacaaagtgttcaaggagctggggacccccagtgagaaaatctggcccggctacagtgagctcccagtagtcaaaaagatgaccttcagcgagcacccctacaacaacctccgcaagcgcttcggggctctgctctcagaccagggcttcgacctcatgaacaagttcctgacctacttccccgggaggaggatcagcgctgaggacggcctcaagcatgagtatttccgcgagacccccctccccatcgacccctccatgttccccacgtggcccgccaagagcgagcagcagcgtgtgaagcggggcaccagcccgaggccccctgagggaggcctgggctacagccagctgggtgacgacgacctgaaggagacgggcttccaccttaccaccacgaaccagggggcctctgccgcgggccccggcttcagcctcaagttctgaaggtcagagtggaccccgtcatgggg

SEQ ID NO: 123648 - DNA, 2306 bp, Homo sapiens
  Payload ID: 4271
  Gene Symbol: CDK11A
  Gene Name: cyclin-dependent kinase 11A
  ENST ID: ENST00000509982
  CDS Start-End: 15-1277
gtgttttaactcaaatgggtgatgaaaaggactcttggaaagtgaaaactttagatgaaattcttcaggaaaagaaacgaaggaaggaacaagaggagaaagcagagataaaacgcttaaaaaattctgatgaccgggattccaagcgggattcccttgaggagggggagctgagagatcactgcatggagatcacaataaggaactccccgtatagaagagaagactcaatggaagacagaggagaagaagatgattctttggccatcaaaccaccccagcaaatgtctcggaaagaaaaagttcatcacagaaaagatgaaaagagaaaagaaaaatgtaggcatcatagccattcagcagaaggggggaagcatgctagagtgaaagaaagagagcacgaacgtcggaaacgacatcgagaagaacaggataaagctcgccgggaatgggaaagacagaagagaagggaaatggcaagggagcattccaggagagaaagggaccgcttggagcagttagaaaggaagcgggagcgggagcgcaagatgcgggagcagcagaaggagcagcgggagcagaaggagcgcgagcggcgggcggaggagcggcgcaaggagcgggaggcccgcagggaagtgtctgcacatcaccgaacgatgagagaggactacagcgacaaagtgaaagccagccactggagtcgcagcccgcctcggccgccgcgggagcggttcgagttgggagacggccggaagccaggtgaggccaggccggcgcctgcgcagaagccagcacagttaaaagaagagaaaatggaagaaagggacctgctgtccgacttacaggacatcagcgacagcgagaggaagaccagctcggccgagtcctcgtcagcggaatcaggctcaggttctgaggaagaagaggaggaggaggaagaggaggaggaggaagggagcaccagtgaagaatcagaggaggaggaggaggaagaggaagaggaggaggaggagaccggcagcaactctgaggaggcatcagagcagtctgccgaagaagtaagtgaggaagaaatgagtgaagatgaagaacgagaaaatgaaaaccacctcttggttgttccagagtcacggttcgaccgagattccggggagagtgaagaagcagaggaagaagtggggctgccggagcgtcgaggagttccagtgcctgaacaggatcgaggagggcacctatggagtggtctacagagcaaaagacaagaaaacagatgaaattgtggctctaaagcggctgaagatggagaaggagaaggagggcttcccgatcacgtccctgagggagatcaacaccatcctcaaggcccagcatcccaacattgtcaccgttagagagattgtggtgggcagcaacatggacaagatctacatcgtgatgaactacgtggagcacgacctcaagagcctgatggagaccatgaaacagcccttcctgccaggggaggtgaagaccctgatgatccagctgctgcggggggtgaaacacctgcacgacaactggatcctgcaccgtgacctcaagacgtccaacctgctgctgagccacgccggcatcctcaaggtgggtgattttgggctggcgcgggagtacggatcccctctgaaggcctacaccccggtcgtggtgacccagtggtaccgcgccccagagctgctgcttggtgccaaggaatactccacggccgtggacatgtggtcagtgggctgcatcttcggggagctgctgactcagaagcctctgttccccgggaattcggaaatcgatcagatcaacaaagtgttcaaggagctggggacccccagtgagaaaatctggcccggctacagtgagctcccagtagtcaaaaagatgaccttcagcgagcacccctacaacaacctccgcaagcgcttcggggctctgctctcagaccagggcttcgacctcatgaacaagttcctgacctacttccccgggaggaggatcagcgctgaggacggcctcaagcatgagtatttccgcgagacccccctccccatcgacccctccatgttccccacgtggcccgccaagagcgagcagcagcgtgtgaagcggggcaccagcccgaggccccctgagggaggcctgggctacagccagctgggtgacgacgacctgaaggagacgggcttccaccttaccaccacgaaccagggggcctctgccgcgggccccggcttcagcctcaagttctgaaggtcagagtggaccccgtcatgggg

SEQ ID NO: 123649 - DNA, 700 bp, Homo sapiens
  Payload ID: 4271
  Gene Symbol: CDK11A
  Gene Name: cyclin-dependent kinase 11A
  ENST ID: ENST00000479362
  CDS Start-End: 247-700
gactgaacccgaggaaatagcccagtgcccgggtcaggtggccttgttcgcgagcacatctcggagcatctccccggtctcaaggtgcagctgtccagtgtgctagtggcttcacgtagtccaagcggtctttctagcagattctgacagtaaaagcagtgtttgatgagtggcaggtcctgagttaagagcctttaaacggatgatctttaatccgcgatcgatactatcactgttttaactcaaatgggtgatgaaaaggactcttggaaagtgaaaactttagatgaaattcttcaggaaaagaaacgaaggaaggaacaagaggagaaagcagagataaaacgcttaaaaaattctgatgaccgggattccaagcgggattcccttgaggagggggagctgagagatcactgcatggagatcacaataaggaactccccgtatagaagagaagactcaatggaagacagaggagaagaagatgattctttggccatcaaaccaccccagcaaatgtctcggaaagaaaaagttcatcacagaaaagatgaaaagagaaaagaaaaatggaagcatgctagagtgaaagaaagagagcacgaacgtcggaaacgacatcgagaagaacaggataaagctcgccgggaatgggaaagacagaagagaagggaaatggcaagggagcattccaggagag

SEQ ID NO: 123650 - DNA, 2333 bp, Homo sapiens
  Payload ID: 4271
  Gene Symbol: CDK11A
  Gene Name: cyclin-dependent kinase 11A
  ENST ID: ENST00000460465
  CDS Start-End: 81-1304
gatacttctggcgagcgccggttgctgtttcttctcaggctcagggaccggccgcggccccgtagggtgttttaactcaaatgggtgatgaaaaggactcttggaaagtgaaaactttagatgaaattcttcaggaaaagaaacgaaggaaggaacaagaggagaaagcagagataaaacgcttaaaaaattctgatgaccgggattccaagcgggattcccttgaggagggggagctgagagatcactgcatggagatcacaataaggaactccccgtatagaagagaagactcaatggaagacagaggagaagaagatgattctttggccatcaaaccaccccagcaaatgtctcggaaagaaaaagttcatcacagaaaagatgaaaagagaaaagaaaaatgtaggcatcatagccattcagcagaaggggggaagcatgctagagtgaaagaaagagagcacgaacgtcggaaacgacatcgagaagaacaggataaagctcgccgggaatgggaaagacagaagagaagggaaatggcaagggagcattccaggagagaaagggaccgcttggagcagttagaaaggaagcgggagcgggagcgcaagatgcgggagcagcagaaggagcagcgggagcagaaggagcgcgagcggcgggcggaggagcggcgcaaggagcgggaggcccgcagggaagtgtctgcacatcaccgaacgatgagagaggactacagcgacaaagtgaaagccagccactggagtcgcagcccgcctcggccgccgcgggagcggttcgagttgggagacggccggaagccagtaaaagaagagaaaatggaagaaagggacctgctgtccgacttacaggacatcagcgacagcgagaggaagaccagctcggccgagtcctcgtcagcggaatcaggctcaggttctgaggaagaagaggaggaggaggaagaggaggaggaggaagggagcaccagtgaagaatcagaggaggaggaggaggaagaggaagaggaggaggaggagaccggcagcaactctgaggaggcatcagagcagtctgccgaagaagtaagtgaggaagaaatgagtgaagatgaagaacgagaaaatgaaaaccacctcttggttgttccagagtcacggttcgaccgagattccggggagagtgaagaagcagaggaagaagtggggctgccggagcgtcgaggagttccagtgcctgaacaggatcgaggagggcacctatggagtggtctacagagcaaaagacaagaaaacagatgaaattgtggctctaaagcggctgaagatggagaaggagaaggagggcttcccgatcacgtccctgagggagatcaacaccatcctcaaggcccagcatcccaacattgtcaccgttagagagattgtggtgggcagcaacatggacaagatctacatcgtgatgaactacgtggagcacgacctcaagagcctgatggagaccatgaaacagcccttcctgccaggggaggtgaagaccctgatgatccagctgctgcggggggtgaaacacctgcacgacaactggatcctgcaccgtgacctcaagacgtccaacctgctgctgagccacgccggcatcctcaaggtgggtgattttgggctggcgcgggagtacggatcccctctgaaggcctacaccccggtcgtggtgacccagtggtaccgcgccccagagctgctgcttggtgccaaggaatactccacggccgtggacatgtggtcagtgggctgcatcttcggggagctgctgactcagaagcctctgttccccgggaattcggaaatcgatcagatcaacaaagtgttcaaggagctggggacccccagtgagaaaatctggcccggctacagtgagctcccagtagtcaaaaagatgaccttcagcgagcacccctacaacaacctccgcaagcgcttcggggctctgctctcagaccagggcttcgacctcatgaacaagttcctgacctacttccccgggaggaggatcagcgctgaggacggcctcaagcatgagtatttccgcgagacccccctccccatcgacccctccatgttccccacgtggcccgccaagagcgagcagcagcgtgtgaagcggggcaccagcccgaggccccctgagggaggcctgggctacagccagctgggtgacgacgacctgaaggagacgggcttccaccttaccaccacgaaccagggggcctctgccgcgggccccggcttcagcctcaagttctgaaggtcagagtggaccccgtcatgggg

SEQ ID NO: 123651 - DNA, 2998 bp, Homo sapiens
  Payload ID: 4272
  Gene Symbol: CDK11B
  Gene Name: cyclin-dependent kinase 11B
  ENST ID: ENST00000341832
  CDS Start-End: 113-2461
atacaggaagtgacgatacttttggcgcgcgccggttgctgtttcttctctggctccgggaccggcggcggcggcggcggcagcggcggcggcgtagggtgttttaactcaaatgggtgatgaaaaggactcttggaaagtgaaaactttagatgaaattcttcaggaaaagaaacgaaggaaggaacaagaggagaaagcagagataaaacgcttaaaaaattctgatgaccgggattccaagcgggattcccttgaggagggggagctgagagatcaccgcatggagatcacaataaggaactccccgtatagaagagaagactctatggaagacagaggagaagaagatgattctttggccatcaaaccaccccagcaaatgtctcggaaagaaaaagctcatcacagaaaagatgaaaagagaaaagagaaacgtaggcatcgtagccattcagcagaaggggggaagcatgctagagtgaaagaaaaagaaagagagcacgaacgtcggaaacggcatcgagaagaacaggataaagctcgccgggaatgggaaagacagaagagaagggagatggcaagggagcattccaggagagaaagggaccgcttggagcagttagaaaggaagcgggagcgggagcgcaagatgcgggagcagcagaaggagcagcgggagcagaaggagcgcgagcggcgggcagaggagcggcgcaaggagcgggaggcccgcagggaagtgtctgcacatcaccgaacgatgagagaggactacagcgacaaagtgaaagccagccactggagtcgcagcccgcctcggccgccgcgggagcggttcgagttgggagacggccggaagccagtaaaagaagagaaaatggaagaaagggacctgctgtccgacttacaggacatcagcgacagcgagaggaagaccagctcggccgagtcctcgtcagcggaatcaggctcaggttctgaggaagaagaggaggaggaggaagaggaggaggaggaagggagcaccagtgaagaatcagaggaggaggaggaggaagaggaagaggaggaggaggagaccggcagcaactctgaggaggcatcagagcagtctgccgaagaagtaagtgaggaagaaatgagtgaagatgaagaacgagaaaatgaaaaccacctcttggttgttccagagtcacggttcgaccgagattccggggagagtgaagaagcagaggaagaagtgggtgagggaacgccgcagagcagcgccctgacagagggcgactatgtgcccgactcccctgccctgtcgcccatcgagctcaagcaggagctgcccaagtacctgccggccctgcagggctgccggagcgtcgaggagttccagtgcctgaacaggatcgaggagggcacctatggagtggtctacagagcaaaagacaagaaaacagatgaaattgtggctctaaagcggctgaagatggagaaggagaaggagggcttcccgatcacgtcgctgagggagatcaacaccatcctcaaggcccagcatcccaacatcgtcaccgttagagagattgtggtgggcagcaacatggacaagatctacatcgtgatgaactatgtggagcacgacctcaagagcctgatggagaccatgaaacagcccttcctgccaggggaggtgaagaccctgatgatccagctgctgcgtggggtgaaacacctgcacgacaactggatcctgcaccgtgacctcaagacgtccaacctgctgctgagccacgccggcatcctcaaggtgggtgacttcgggctggcgcgggagtacggatcccctctgaaggcctacaccccggtcgtggtgaccctgtggtaccgcgccccagagctgctgcttggtgccaaggaatactccacggccgtggacatgtggtcagtgggttgcatcttcggggagctgctgactcagaagcctctgttccccgggaagtcagaaatcgatcagatcaacaaggtgttcaaggatctggggacccctagtgagaaaatctggcccggctacagcgagctcccagcagtcaagaagatgaccttcagcgagcacccctacaacaacctccgcaagcgcttcggggctctgctctcagaccagggcttcgacctcatgaacaagttcctgacctacttccccgggaggaggatcagcgctgaggacggcctcaagcatgagtatttccgcgagacccccctccccatcgacccctccatgttccccacgtggcccgccaagagcgagcagcagcgtgtgaagcggggcaccagcccgaggccccctgagggaggcctgggctacagccagctgggtgacgacgacctgaaggagacgggcttccaccttaccaccacgaaccagggggcctctgccgcgggccccggcttcagcctcaagttctgaaggtcagagtggaccccgtcatggggagaactcagccgggaccacaggcgtggctactgcggctggagctgcgatgagactcggaactcctcgtcttactttgtgctccatgttttgtttttgtattttggtttgtaaatttgtagaattaaatcattttccttgttgtggaggaaagagctgtgttttctccgtgacttgcccagggcggagagggtggacatcttcgggtgcccacgtggggcagcacaaacctccacacaccctctcccactctcgacacgcacggggctggctgggccgtgatttggaaaggaactggtgggagccgggtggattgtttaatcttcggagctggagacctgtttctgtgttgggatgagcgatgccctcttgccccaacccactcgtccagaccagccctgtccacacaggcccccggcccccaacccccagccccagctgtgccagcagactcgacaggtttttatacaaggttgttgagttttaaaatgtattaaaatattcttcgaggaa

SEQ ID NO: 123652 - DNA, 2534 bp, Homo sapiens
  Payload ID: 4272
  Gene Symbol: CDK11B
  Gene Name: cyclin-dependent kinase 11B
  ENST ID: ENST00000340677
  CDS Start-End: 262-2508
atacaggaagtgacgatacttttggcgcgcgccggttgctgtttcttctctggctccgggaccggcggcggcggcggcggcagcggcggcggcgtagggtgttttaactcaaatgggtgatgaaaaggactcttggaaagtgaaaactttagatgaaattcttcaggaaaagaaacgaaggaaggaacaagaggagaaagcagagataaaacgcttaaaaaataacaacgcttcttcggtgaagttcttttgtacttccaaatgtcgcagtctgatgaccgggattccaagcgggattcccttgaggagggggagctgagagatcaccgcatggagatcacaataaggaactccccgtatagaagagaagactctatggaagacagaggagaagaagatgattctttggccatcaaaccaccccagcaaatgtctcggaaagaaaaagctcatcacagaaaagatgaaaagagaaaagagaaacgtaggcatcgtagccattcagcagaaggggggaagcatgctagagtgaaagaaaaagaaagagagcacgaacgtcggaaacggcatcgagaagaacaggataaagctcgccgggaatgggaaagacagaagagaagggagatggcaagggagcattccaggagagaaagggaccgcttggagcagttagaaaggaagcgggagcgggagcgcaagatgcgggagcagcagaaggagcagcgggagcagaaggagcgcgagcggcgggcagaggagcggcgcaaggagcgggaggcccgcagggaagtgtctgcacatcaccgaacgatgagagaggactacagcgacaaagtgaaagccagccactggagtcgcagcccgcctcggccgccgcgggagcggttcgagttgggagacggccggaagccagtaaaagaagagaaaatggaagaaagggacctgctgtccgacttacaggacatcagcgacagcgagaggaagaccagctcggccgagtcctcgtcagcggaatcaggctcaggttctgaggaagaagaggaggaggaggaagaggaggaggaggaagggagcaccagtgaagaatcagaggaggaggaggaggaagaggaagaggaggaggaggagaccggcagcaactctgaggaggcatcagagcagtctgccgaagaagtaagtgaggaagaaatgagtgaagatgaagaacgagaaaatgaaaaccacctcttggttgttccagagtcacggttcgaccgagattccggggagagtgaagaagcagaggaagaagtgggtgagggaacgccgcagagcagcgccctgacagagggcgactatgtgcccgactcccctgccctgtcgcccatcgagctcaagcaggagctgcccaagtacctgccggccctgcagggctgccggagcgtcgaggagttccagtgcctgaacaggatcgaggagggcacctatggagtggtctacagagcaaaagacaagaaaacagatgaaattgtggctctaaagcggctgaagatggagaaggagaaggagggcttcccgatcacgtcgctgagggagatcaacaccatcctcaaggcccagcatcccaacatcgtcaccgttagagagattgtggtgggcagcaacatggacaagatctacatcgtgatgaactatgtggagcacgacctcaagagcctgatggagaccatgaaacagcccttcctgccaggggaggtgaagaccctgatgatccagctgctgcgtggggtgaaacacctgcacgacaactggatcctgcaccgtgacctcaagacgtccaacctgctgctgagccacgccggcatcctcaaggtgggtgacttcgggctggcgcgggagtacggatcccctctgaaggcctacaccccggtcgtggtgaccctgtggtaccgcgccccagagctgctgcttggtgccaaggaatactccacggccgtggacatgtggtcagtgggttgcatcttcggggagctgctgactcagaagcctctgttccccgggaagtcagaaatcgatcagatcaacaaggtgttcaaggatctggggacccctagtgagaaaatctggcccggctacagcgagctcccagcagtcaagaagatgaccttcagcgagcacccctacaacaacctccgcaagcgcttcggggctctgctctcagaccagggcttcgacctcatgaacaagttcctgacctacttccccgggaggaggatcagcgctgaggacggcctcaagcatgagtatttccgcgagacccccctccccatcgacccctccatgttccccacgtggcccgccaagagcgagcagcagcgtgtgaagcggggcaccagcccgaggccccctgagggaggcctgggctacagccagctgggtgacgacgacctgaaggagacgggcttccaccttaccaccacgaaccagggggcctctgccgcgggccccggcttcagcctcaagttctgaaggtcagagtggaccccgtcatgggg

SEQ ID NO: 123653 - DNA, 2677 bp, Homo sapiens
  Payload ID: 4272
  Gene Symbol: CDK11B
  Gene Name: cyclin-dependent kinase 11B
  ENST ID: ENST00000407249
  CDS Start-End: 113-2500
atacaggaagtgacgatacttttggcgcgcgccggttgctgtttcttctctggctccgggaccggcggcggcggcggcggcagcggcggcggcgtagggtgttttaactcaaatgggtgatgaaaaggactcttggaaagtgaaaactttagatgaaattcttcaggaaaagaaacgaaggaaggaacaagaggagaaagcagagataaaacgcttaaaaaattctgatgaccgggattccaagcgggattcccttgaggagggggagctgagagatcaccgcatggagatcacaataaggaactccccgtatagaagagaagactctatggaagacagaggagaagaagatgattctttggccatcaaaccaccccagcaaatgtctcggaaagaaaaagctcatcacagaaaagatgaaaagagaaaagagaaacgtaggcatcgtagccattcagcagaaggggggaagcatgctagagtgaaagaaaaagaaagagagcacgaacgtcggaaacggcatcgagaagaacaggataaagctcgccgggaatgggaaagacagaagagaagggagatggcaagggagcattccaggagagaaagggaccgcttggagcagttagaaaggaagcgggagcgggagcgcaagatgcgggagcagcagaaggagcagcgggagcagaaggagcgcgagcggcgggcagaggagcggcgcaaggagcgggaggcccgcagggaagtgtctgcacatcaccgaacgatgagagaggactacagcgacaaagtgaaagccagccactggagtcgcagcccgcctcggccgccgcgggagcggttcgagttgggagacggccggaagccaggtgaggccaggccggcgcctgcgcagaagccagcacagttaaaagaagagaaaatggaagaaagggacctgctgtccgacttacaggacatcagcgacagcgagaggaagaccagctcggccgagtcctcgtcagcggaatcaggctcaggttctgaggaagaagaggaggaggaggaagaggaggaggaggaagggagcaccagtgaagaatcagaggaggaggaggaggaagaggaagaggaggaggaggagaccggcagcaactctgaggaggcatcagagcagtctgccgaagaagtaagtgaggaagaaatgagtgaagatgaagaacgagaaaatgaaaaccacctcttggttgttccagagtcacggttcgaccgagattccggggagagtgaagaagcagaggaagaagtgggtgagggaacgccgcagagcagcgccctgacagagggcgactatgtgcccgactcccctgccctgtcgcccatcgagctcaagcaggagctgcccaagtacctgccggccctgcagggctgccggagcgtcgaggagttccagtgcctgaacaggatcgaggagggcacctatggagtggtctacagagcaaaagacaagaaaacagatgaaattgtggctctaaagcggctgaagatggagaaggagaaggagggcttcccgatcacgtcgctgagggagatcaacaccatcctcaaggcccagcatcccaacatcgtcaccgttagagagattgtggtgggcagcaacatggacaagatctacatcgtgatgaactatgtggagcacgacctcaagagcctgatggagaccatgaaacagcccttcctgccaggggaggtgaagaccctgatgatccagctgctgcgtggggtgaaacacctgcacgacaactggatcctgcaccgtgacctcaagacgtccaacctgctgctgagccacgccggcatcctcaaggtgggtgacttcgggctggcgcgggagtacggatcccctctgaaggcctacaccccggtcgtggtgaccctgtggtaccgcgccccagagctgctgcttggtgccaaggaatactccacggccgtggacatgtggtcagtgggttgcatcttcggggagctgctgactcagaagcctctgttccccgggaagtcagaaatcgatcagatcaacaaggtgttcaaggatctggggacccctagtgagaaaatctggcccggctacagcgagctcccagcagtcaagaagatgaccttcagcgagcacccctacaacaacctccgcaagcgcttcggggctctgctctcagaccagggcttcgacctcatgaacaagttcctgacctacttccccgggaggaggatcagcgctgaggacggcctcaagcatgagtatttccgcgagacccccctccccatcgacccctccatgttccccacgtggcccgccaagagcgagcagcagcgtgtgaagcggggcaccagcccgaggccccctgagggaggcctgggctacagccagctgggtgacgacgacctgaaggagacgggcttccaccttaccaccacgaaccagggggcctctgccgcgggccccggcttcagcctcaagttctgaaggtcagagtggaccccgtcatggggagaactcagccgggaccacaggcgtggctactgcggctggagctgcgatgagactcggaactcctcgtcttactttgtgctccatgttttgtttttgtattttggtttgtaaatttgtagaattaaatcattttccttgttgtggaggaaa

SEQ ID NO: 123654 - DNA, 2227 bp, Homo sapiens
  Payload ID: 4272
  Gene Symbol: CDK11B
  Gene Name: cyclin-dependent kinase 11B
  ENST ID: ENST00000615951
  CDS Start-End: 113-724
atacaggaagtgacgatacttttggcgcgcgccggttgctgtttcttctctggctccgggaccggcggcggcggcggcggcagcggcggcggcgtagggtgttttaactcaaatgggtgatgaaaaggactcttggaaagtgaaaactttagatgaaattcttcaggaaaagaaacgaaggaaggaacaagaggagaaagcagagataaaacgcttaaaaaattctgatgaccgggattccaagcgggattcccttgaggagggggagctgagagatcaccgcatggagatcacaataaggaactccccgtatagaagagaagactctatggaagacagaggagaagaagatgattctttggccatcaaaccaccccagcaaatgtctcggaaagaaaaagctcatcacagaaaagatgaaaagagaaaagagaaacgtaggcatcgtagccattcagcagaaggggggaagcatgctagagtgaaagaaaaagaaagagagcacgaacgtcggaaacggcatcgagaagaacaggataaagctcgccgggaatgggaaagacagaagagaagggagatggcaagggagcattccaggagagaaagtaaaagaagagaaaatggaagaaagggacctgctgtccgacttacaggacatcagcgacagcgagaggaagaccagctcggccgagtcctcgtcagcggaatcaggctcaggttctgaggaagaagaggaggaggaggaagaggaggaggaggaagggagcaccagtgaagaatcagaggaggaggaggaggaagaggaagaggaggaggaggagaccggcagcaactctgaggaggcatcagagcagtctgccgaagaagtaagtgaggaagaaatgagtgaagatgaagaacgagaaaatgaaaaccacctcttggttgttccagagtcacggttcgaccgagattccggggagagtgaagaagcagaggaagaagtgggtgagggaacgccgcagagcagcgccctgacagagggcgactatgtgcccgactcccctgccctgtcgcccatcgagctcaagcaggagctgcccaagtacctgccggccctgcagggctgccggagcgtcgaggagttccagtgcctgaacaggatcgaggagggcacctatggagtggtctacagagcaaaagacaagaaaacagatgaaattgtggctctaaagcggctgaagatggagaaggagaaggagggcttcccgatcacgtcgctgagggagatcaacaccatcctcaaggcccagcatcccaacatcgtcaccgttagagagattgtggtgggcagcaacatggacaagatctacatcgtgatgaactatgtggagcacgacctcaagagcctgatggagaccatgaaacagcccttcctgccaggggaggtgaagaccctgatgatccagctgctgcgtggggtgaaacacctgcacgacaactggatcctgcaccgtgacctcaagacgtccaacctgctgctgagccacgccggcatcctcaaggtgggtgacttcgggctggcgcgggagtacggatcccctctgaaggcctacaccccggtcgtggtgaccctgtggtaccgcgccccagagctgctgcttggtgccaaggaatactccacggccgtggacatgtggtcagtgggttgcatcttcggggagctgctgactcagaagcctctgttccccgggaagtcagaaatcgatcagatcaacaaggtgttcaaggatctggggacccctagtgagaaaatctggcccggctacagcgagctcccagcagtcaagaagatgaccttcagcgagcacccctacaacaacctccgcaagcgcttcggggctctgctctcagaccagggcttcgacctcatgaacaagttcctgacctacttccccgggaggaggatcagcgctgaggacggcctcaagcatgagtatttccgcgagacccccctccccatcgacccctccatgttccccacgtggcccgccaagagcgagcagcagcgtgtgaagcggggcaccagcccgaggccccctgagggaggcctgggctacagccagctgggtgacgacgacctgaaggagacgggcttccaccttaccaccacgaaccagggggcctctgccgcgggccccggcttcagcctcaagttctgaaggtcagagtggaccccgtcatgggg

SEQ ID NO: 123655 - DNA, 2350 bp, Homo sapiens
  Payload ID: 4272
  Gene Symbol: CDK11B
  Gene Name: cyclin-dependent kinase 11B
  ENST ID: ENST00000611150
  CDS Start-End: 113-847
atacaggaagtgacgatacttttggcgcgcgccggttgctgtttcttctctggctccgggaccggcggcggcggcggcggcagcggcggcggcgtagggtgttttaactcaaatgggtgatgaaaaggactcttggaaagtgaaaactttagatgaaattcttcaggaaaagaaacgaaggaaggaacaagaggagaaagcagagataaaacgcttaaaaaattctgatgaccgggattccaagcgggattcccttgaggagggggagctgagagatcaccgcatggagatcacaataaggaactccccgtatagaagagaagactctatggaagacagaggagaagaagatgattctttggccatcaaaccaccccagcaaatgtctcggaaagaaaaagctcatcacagaaaagatgaaaagagaaaagagaaacgtaggcatcgtagccattcagcagaaggggggaagcatgctagagtgaaagaaaaagaaagagagcacgaacgtcggaaacggcatcgagaagaacaggataaagctcgccgggaatgggaaagacagaagagaagggagatggcaagggagcattccaggagagaaagtgtctgcacatcaccgaacgatgagagaggactacagcgacaaagtgaaagccagccactggagtcgcagcccgcctcggccgccgcgggagcggttcgagttgggagacggccggaagccagtaaaagaagagaaaatggaagaaagggacctgctgtccgacttacaggacatcagcgacagcgagaggaagaccagctcggccgagtcctcgtcagcggaatcaggctcaggttctgaggaagaagaggaggaggaggaagaggaggaggaggaagggagcaccagtgaagaatcagaggaggaggaggaggaagaggaagaggaggaggaggagaccggcagcaactctgaggaggcatcagagcagtctgccgaagaagtaagtgaggaagaaatgagtgaagatgaagaacgagaaaatgaaaaccacctcttggttgttccagagtcacggttcgaccgagattccggggagagtgaagaagcagaggaagaagtgggtgagggaacgccgcagagcagcgccctgacagagggcgactatgtgcccgactcccctgccctgtcgcccatcgagctcaagcaggagctgcccaagtacctgccggccctgcagggctgccggagcgtcgaggagttccagtgcctgaacaggatcgaggagggcacctatggagtggtctacagagcaaaagacaagaaaacagatgaaattgtggctctaaagcggctgaagatggagaaggagaaggagggcttcccgatcacgtcgctgagggagatcaacaccatcctcaaggcccagcatcccaacatcgtcaccgttagagagattgtggtgggcagcaacatggacaagatctacatcgtgatgaactatgtggagcacgacctcaagagcctgatggagaccatgaaacagcccttcctgccaggggaggtgaagaccctgatgatccagctgctgcgtggggtgaaacacctgcacgacaactggatcctgcaccgtgacctcaagacgtccaacctgctgctgagccacgccggcatcctcaaggtgggtgacttcgggctggcgcgggagtacggatcccctctgaaggcctacaccccggtcgtggtgaccctgtggtaccgcgccccagagctgctgcttggtgccaaggaatactccacggccgtggacatgtggtcagtgggttgcatcttcggggagctgctgactcagaagcctctgttccccgggaagtcagaaatcgatcagatcaacaaggtgttcaaggatctggggacccctagtgagaaaatctggcccggctacagcgagctcccagcagtcaagaagatgaccttcagcgagcacccctacaacaacctccgcaagcgcttcggggctctgctctcagaccagggcttcgacctcatgaacaagttcctgacctacttccccgggaggaggatcagcgctgaggacggcctcaagcatgagtatttccgcgagacccccctccccatcgacccctccatgttccccacgtggcccgccaagagcgagcagcagcgtgtgaagcggggcaccagcccgaggccccctgagggaggcctgggctacagccagctgggtgacgacgacctgaaggagacgggcttccaccttaccaccacgaaccagggggcctctgccgcgggccccggcttcagcctcaagttctgaaggtcagagtggaccccgtcatgggg

SEQ ID NO: 123656 - DNA, 2457 bp, Homo sapiens
  Payload ID: 4272
  Gene Symbol: CDK11B
  Gene Name: cyclin-dependent kinase 11B
  ENST ID: ENST00000626918
  CDS Start-End: 113-2431
atacaggaagtgacgatacttttggcgcgcgccggttgctgtttcttctctggctccgggaccggcggcggcggcggcggcagcggcggcggcgtagggtgttttaactcaaatgggtgatgaaaaggactcttggaaagtgaaaactttagatgaaattcttcaggaaaagaaacgaaggaaggaacaagaggagaaagcagagataaaacgcttaaaaaattctgatgaccgggattccaagcgggattcccttgaggagggggagctgagagatcaccgcatggagatcacaataaggaactccccgtatagaagagaagactctatggaagacagaacaggaaaagacgcagccctgggtgacaaaccaagaccctgtctcaaaaaaaagctagaaacaagaaggagcaaggacttcacagccagaaacaggccaatacagcaggaagatacagcaatgatacgtcactttgaaaagcggaggcaggcggatcacgaggtcaggagattgagaccatcctggctaacatgcaagcttctgtttagggggaatgatggcgtgtgcctcttcagggaccgcttggagcagttagaaaggaagcgggagcgggagcgcaagatgcgggagcagcagaaggagcagcgggagcagaaggagcgcgagcggcgggcagaggagcggcgcaaggagcgggaggcccgcagggaagtgtctgcacatcaccgaacgatgagagaggactacagcgacaaagtgaaagccagccactggagtcgcagcccgcctcggccgccgcgggagcggttcgagttgggagacggccggaagccagtaaaagaagagaaaatggaagaaagggacctgctgtccgacttacaggacatcagcgacagcgagaggaagaccagctcggccgagtcctcgtcagcggaatcaggctcaggttctgaggaagaagaggaggaggaggaagaggaggaggaggaagggagcaccagtgaagaatcagaggaggaggaggaggaagaggaagaggaggaggaggagaccggcagcaactctgaggaggcatcagagcagtctgccgaagaagtaagtgaggaagaaatgagtgaagatgaagaacgagaaaatgaaaaccacctcttggttgttccagagtcacggttcgaccgagattccggggagagtgaagaagcagaggaagaagtgggtgagggaacgccgcagagcagcgccctgacagagggcgactatgtgcccgactcccctgccctgtcgcccatcgagctcaagcaggagctgcccaagtacctgccggccctgcagggctgccggagcgtcgaggagttccagtgcctgaacaggatcgaggagggcacctatggagtggtctacagagcaaaagacaagaaaacagatgaaattgtggctctaaagcggctgaagatggagaaggagaaggagggcttcccgatcacgtcgctgagggagatcaacaccatcctcaaggcccagcatcccaacatcgtcaccgttagagagattgtggtgggcagcaacatggacaagatctacatcgtgatgaactatgtggagcacgacctcaagagcctgatggagaccatgaaacagcccttcctgccaggggaggtgaagaccctgatgatccagctgctgcgtggggtgaaacacctgcacgacaactggatcctgcaccgtgacctcaagacgtccaacctgctgctgagccacgccggcatcctcaaggtgggtgacttcgggctggcgcgggagtacggatcccctctgaaggcctacaccccggtcgtggtgaccctgtggtaccgcgccccagagctgctgcttggtgccaaggaatactccacggccgtggacatgtggtcagtgggttgcatcttcggggagctgctgactcagaagcctctgttccccgggaagtcagaaatcgatcagatcaacaaggtgttcaaggatctggggacccctagtgagaaaatctggcccggctacagcgagctcccagcagtcaagaagatgaccttcagcgagcacccctacaacaacctccgcaagcgcttcggggctctgctctcagaccagggcttcgacctcatgaacaagttcctgacctacttccccgggaggaggatcagcgctgaggacggcctcaagcatgagtatttccgcgagacccccctccccatcgacccctccatgttccccacgtggcccgccaagagcgagcagcagcgtgtgaagcggggcaccagcccgaggccccctgagggaggcctgggctacagccagctgggtgacgacgacctgaaggagacgggcttccaccttaccaccacgaaccagggggcctctgccgcgggccccggcttcagcctcaagttctgaaggtcagagtggaccccgtcatgggg

SEQ ID NO: 123657 - DNA, 2496 bp, Homo sapiens
  Payload ID: 4272
  Gene Symbol: CDK11B
  Gene Name: cyclin-dependent kinase 11B
  ENST ID: ENST00000629312
  CDS Start-End: 113-2470
atacaggaagtgacgatacttttggcgcgcgccggttgctgtttcttctctggctccgggaccggcggcggcggcggcggcagcggcggcggcgtagggtgttttaactcaaatgggtgatgaaaaggactcttggaaagtgaaaactttagatgaaattcttcaggaaaagaaacgaaggaaggaacaagaggagaaagcagagataaaacgcttaaaaaattctgatgaccgggattccaagcgggattcccttgaggagggggagctgagagatcaccgcatggagatcacaataaggaactccccgtatagaagagaagactctatggaagacagaaaccagcctggccaacatggtgaaaccctgtctctacaaaaatcacctggcctgggtgacaaaccaagaccctgtctcaaaaaaaagctagaaacaagaaggagcaaggacttcacagccagaaacaggccaatacagcaggaagatacagcaatgatacgtcactttgaaaagcggaggcaggcggatcacgaggctgaggcaggagaatcgctcgaacccgggaggcggagcaagcttctgtttagggggaatgatggcgtgtgcctcttcagggaccgcttggagcagttagaaaggaagcgggagcgggagcgcaagatgcgggagcagcagaaggagcagcgggagcagaaggagcgcgagcggcgggcagaggagcggcgcaaggagcgggaggcccgcagggaagtgtctgcacatcaccgaacgatgagagaggactacagcgacaaagtgaaagccagccactggagtcgcagcccgcctcggccgccgcgggagcggttcgagttgggagacggccggaagccagtaaaagaagagaaaatggaagaaagggacctgctgtccgacttacaggacatcagcgacagcgagaggaagaccagctcggccgagtcctcgtcagcggaatcaggctcaggttctgaggaagaagaggaggaggaggaagaggaggaggaggaagggagcaccagtgaagaatcagaggaggaggaggaggaagaggaagaggaggaggaggagaccggcagcaactctgaggaggcatcagagcagtctgccgaagaagtaagtgaggaagaaatgagtgaagatgaagaacgagaaaatgaaaaccacctcttggttgttccagagtcacggttcgaccgagattccggggagagtgaagaagcagaggaagaagtgggtgagggaacgccgcagagcagcgccctgacagagggcgactatgtgcccgactcccctgccctgtcgcccatcgagctcaagcaggagctgcccaagtacctgccggccctgcagggctgccggagcgtcgaggagttccagtgcctgaacaggatcgaggagggcacctatggagtggtctacagagcaaaagacaagaaaacagatgaaattgtggctctaaagcggctgaagatggagaaggagaaggagggcttcccgatcacgtcgctgagggagatcaacaccatcctcaaggcccagcatcccaacatcgtcaccgttagagagattgtggtgggcagcaacatggacaagatctacatcgtgatgaactatgtggagcacgacctcaagagcctgatggagaccatgaaacagcccttcctgccaggggaggtgaagaccctgatgatccagctgctgcgtggggtgaaacacctgcacgacaactggatcctgcaccgtgacctcaagacgtccaacctgctgctgagccacgccggcatcctcaaggtgggtgacttcgggctggcgcgggagtacggatcccctctgaaggcctacaccccggtcgtggtgaccctgtggtaccgcgccccagagctgctgcttggtgccaaggaatactccacggccgtggacatgtggtcagtgggttgcatcttcggggagctgctgactcagaagcctctgttccccgggaagtcagaaatcgatcagatcaacaaggtgttcaaggatctggggacccctagtgagaaaatctggcccggctacagcgagctcccagcagtcaagaagatgaccttcagcgagcacccctacaacaacctccgcaagcgcttcggggctctgctctcagaccagggcttcgacctcatgaacaagttcctgacctacttccccgggaggaggatcagcgctgaggacggcctcaagcatgagtatttccgcgagacccccctccccatcgacccctccatgttccccacgtggcccgccaagagcgagcagcagcgtgtgaagcggggcaccagcccgaggccccctgagggaggcctgggctacagccagctgggtgacgacgacctgaaggagacgggcttccaccttaccaccacgaaccagggggcctctgccgcgggccccggcttcagcctcaagttctgaaggtcagagtggaccccgtcatgggg

SEQ ID NO: 123658 - DNA, 2490 bp, Homo sapiens
  Payload ID: 4272
  Gene Symbol: CDK11B
  Gene Name: cyclin-dependent kinase 11B
  ENST ID: ENST00000629289
  CDS Start-End: 113-2464
atacaggaagtgacgatacttttggcgcgcgccggttgctgtttcttctctggctccgggaccggcggcggcggcggcggcagcggcggcggcgtagggtgttttaactcaaatgggtgatgaaaaggactcttggaaagtgaaaactttagatgaaattcttcaggaaaagaaacgaaggaaggaacaagaggagaaagcagagataaaacgcttaaaaaattctgatgaccgggattccaagcgggattcccttgaggagggggagctgagagatcaccgcatggagatcacaataaggaactccccgtatagaagagaagactctatggaagacagaaaaacaagatctaactgtatgctgtctgctagagaacaggaaaagacgcagcgtacaaacatcagctctactcgggaggctcagaccctgtctcaaaaaaaagctagaaacaagaaggagcaaggacttcacagccagaaacaggccaatacagcaggaagatacagcaatgatacgtctactcgggaggctgaggcaggagaatcgctcgaacccgggaggcggagcaagcttctgtttagggggaatgatggcgtgtgcctcttcagggaccgcttggagcagttagaaaggaagcgggagcgggagcgcaagatgcgggagcagcagaaggagcagcgggagcagaaggagcgcgagcggcgggcagaggagcggcgcaaggagcgggaggcccgcagggaagtgtctgcacatcaccgaacgatgagagaggactacagcgacaaagtgaaagccagccactggagtcgcagcccgcctcggccgccgcgggagcggttcgagttgggagacggccggaagccagtaaaagaagagaaaatggaagaaagggacctgctgtccgacttacaggacatcagcgacagcgagaggaagaccagctcggccgagtcctcgtcagcggaatcaggctcaggttctgaggaagaagaggaggaggaggaagaggaggaggaggaagggagcaccagtgaagaatcagaggaggaggaggaggaagaggaagaggaggaggaggagaccggcagcaactctgaggaggcatcagagcagtctgccgaagaagtaagtgaggaagaaatgagtgaagatgaagaacgagaaaatgaaaaccacctcttggttgttccagagtcacggttcgaccgagattccggggagagtgaagaagcagaggaagaagtgggtgagggaacgccgcagagcagcgccctgacagagggcgactatgtgcccgactcccctgccctgtcgcccatcgagctcaagcaggagctgcccaagtacctgccggccctgcagggctgccggagcgtcgaggagttccagtgcctgaacaggatcgaggagggcacctatggagtggtctacagagcaaaagacaagaaaacagatgaaattgtggctctaaagcggctgaagatggagaaggagaaggagggcttcccgatcacgtcgctgagggagatcaacaccatcctcaaggcccagcatcccaacatcgtcaccgttagagagattgtggtgggcagcaacatggacaagatctacatcgtgatgaactatgtggagcacgacctcaagagcctgatggagaccatgaaacagcccttcctgccaggggaggtgaagaccctgatgatccagctgctgcgtggggtgaaacacctgcacgacaactggatcctgcaccgtgacctcaagacgtccaacctgctgctgagccacgccggcatcctcaaggtgggtgacttcgggctggcgcgggagtacggatcccctctgaaggcctacaccccggtcgtggtgaccctgtggtaccgcgccccagagctgctgcttggtgccaaggaatactccacggccgtggacatgtggtcagtgggttgcatcttcggggagctgctgactcagaagcctctgttccccgggaagtcagaaatcgatcagatcaacaaggtgttcaaggatctggggacccctagtgagaaaatctggcccggctacagcgagctcccagcagtcaagaagatgaccttcagcgagcacccctacaacaacctccgcaagcgcttcggggctctgctctcagaccagggcttcgacctcatgaacaagttcctgacctacttccccgggaggaggatcagcgctgaggacggcctcaagcatgagtatttccgcgagacccccctccccatcgacccctccatgttccccacgtggcccgccaagagcgagcagcagcgtgtgaagcggggcaccagcccgaggccccctgagggaggcctgggctacagccagctgggtgacgacgacctgaaggagacgggcttccaccttaccaccacgaaccagggggcctctgccgcgggccccggcttcagcctcaagttctgaaggtcagagtggaccccgtcatgggg

SEQ ID NO: 123659 - DNA, 8336 bp, Homo sapiens
  Payload ID: 4273
  Gene Symbol: CDK12
  Gene Name: cyclin-dependent kinase 12
  Uniprot ID: Q9NYV4
  ENST ID: ENST00000447079
  CDS Start-End: 34-4506
cttttttcccttcttcaggtcaggggaaagggaatgcccaattcagagagacatgggggcaagaaggacgggagtggaggagcttctggaactttgcagccgtcatcgggaggcggcagctctaacagcagagagcgtcaccgcttggtatcgaagcacaagcggcataagtccaaacactccaaagacatggggttggtgacccccgaagcagcatccctgggcacagttatcaaacctttggtggagtatgatgatatcagctctgattccgacaccttctccgatgacatggccttcaaactagaccgaagggagaacgacgaacgtcgtggatcagatcggagcgaccgcctgcacaaacatcgtcaccaccagcacaggcgttcccgggacttactaaaagctaaacagaccgaaaaagaaaaaagccaagaagtctccagcaagtcgggatcgatgaaggaccggatatcgggaagttcaaagcgttcgaatgaggagactgatgactatgggaaggcgcaggtagccaaaagcagcagcaaggaatccaggtcatccaagctccacaaggagaagaccaggaaagaacgggagctgaagtctgggcacaaagaccggagtaaaagtcatcgaaaaagggaaacacccaaaagttacaaaacagtggacagcccaaaacggagatccaggagcccccacaggaagtggtctgacagctccaaacaagatgatagcccctcgggagcttcttatggccaagattatgaccttagtccctcacgatctcatacctcgagcaattatgactcctacaagaaaagtcctggaagtacctcgagaaggcagtcggtcagtcccccttacaaggagccttcggcctaccagtccagcacccggtcaccgagcccctacagtaggcgacagagatctgtcagtccctatagcaggagacggtcgtccagctacgaaagaagtggctcttacagcgggcgatcgcccagtccctatggtcgaaggcggtccagcagccctttcctgagcaagcggtctctgagtcggagtccactccccagtaggaaatccatgaagtccagaagtagaagtcctgcatattcaagacattcatcttctcatagtaaaaagaagagatccagttcacgcagtcgtcattccagtatctcacctgtcaggcttccacttaattccagtctgggagctgaactcagtaggaaaaagaaggaaagagcagctgctgctgctgcagcaaagatggatggaaaggagtccaagggttcacctgtatttttgcctagaaaagagaacagttcagtagaggctaaggattcaggtttggagtctaaaaagttacccagaagtgtaaaattggaaaaatctgccccagatactgaactggtgaatgtaacacatctaaacacagaggtaaaaaattcttcagatacagggaaagtaaagttggatgagaactccgagaagcatcttgttaaagatttgaaagcacagggaacaagagactctaaacccatagcactgaaagaggagattgttactccaaaggagacagaaacatcagaaaaggagacccctccacctcttcccacaattgcttctcccccaccccctctaccaactactacccctccacctcagacaccccctttgccacctttgcctccaataccagctcttccacagcaaccacctctgcctccttctcagccagcatttagtcaggttcctgcttccagtacttcaactttgcccccttctactcactcaaagacatctgctgtgtcctctcaggcaaattctcagccccctgtacaggtttctgtgaagactcaagtatctgtaacagctgctattccacacctgaaaacttcaacgttgcctcctttgcccctcccacccttattacctggagatgatgacatggatagtccaaaagaaactcttccttcaaaacctgtgaagaaagagaaggaacagaggacacgtcacttactcacagaccttcctctccctccagagctccctggtggagatctgtctcccccagactctccagaaccaaaggcaatcacaccacctcagcaaccatataaaaagagaccaaaaatttgttgtcctcgttatggagaaagaagacaaacagaaagcgactgggggaaacgctgtgtggacaagtttgacattattgggattattggagaaggaacctatggccaagtatataaagccaaggacaaagacacaggagaactagtggctctgaagaaggtgagactagacaatgagaaagagggcttcccaatcacagccattcgtgaaatcaaaatccttcgtcagttaatccaccgaagtgttgttaacatgaaggaaattgtcacagataaacaagatgcactggatttcaagaaggacaaaggtgccttttaccttgtatttgagtatatggaccatgacttaatgggactgctagaatctggtttggtgcacttttctgaggaccatatcaagtcgttcatgaaacagctaatggaaggattggaatactgtcacaaaaagaatttcctgcatcgggatattaagtgttctaacattttgctgaataacagtgggcaaatcaaactagcagattttggacttgctcggctctataactctgaagagagtcgcccttacacaaacaaagtcattactttgtggtaccgacctccagaactactgctaggagaggaacgttacacaccagccatagatgtttggagctgtggatgtattcttggggaactattcacaaagaagcctatttttcaagccaatctggaactggctcagctagaactgatcagccgactttgtggtagcccttgtccagctgtgtggcctgatgttatcaaactgccctacttcaacaccatgaaaccgaagaagcaatatcgaaggcgtctacgagaagaattctctttcattccttctgcagcacttgatttattggaccacatgctgacactagatcctagtaagcggtgcacagctgaacagaccctacagagcgacttccttaaagatgtcgaactcagcaaaatggctcctccagacctcccccactggcaggattgccatgagttgtggagtaagaaacggcgacgtcagcgacaaagtggtgttgtagtcgaagagccacctccatccaaaacttctcgaaaagaaactacctcagggacaagtactgagcctgtgaagaacagcagcccagcaccacctcagcctgctcctggcaaggtggagtctggggctggggatgcaataggccttgctgacatcacacaacagctgaatcaaagtgaattggcagtgttattaaacctgctgcagagccaaaccgacctgagcatccctcaaatggcacagctgcttaacatccactccaacccagagatgcagcagcagctggaagccctgaaccaatccatcagtgccctgacggaagctacttcccagcagcaggactcagagaccatggccccagaggagtctttgaaggaagcaccctctgccccagtgatcctgccttcagcagaacagacgacccttgaagcttcaagcacaccagctgacatgcagaatatattggcagttctcttgagtcagctgatgaaaacccaagagccagcaggcagtctggaggaaaacaacagtgacaagaacagtgggccacaggggccccgaagaactcccacaatgccacaggaggaggcagcagcatgtcctcctcacattcttccaccagagaagaggccccctgagccccccggacctccaccgccgccacctccaccccctctggttgaaggcgatctttccagcgccccccaggagttgaacccagccgtgacagccgccttgctgcaacttttatcccagcctgaagcagagcctcctggccacctgccacatgagcaccaggccttgagaccaatggagtactccacccgaccccgtccaaacaggacttatggaaacactgatgggcctgaaacagggttcagtgccattgacactgatgaacgaaactctggtccagccttgacagaatccttggtccagaccctggtgaagaacaggaccttctcaggctctctgagccaccttggggagtccagcagttaccagggcacagggtcagtgcagtttccaggggaccaggacctccgttttgccagggtccccttagcgttacacccggtggtcgggcaaccattcctgaaggctgagggaagcagcaattctgtggtacatgcagagaccaaattgcaaaactatggggagctggggccaggaaccactggggccagcagctcaggagcaggccttcactgggggggcccaactcagtcttctgcttatggaaaactctatcgggggcctacaagagtcccaccaagagggggaagagggagaggagttccttactaacccagagacttcagtgtcctgaaagattcctttcctatccatccttccatccagttctctgaatctttaatgaaatcatttgccagagcgaggtaatcatctgcatttggctactgcaaagctgtccgttgtattccttgctcacttgctactagcaggcgacttacgaaataatgatgttggcaccagttccccctggatgggctatagccagaacatttacttcaactctaccttagtagatacaagtagagaatatggagaggatcattacattgaaaagtaaatgttttattagttcattgcctgcacttactgatcggaagagagaaagaacagtttcagtattgagatggctcaggagaggctctttgatttttaaagttttggggtgggggattgtgtgtggtttctttcttttgaattttaatttaggtgttttgggtttttttcctttaaagagaatagtgttcacaaaatttgagctgctctttggcttttgctataagggaaacagagtggcctggctgatttgaataaatgtttctttcctctccaccatctcacattttgcttttaagtgaacactttttccccattgagcatcttgaacatactttttttccaaataaattactcatccttaaagtttactccactttgacaaaagatacgcccttctccctgcacataaagcaggttgtagaacgtggcattcttgggcaagtaggtagactttacccagtctctttccttttttgctgatgtgtgctctctctctctctttctctctctctctctctctctctctctctctctctctctctgtctcgcttgctcgctctcgctgtttctctctctttgaggcatttgtttggaaaaaatcgttgagatgcccaagaacctgggataattctttactttttttgaaataaaggaaaggaaattcagactcttacattgttctctgtaactcttcaattctaaaatgttttgttttttaaaccatgttctgatggggaagttgatttgtaagtgtggacagcttggacattgctgctgagctgtggttagagatgatgcctccattcctagagggctaataacagcatttagcatattgtttacacatatatttttatgtcaaaaaaaaaacaaaaacctttcaaacagagcattgtgatattgtcaaagagaaaaacaaatcctgaagatacatggaaatgtaacctagtttagggtgggtatttttctgaagatacatcaatacctgaccttttttaaaaaaataattttaaaacagcatactgtgaggaagaacagtattgacatacccacatcccagcatgtgtaccctgccagttcttttagggatttttcctccaaagagatttggatttggttttggtaaaaggggttaaattgtgcttccaggcaagaactttgccttatcataaacaggaaatgaaaaagggaagggctgtcaggatgggataatttgggaggcttctcattctggcttctatttctatgtgagtaccagcatatagagtgttttaaaaacagatacatgtcatataatttatctgcacagacttagaccttcaggaaacataggttaagcccccttttacaaagaaaaagtaaacatacttcagcatcttggagggtagttttcaaaactcaagtttcatgtttcaatgccaagttcttattttaaaaaataaaatctacttataagagaaaggtgcattacttaaaaaaaaaaaactttaaagaaatgaaagaagaaccctcttcagatacttacttgaagactgttttcccctgttaatgagatatagctagatatcggtgtgtgtatttctttattattctctggtttttgatctggccttgcctccagggccaaacactgatttagaaagagagccttctagctattttggcattgatggctttttataccagtgtgtccagttagatttactaggcttactgacatgctattggtaaatcgcattaaagttcatctgaaccttctgtctgttgacttcttagtcctcagacatgggcctttgtgttttagaatatttgaatttgagttattgggccccactccctgttttttattaaagaacgtgagcctgggatactttcagaagtatctgttcaatgaaaaaaagttggtttcccatcaaatatgaataaaattctctatatatttcattgtattttggttatcagcagtcatcaataatgtttttccctcccctctcccacctcttatttttaattatgccaaatatcctaaataatatacttaagcctccattccctcatccctactagggaagggggtgagtgtatgtgtgagtgtatgtgtatgtatgatcccatctcacccccacccccattttgggagtcttttaaaatgaaaacaaagtttggtagttttgactatttctaaaagcagaggagaaaaaaaaacttatttaaatatcctggaatctgtatggaggaagaaaaggtatttgttaatttttcagttacgttatctataaacatgatggaagtaaaggtttggcagaatttcaccttgactatttgaaaattacagacccaattaattccattcaaaagtggttttcgttttgttttaattattgtacaatgagagatattgtctattaaatacattattttgaacagatgagaaatctgattctgttcatgagtgggaggcaaaactggtttgaccgtgatcatttttgtggttttgaaaacaaatatacttgacccagtttccttagttttttcttcaactgtccataggaacgataagtatttgaaagcaacatcaaatctatacgtttaaagcagggcagttagcacaaatttgcaagtagaacttctattagcttatgccatagacatcacccaaccacttgtatgtgtgtgtgtatatataatatgcatatatagttaccgtgctaaaatggttaccagcaggttttgagagagaatgctgcatcagaaaagtgtcagttgccacctcattctccctgatttaggttcctgacactgattcctttctctctcgtttttgacccccattgggtgtatcttgtctatgtacagatattttgtaatatattaaatttttttctttcagtttataaaaatggaaagtggagattggaaaattaaatatttcctgttactataccacttttgctccattgcatttacttcttaatctgtaccccctgagcatatctaatcatgtataaaggacgtttttcctccactttatcttaggggttctctgtctcagaatcattatagactcattaactccccctcccagcaaaaggttatcaggatttgaagaggtgcttgaaaacgctagactaggaactagagaataaatgagttgggaaaaaccatgaaatgtgatttttttaaagtagaaaagttatacaaataatggtaccaaaccatcaaaagagttgagcttcatgtaccctgactcctcctgacaggagaggtaagtgggtttgagctcaactgtcatcaagggaagttggtaagaggctgtttagacccaaaggatagtcttaaaccagacttcaccacccaccctacctcagttcccatgttattacatgcagagtcagcatggggattagtgtacctacctttgctgagatttcccgatgcgttgccaatccagaaagtgaatcaaaaagttgtttaaaagttaaaatctctattgtttccaaaatctttcccatctccacctgaagacagaattgcttccccttctc

SEQ ID NO: 123660 - DNA, 5918 bp, Homo sapiens
  Payload ID: 4273
  Gene Symbol: CDK12
  Gene Name: cyclin-dependent kinase 12
  Uniprot ID: Q9NYV4
  ENST ID: ENST00000430627
  CDS Start-End: 312-4757
cccggcgcccgggcctgaggactggctcggcggagggagaagaggaaacagacttgagcagctccccgttgtctcgcaactccactgccgaggaactctcatttcttccctcgctccttcaccccccacctcatgtagaagggtgctgaggcgtcgggagggaggaggagcctgggctaccgtccctgccctccccacccccttcccggggcgctttggtgggcgtggagttggggttgggggggtgggtgggggttgctttttggagtgctggggaacttttttcccttcttcaggtcaggggaaagggaatgcccaattcagagagacatgggggcaagaaggacgggagtggaggagcttctggaactttgcagccgtcatcgggaggcggcagctctaacagcagagagcgtcaccgcttggtatcgaagcacaagcggcataagtccaaacactccaaagacatggggttggtgacccccgaagcagcatccctgggcacagttatcaaacctttggtggagtatgatgatatcagctctgattccgacaccttctccgatgacatggccttcaaactagaccgaagggagaacgacgaacgtcgtggatcagatcggagcgaccgcctgcacaaacatcgtcaccaccagcacaggcgttcccgggacttactaaaagctaaacagaccgaaaaagaaaaaagccaagaagtctccagcaagtcgggatcgatgaaggaccggatatcgggaagttcaaagcgttcgaatgaggagactgatgactatgggaaggcgcaggtagccaaaagcagcagcaaggaatccaggtcatccaagctccacaaggagaagaccaggaaagaacgggagctgaagtctgggcacaaagaccggagtaaaagtcatcgaaaaagggaaacacccaaaagttacaaaacagtggacagcccaaaacggagatccaggagcccccacaggaagtggtctgacagctccaaacaagatgatagcccctcgggagcttcttatggccaagattatgaccttagtccctcacgatctcatacctcgagcaattatgactcctacaagaaaagtcctggaagtacctcgagaaggcagtcggtcagtcccccttacaaggagccttcggcctaccagtccagcacccggtcaccgagcccctacagtaggcgacagagatctgtcagtccctatagcaggagacggtcgtccagctacgaaagaagtggctcttacagcgggcgatcgcccagtccctatggtcgaaggcggtccagcagccctttcctgagcaagcggtctctgagtcggagtccactccccagtaggaaatccatgaagtccagaagtagaagtcctgcatattcaagacattcatcttctcatagtaaaaagaagagatccagttcacgcagtcgtcattccagtatctcacctgtcaggcttccacttaattccagtctgggagctgaactcagtaggaaaaagaaggaaagagcagctgctgctgctgcagcaaagatggatggaaaggagtccaagggttcacctgtatttttgcctagaaaagagaacagttcagtagaggctaaggattcaggtttggagtctaaaaagttacccagaagtgtaaaattggaaaaatctgccccagatactgaactggtgaatgtaacacatctaaacacagaggtaaaaaattcttcagatacagggaaagtaaagttggatgagaactccgagaagcatcttgttaaagatttgaaagcacagggaacaagagactctaaacccatagcactgaaagaggagattgttactccaaaggagacagaaacatcagaaaaggagacccctccacctcttcccacaattgcttctcccccaccccctctaccaactactacccctccacctcagacaccccctttgccacctttgcctccaataccagctcttccacagcaaccacctctgcctccttctcagccagcatttagtcaggttcctgcttccagtacttcaactttgcccccttctactcactcaaagacatctgctgtgtcctctcaggcaaattctcagccccctgtacaggtttctgtgaagactcaagtatctgtaacagctgctattccacacctgaaaacttcaacgttgcctcctttgcccctcccacccttattacctggagatgatgacatggatagtccaaaagaaactcttccttcaaaacctgtgaagaaagagaaggaacagaggacacgtcacttactcacagaccttcctctccctccagagctccctggtggagatctgtctcccccagactctccagaaccaaaggcaatcacaccacctcagcaaccatataaaaagagaccaaaaatttgttgtcctcgttatggagaaagaagacaaacagaaagcgactgggggaaacgctgtgtggacaagtttgacattattgggattattggagaaggaacctatggccaagtatataaagccaaggacaaagacacaggagaactagtggctctgaagaaggtgagactagacaatgagaaagagggcttcccaatcacagccattcgtgaaatcaaaatccttcgtcagttaatccaccgaagtgttgttaacatgaaggaaattgtcacagataaacaagatgcactggatttcaagaaggacaaaggtgccttttaccttgtatttgagtatatggaccatgacttaatgggactgctagaatctggtttggtgcacttttctgaggaccatatcaagtcgttcatgaaacagctaatggaaggattggaatactgtcacaaaaagaatttcctgcatcgggatattaagtgttctaacattttgctgaataacagtgggcaaatcaaactagcagattttggacttgctcggctctataactctgaagagagtcgcccttacacaaacaaagtcattactttgtggtaccgacctccagaactactgctaggagaggaacgttacacaccagccatagatgtttggagctgtggatgtattcttggggaactattcacaaagaagcctatttttcaagccaatctggaactggctcagctagaactgatcagccgactttgtggtagcccttgtccagctgtgtggcctgatgttatcaaactgccctacttcaacaccatgaaaccgaagaagcaatatcgaaggcgtctacgagaagaattctctttcattccttctgcagcacttgatttattggaccacatgctgacactagatcctagtaagcggtgcacagctgaacagaccctacagagcgacttccttaaagatgtcgaactcagcaaaatggctcctccagacctcccccactggcaggattgccatgagttgtggagtaagaaacggcgacgtcagcgacaaagtggtgttgtagtcgaagagccacctccatccaaaacttctcgaaaagaaactacctcagggacaagtactgagcctgtgaagaacagcagcccagcaccacctcagcctgctcctggcaaggtggagtctggggctggggatgcaataggccttgctgacatcacacaacagctgaatcaaagtgaattggcagtgttattaaacctgctgcagagccaaaccgacctgagcatccctcaaatggcacagctgcttaacatccactccaacccagagatgcagcagcagctggaagccctgaaccaatccatcagtgccctgacggaagctacttcccagcagcaggactcagagaccatggccccagaggagtctttgaaggaagcaccctctgccccagtgatcctgccttcagcagaacagacgacccttgaagcttcaagcacaccagctgacatgcagaatatattggcagttctcttgagtcagctgatgaaaacccaagagccagcaggcagtctggaggaaaacaacagtgacaagaacagtgggccacaggggccccgaagaactcccacaatgccacaggaggaggcagcagagaagaggccccctgagccccccggacctccaccgccgccacctccaccccctctggttgaaggcgatctttccagcgccccccaggagttgaacccagccgtgacagccgccttgctgcaacttttatcccagcctgaagcagagcctcctggccacctgccacatgagcaccaggccttgagaccaatggagtactccacccgaccccgtccaaacaggacttatggaaacactgatgggcctgaaacagggttcagtgccattgacactgatgaacgaaactctggtccagccttgacagaatccttggtccagaccctggtgaagaacaggaccttctcaggctctctgagccaccttggggagtccagcagttaccagggcacagggtcagtgcagtttccaggggaccaggacctccgttttgccagggtccccttagcgttacacccggtggtcgggcaaccattcctgaaggctgagggaagcagcaattctgtggtacatgcagagaccaaattgcaaaactatggggagctggggccaggaaccactggggccagcagctcaggagcaggccttcactgggggggcccaactcagtcttctgcttatggaaaactctatcgggggcctacaagagtcccaccaagagggggaagagggagaggagttccttactaacccagagacttcagtgtcctgaaagattcctttcctatccatccttccatccagttctctgaatctttaatgaaatcatttgccagagcgaggtaatcatctgcatttggctactgcaaagctgtccgttgtattccttgctcacttgctactagcaggcgacttacgaaataatgatgttggcaccagttccccctggatgggctatagccagaacatttacttcaactctaccttagtagatacaagtagagaatatggagaggatcattacattgaaaagtaaatgttttattagttcattgcctgcacttactgatcggaagagagaaagaacagtttcagtattgagatggctcaggagaggctctttgatttttaaagttttggggtgggggattgtgtgtggtttctttcttttgaattttaatttaggtgttttgggtttttttcctttaaagagaatagtgttcacaaaatttgagctgctctttggcttttgctataagggaaacagagtggcctggctgatttgaataaatgtttctttcctctccaccatctcacattttgcttttaagtgaacactttttccccattgagcatcttgaacatactttttttccaaataaattactcatccttaaagtttactccactttgacaaaagatacgcccttctccctgcacataaagcaggttgtagaacgtggcattcttgggcaagtaggtagactttacccagtctctttccttttttgctgatgtgtgctctctctctctctttctctctctctctctctctctctctctctctctctctctctgtctcgcttgctcgctctcgctgtttctctctctttgaggcatttgtttggaaaaaatcgttgagatgcccaagaacctgggataattctttactttttttgaaataaaggaaaggaaattcagactcttacattgttctctgtaactcttcaattctaaaatgttttgttttttaaaccatgttctgatggggaagttgatttgtaagtgtggacagcttggacattgctgctgagctgtggttagagatgatgcctccattcctagagggctaataacagcatttagcatattgtttacacatatatttttatgtcaaaaaaaaaacaaaaa

SEQ ID NO: 123661 - DNA, 871 bp, Homo sapiens
  Payload ID: 4273
  Gene Symbol: CDK12
  Gene Name: cyclin-dependent kinase 12
  ENST ID: ENST00000559663
  CDS Start-End: 1-479
ttgctgacatcacacaacagctgaatcaaagtgaattggcagtgttattaaacctgctgcagagccaaaccgacctgagcatccctcaaatggcacagctgcttaacatccactccaacccagagatgcagcagcagctggaagccctgaaccaatccatcagtgccctgacggaagctacttcccagcagcaggactcagagaccatggccccagaggagtctttgaaggaagcaccctctgccccagtgatcctgccttcagcagaacagacgacccttgaagcttcaagcacaccagctgacatgcagaatatattggcagttctcttgagtcagctgatgaaaacccaagagccagcaggcagtctggaggaaaacaacagtgacaagaacagtgggccacaggggccccgaagaactcccacaatgccacaggaggaggcagcaggtaggagcaacggtgggaatgccctctgaggaatgcagtgatgtccatcagtcacctctcacccagagcctggcaaattcagtctctttcacagaacctaaagccaagccaggttcagtgggaaatcccacctgtccaaacactgtgtgagacaccagaattagaggcctgcaagcctgcttccttcatccccaatgcccagatgggacaggtcaccagcctcctgtgtctacccccacctttcttgcttgctggcctcctctctctgcagtgcctctctcatccctgcaatccagacagcacatgcagcagctcaaatgtgaaaaacaagacccagagaggggaaatcatttgaatcctgtcctggtattgctttgtgttcctggatttggagaatttctgggaacacaggaaaaggaaa

SEQ ID NO: 123662 - DNA, 4165 bp, Homo sapiens
  Payload ID: 4273
  Gene Symbol: CDK12
  Gene Name: cyclin-dependent kinase 12
  ENST ID: ENST00000584632
  CDS Start-End: 562-4165
gtgtgactgggtctgtgtgagggagagagtgtgtgtggtgtggaggtgaaacggaggcaagaaagggggctacctcaggagcgagggacaaagggggcgtgaggcacctaggccgcggcaccccggcgacaggaagccgtcctgaaccgggctaccgggtaggggaagggcccgcgtagtcctcgcagggccccagagctggagtcggctccacagccccgggccgtcggcttctcacttcctggacctccccggcgcccgggcctgaggactggctcggcggagggagaagaggaaacagacttgagcagctccccgttgtctcgcaactccactgccgaggaactctcatttcttccctcgctccttcaccccccacctcatgtagaagggtgctgaggcgtcgggagggaggaggagcctgggctaccgtccctgccctccccacccccttcccggggcgctttggtgggcgtggagttggggttgggggggtgggtgggggttgctttttggagtgctggggaacttttttcccttcttcaggtcaggggaaagggaatgcccaattcagagagacatgggggcaagaaggacgggagtggaggagcttctggaactttgcagccgtcatcgggaggcggcagctctaacagcagagagcgtcaccgcttggtatcgaagcacaagcggcataagtccaaacactccaaagacatggggttggtgacccccgaagcagcatccctgggcacagttatcaaacctttggtggagtatgatgatatcagctctgattccgacaccttctccgatgacatggccttcaaactagaccgaagggagaacgacgaacgtcgtggatcagatcggagcgaccgcctgcacaaacatcgtcaccaccagcacaggcgttcccgggacttactaaaagctaaacagaccgaaaaagaaaaaagccaagaagtctccagcaagtcgggatcgatgaaggaccggatatcgggaagttcaaagcgttcgaatgaggagactgatgactatgggaaggcgcaggtagccaaaagcagcagcaaggaatccaggtcatccaagctccacaaggagaagaccaggaaagaacgggagctgaagtctgggcacaaagaccggagtaaaagtcatcgaaaaagggaaacacccaaaagttacaaaacagtggacagcccaaaacggagatccaggagcccccacaggaagtggtctgacagctccaaacaagatgatagcccctcgggagcttcttatggccaagattatgaccttagtccctcacgatctcatacctcgagcaattatgactcctacaagaaaagtcctggaagtacctcgagaaggcagtcggtcagtcccccttacaaggagccttcggcctaccagtccagcacccggtcaccgagcccctacagtaggcgacagagatctgtcagtccctatagcaggagacggtcgtccagctacgaaagaagtggctcttacagcgggcgatcgcccagtccctatggtcgaaggcggtccagcagccctttcctgagcaagcggtctctgagtcggagtccactccccaggaaatccatgaagtccagaagtagaagtcctgcatattcaagacattcatcttctcatagtaaaaagaagagatccagttcacgcagtcgtcattccagtatctcacctgtcaggcttccacttaattccagtctgggagctgaactcagtaggaaaaagaaggaaagagcagctgctgctgctgcagcaaagatggatggaaaggagtccaagggttcacctgtatttttgcctagaaaagagaacagttcagtagaggctaaggattcaggtttggagtctaaaaagttacccagaagtgtaaaattggaaaaatctgccccagatactgaactggtgaatgtaacacatctaaacacagaggtaaaaaattcttcagatacagggaaagtaaagttggatgagaactccgagaagcatcttgttaaagatttgaaagcacagggaacaagagactctaaacccatagcactgaaagaggagattgttactccaaaggagacagaaacatcagaaaaggagacccctccacctcttcccacaattgcttctcccccaccccctctaccaactactacccctccacctcagacaccccctttgccacctttgcctccaataccagctcttccacagcaaccacctctgcctccttctcagccagcatttagtcaggttcctgcttccagtacttcaactttgcccccttctactcactcaaagacatctgctgtgtcctctcaggcaaattctcagccccctgtacaggtttctgtgaagactcaagtatctgtaacagctgctattccacacctgaaaacttcaacgttgcctcctttgcccctcccacccttattacctggagatgatgacatggatagtccaaaagaaactcttccttcaaaacctgtgaagaaagagaaggaacagaggacacgtcacttactcacagaccttcctctccctccagagctccctggtggagatctgtctcccccagactctccagaaccaaaggcaatcacaccacctcagcaaccatataaaaagagaccaaaaatttgttgtcctcgttatggagaaagaagacaaacagaaagcgactgggggaaacgctgtgtggacaagtttgacattattgggattattggagaaggaacctatggccaagtatataaagccaaggacaaagacacaggagaactagtggctctgaagaaggtgagactagacaatgagaaagagggcttcccaatcacagccattcgtgaaatcaaaatccttcgtcagttaatccaccgaagtgttgttaacatgaaggaaattgtcacagataaacaagatgcactggatttcaagaaggacaaaggtgccttttaccttgtatttgagtatatggaccatgacttaatgggactgctagaatctggtttggtgcacttttctgaggaccatatcaagtcgttcatgaaacagctaatggaaggattggaatactgtcacaaaaagaatttcctgcatcgggatattaagtgttctaacattttgctgaataacagtgggcaaatcaaactagcagattttggacttgctcggctctataactctgaagagagtcgcccttacacaaacaaagtcattactttgtggtaccgacctccagaactactgctaggagaggaacgttacacaccagccatagatgtttggagctgtggatgtattcttggggaactattcacaaagaagcctatttttcaagccaatctggaactggctcagctagaactgatcagccgactttgtggtagcccttgtccagctgtgtggcctgatgttatcaaactgccctacttcaacaccatgaaaccgaagaagcaatatcgaaggcgtctacgagaagaattctctttcattccttctgcagcacttgatttattggaccacatgctgacactagatcctagtaagcggtgcacagctgaacagaccctacagagcgacttccttaaagatgtcgaactcagcaaaatggctcctccagacctcccccactggcaggattgccatgagttgtggagtaagaaacggcgacgtcagcgacaaagtggtgttgtagtcgaagagccacctccatccaaaacttctcgaaaagaaactacctcagggacaagtactgagcctgtgaagaacagcagcccagcaccacctcagcctgctcctggcaaggtggagtctggggctggggatgcaataggccttgctgacatcacacaacagctgaatcaaagtgaattggcagtgttattaaacctgctgcagagccaaaccgacctgagcatccctcaaatggcacagctgcttaacatccactccaacccagagatgcagcagcagctggaagccctgaaccaatccatcagtgccctgacggaagctacttcccagcagcaggactcagagaccatggccccagaggagtctttgaaggaagcaccctctgccccagtgatcctgccttcagcagaacagacgacccttgaagcttcaagcacac

SEQ ID NO: 123663 - DNA, 7298 bp, Homo sapiens
  Payload ID: 4274
  Gene Symbol: CDK13
  Gene Name: cyclin-dependent kinase 13
  Uniprot ID: Q14004
  ENST ID: ENST00000181839
  CDS Start-End: 606-5144
gccccgcgggccgcagagtgcgcgaggccctaggccgggagttgttgtcaggcccaggccacttccgaggcgcctgcggtgtgtcgccgccaccacaggaggacgacgtcgacgccgaggaggaggcggtggaggcgtgttgttgtctcgcccactcccctcccctgaacttgcacccaacgtcagggcgcgatggagtgaagcggcgacgaaggtggtacttccgcgttgcgctgcccgagccgagagcgcggccaaggccgctcccccacccccgggggcacttggaggactcgggactcccccgcaggtcagcgcccggcgcatctggtgttttcgctgccgaggataggacgacgagcgcaatcgggagctccgccgcccggattcctgcttccctggggcccggaggctgctgcgtaccccactgtgacctggaacccagggacccgagtcccgacccggattatcgtggcgcttttcccggccggctctggtgctcggtgtccctccgccgccgctcccgtttccggcgggggagatggccaggatctgacccgggaggaggccgcacccgcgccgcgctctgcggctggctctaggcgatgccgagcagctcggacacggcgctggggggaggcgggggcctgagctgggcggagaagaagttggaggaacgccgcaagcggaggcgattcctgtcccctcagcagccgccgctgctgttgccgctcctgcagccgcagctcctgcaaccgccgccgcccccgccgcctctgctcttcctggctgctcccggcacggccgccgccgcagccgccgccgccgcggcctcctcctcttgcttcagcccgggcccccctctggaggtcaagcggctggcgagaggcaagaggcgcgcaggagggcggcagaagcggcgtcgcgggccccgcgccgggcaggaggcggagaagcgtcgggtcttctcgctgccccagccgcagcaggacggcggtggcggtgctagtagcggcgggggtgtgaccccgctggtggaatacgaggatgtgagctcccagtccgagcaggggctgctgctggggggggccagcgcggcaacggcggcgacggctgccgggggaacggggggcagcggcgggagtccggcctcctcctccggcacccagcggcgcggggaggggtcggagcgcaggccccgccgggaccgccgcagcagcagtggccgcagcaaggagcgccaccgcgagcaccggcggcgggatgggcagcgcggtggcagcgaggcctccaagtcccgcagccgccacagccacagcggcgaggaacgggccgaggtcgccaagagcggcagcagcagcagcagcggcggccgccggaaaagcgcttcggccacatccagcagcagtagcagccgcaaggaccgggactcgaaggcccaccgcagccggactaagtcgtccaaggagccgccttcggcctacaaggaaccgcccaaggcctaccgggaggacaagaccgagcctaaggcctacaggcggcggcggtccctcagcccactgggaggccgggacgacagcccggtgtcccacagggcctctcagagcctgaggagccgcaagtcccccagcccggcaggaggtggcagcagcccctattctcggcggctgccgcgctccccgagcccctacagtcgccgccgctcccccagctacagccgccacagctcctacgagcggggcggcgacgtgtcccctagtccctacagcagcagcagctggcgccgctctcgcagtccctacagccctgtgctcagacggtctggaaaatcccgaagcagaagcccgtattcatctaggcattcaagatctcgtagcaggcacagattgtctagatccagaagtcgtcattctagtatttctcctagcacactaactctgaagagtagcctggcagctgaattgaacaagaataaaaaagcacgagcagcagaggcagcaagagccgcagaagcagcgaaagctgcagaagcaactaaggctgctgaggctgctgccaaggctgcaaaagcttcaaacacttctacacctaccaaggggaacacggaaactagtgccagtgcatcacaaacaaaccatgtgaaggatgtgaagaaaattaaaattgaacatgcaccttctccctcaagtggtggaactttaaaaaatgacaaagcaaaaacaaagccacctcttcaggtaacgaaggtggaaaataatttgattgtagataaagccaccaagaaagcagtcatagttggaaaggagagtaaatctgctgctacaaaggaggaatcagtatctcttaaagagaaaaccaaaccacttacaccaagcataggagccaaggagaaggagcaacatgtagctttagtcacctctacattaccaccgttacctttgcctcccatgctgcctgaagataaagaagctgatagcttacgaggaaatatttcagtaaaagcagttaaaaaagaagtagaaaagaaactccgatgtcttcttgctgatttaccgctgccccctgagctaccaggaggagatgatctttcaaagagtccagaggaaaagaaaacagcaacacagttacatagtaaaaggaggcctaaaatatgtgggcctcgctatggtgaaaccaaagaaaaagatattgactggggaaaacgctgcgtggataaatttgatatcatcggaattattggagaaggtacttacggacaagtttacaaagccagggataaagacactggagaaatggtagccttaaaaaaagtacgtctggataatgaaaaggaaggctttccaattacagcaattcgagaaattaaaattctccggcagcttacccatcagagtattatcaatatgaaggaaatagtgactgataaagaagatgctttggatttcaagaaggacaaaggtgcattttatctggtgtttgaatatatggaccatgatctgatgggactactggaatcaggcttggttcattttaatgaaaatcacataaagtcatttatgagacagctcatggagggtctggattattgtcataagaagaactttttgcatagagatattaaatgttccaatatccttctaaataatagagggcagataaaacttgcagactttggacttgctcgattgtatagctcagaagaaagtcggccgtatactaacaaggtaattactttatggtaccgtccacctgaactgctactgggagaagaacgatacacaccagccattgatgtatggagctgtggctgtatccttggcgaactcttcactaaaaaacctatatttcaagcaaatcaggaacttgcacaactagaattaataagccgaatatgtgggagtccatgtcctgcagtgtggcctgatgtaatcaaactaccatatttcaacaccatgaaaccaaagaagcaatatcgtcgaaagttaagagaagaatttgtttttattcctgcagctgcgctagacttatttgattacatgcttgccttggatcctagtaagcgctgcactgctgaacaggctcttcagtgcgagttcctccgagatgtggaaccctcaaaaatgcctccaccagatctccctttatggcaagattgtcatgagttatggagtaaaaagcgaagaagacagaagcagatgggcatgactgatgatgtttccacaattaaagcccccaggaaggacttgtctctgggcttggatgacagcagaaccaacacaccccagggtgtgctgccatcttcacagctgaaatctcagggcagctcaaatgtggcacctgtaaaaacaggccctggacagcacttaaaccacagtgaattggcaattctactaaacctactacaatctaaaacaagtgttaatatggctgattttgtccaagtgttgaacattaaggtaaactctgagactcaacagcagctaaataaaataaaccttcctgctggaattttggcaacaggtgaaaaacagacagatccatcaacaccacaacaggagtcttcgaaaccgttgggaggaattcagccttcttctcagaccatccagcctaaagtggagactgatgctgcccaggcggctgtgcagagtgcatttgcagttctgttgactcagttaataaaggctcagcagtcaaagcagaaagatgtgctactagaagagagggaaaatggatcgggacatgaagcgtcattacaactcaggccacctccagaacctagcactccggtgtcgggacaagatgacctcatccagcatcaagatatgaggatcttggagctaacgccagaaccagaccggcctcgaattctgcctcctgaccaacgacctcccgagcctcctgaaccaccaccagtcactgaggaagatctagattatcggacagaaaaccagcatgtacccaccaccagttcttcattaactgaccctcatgccggagtgaaggcagccctgttacagctgcttgctcagcatcagccccaggatgaccccaaaagagaaggtgggattgattatcaagcaggagacacttacgtgtccacttcagactacaaggacaactttggatcctcttctttctcttctgctccttatgttagcaatgatggtctaggaagcagttctgctccaccactagaacgacgtagtttcattggaaattcagatattcagtctttggataactacagtactgcttcatctcattctggtggtccacctcagccttctgccttttctgagtcatttcccagttcagtagctggatatggagacatttacctcaatgctggtcccatgttgtttagtggagacaaggaccatagatttgaatatagccatggtcctattgcagtcctggcaaacagcagtgacccttccacggggccagagagtactcatcctttgccagcaaagatgcacaactataactatggtggtaacttacaggaaaatccgagtggccccagcctcatgcatggacagacctggacttctcctgcccaaggacctggatattcacaaggatacaggggacatattagcacatcaactggcagaggcagaggcagagggttaccatactgagtatctgtttttcctcaggcacatcatttttatctggaaagacttttctagctgcaatttaaggcagcaatccaagagacttgaataataataattcaacaacagctttatttttatgtggagaagggtcttgcatacaatagtttaaaaaagacaaaaaaaacctttgcttaaattcatgctgttctaaaaactagatcgattgtacatcttcacaaattctagttaacaattttattttgtattcttgcagttttaagtggatgctaattttaggggcataagccttttatggccctcttgcagatcttctgaactatgcacatttgtgctttttttgtaagtttggaccaacttttatgtaacaaacagcccctccccacctccagttttacaacaatcagaaagggcactgatttatttggtatttttctttttacaaagctacctttagtcaaaggtcactgtcagtctttgcacctgctttcagtgttattgtgaaaggtgtactttgtgctcatttcagaaaataaaacacaacctttctcttgatgcaacagttttataaaaaaaaaaatggtcaacgttatttttgttttgttttgcagattatcaaagcctagcaaaatgcatttaaatgaaatagtgggttttatatgaaaactatgggtggggtggggagggaaagtaagtgccttaacaggtaagcttaaggtctgaaaaaaatagttaacttttacccccatttgtcttttaaagggaatcaatgcattaaaaaggcaagaaactctgaagtttcaggggctgcctgttcagttcctgttaggtccattccctctgcttgtcacactttctccttttctgcctgtctttgggctgtgttgcctttcactaccaccttctcttgataggggagtgagagcaaagaaagggagtagaactgcaatcagtacatattgtttgagaagttctacaaagttttgtcatttaaatggttgaaagtaatagctccaggagaattttagagtaccattttctttcaggctgccatattatccctgtttccatttgccatggataattggagggtcatggtatagaagcaagagttaataacagaacttgcctaaatgtgttaaagttcatgggggaggggtggcaaataccgtattttaagttatgcaattgcccttttaagaaagtcaattctattcacttgttaactagaaacattgcttagattgaatttattgaagcaaaaagaaaaggcaatgagagagaacttttatcttccttcctgtcacattctgtaaagttgattatgacttctgccagacttagagcaacaactttagttcattttaacatttttttttaatgaagagcatcaaagaatggagtagtccttatttaaactgtaatggtgtcaagtctcactgtgtgcacactctcacacatacacacacaattatactaattctagaaaggaaccaaaggtaaataaccagtgtttccattatcactaaatggaaaaattgactggaagttagagttgtgccaattaatcattttgttcatcaactgttctggtaacttatttttttttattggaatcttaaattggaacaactgttacagaatgtatattgctccagttctaaagccagttaaccctgtgccctctaacttatgaaccttcatttcaaaacagtatgtgggaagtcctgtagtttgataagagtaaaattattttaaagaggataatttaccattttactactataaaataagttgatatcagttgaccattttattttttgatggactctttttgttgggagaaagaaatgaatggaagaaaaaaatatgttgcttttatttgaatattgattactaacaacttataaactacattgcaggaaatgaagaaatattttgaaattagcaaaatagcaacagtattcaagtatctgaaattttaatatggtgagtcttagagctttagactttcctataagtgacagtatctaagttattcttaatagtcacacttgataattctgctgaccataagcagctaacctacagttgaagatatttatgtgacatgaatagcctgtgttttaaaaattaaatattttatataaaattgaa

SEQ ID NO: 123664 - DNA, 5066 bp, Homo sapiens
  Payload ID: 4274
  Gene Symbol: CDK13
  Gene Name: cyclin-dependent kinase 13
  Uniprot ID: Q14004
  ENST ID: ENST00000340829
  CDS Start-End: 133-4491
ggcgcttttcccggccggctctggtgctcggtgtccctccgccgccgctcccgtttccggcgggggagatggccaggatctgacccgggaggaggccgcacccgcgccgcgctctgcggctggctctaggcgatgccgagcagctcggacacggcgctggggggaggcgggggcctgagctgggcggagaagaagttggaggaacgccgcaagcggaggcgattcctgtcccctcagcagccgccgctgctgttgccgctcctgcagccgcagctcctgcaaccgccgccgcccccgccgcctctgctcttcctggctgctcccggcacggccgccgccgcagccgccgccgccgcggcctcctcctcttgcttcagcccgggcccccctctggaggtcaagcggctggcgagaggcaagaggcgcgcaggagggcggcagaagcggcgtcgcgggccccgcgccgggcaggaggcggagaagcgtcgggtcttctcgctgccccagccgcagcaggacggcggtggcggtgctagtagcggcgggggtgtgaccccgctggtggaatacgaggatgtgagctcccagtccgagcaggggctgctgctggggggggccagcgcggcaacggcggcgacggctgccgggggaacggggggcagcggcgggagtccggcctcctcctccggcacccagcggcgcggggaggggtcggagcgcaggccccgccgggaccgccgcagcagcagtggccgcagcaaggagcgccaccgcgagcaccggcggcgggatgggcagcgcggtggcagcgaggcctccaagtcccgcagccgccacagccacagcggcgaggaacgggccgaggtcgccaagagcggcagcagcagcagcagcggcggccgccggaaaagcgcttcggccacatccagcagcagtagcagccgcaaggaccgggactcgaaggcccaccgcagccggactaagtcgtccaaggagccgccttcggcctacaaggaaccgcccaaggcctaccgggaggacaagaccgagcctaaggcctacaggcggcggcggtccctcagcccactgggaggccgggacgacagcccggtgtcccacagggcctctcagagcctgaggagccgcaagtcccccagcccggcaggaggtggcagcagcccctattctcggcggctgccgcgctccccgagcccctacagtcgccgccgctcccccagctacagccgccacagctcctacgagcggggcggcgacgtgtcccctagtccctacagcagcagcagctggcgccgctctcgcagtccctacagccctgtgctcagacggtctggaaaatcccgaagcagaagcccgtattcatctaggcattcaagatctcgtagcaggcacagattgtctagatccagaagtcgtcattctagtatttctcctagcacactaactctgaagagtagcctggcagctgaattgaacaagaataaaaaagcacgagcagcagaggcagcaagagccgcagaagcagcgaaagctgcagaagcaactaaggctgctgaggctgctgccaaggctgcaaaagcttcaaacacttctacacctaccaaggggaacacggaaactagtgccagtgcatcacaaacaaaccatgtgaaggatgtgaagaaaattaaaattgaacatgcaccttctccctcaagtggtggaactttaaaaaatgacaaagcaaaaacaaagccacctcttcaggtaacgaaggtggaaaataatttgattgtagataaagccaccaagaaagcagtcatagttggaaaggagagtaaatctgctgctacaaaggaggaatcagtatctcttaaagagaaaaccaaaccacttacaccaagcataggagccaaggagaaggagcaacatgtagctttagtcacctctacattaccaccgttacctttgcctcccatgctgcctgaagataaagaagctgatagcttacgaggaaatatttcagtaaaagcagttaaaaaagaagtagaaaagaaactccgatgtcttcttgctgatttaccgctgccccctgagctaccaggaggagatgatctttcaaagagtccagaggaaaagaaaacagcaacacagttacatagtaaaaggaggcctaaaatatgtgggcctcgctatggtgaaaccaaagaaaaagatattgactggggaaaacgctgcgtggataaatttgatatcatcggaattattggagaaggtacttacggacaagtttacaaagccagggataaagacactggagaaatggtagccttaaaaaaagtacgtctggataatgaaaaggaaggctttccaattacagcaattcgagaaattaaaattctccggcagcttacccatcagagtattatcaatatgaaggaaatagtgactgataaagaagatgctttggatttcaagaaggacaaaggtgcattttatctggtgtttgaatatatggaccatgatctgatgggactactggaatcaggcttggttcattttaatgaaaatcacataaagtcatttatgagacagctcatggagggtctggattattgtcataagaagaactttttgcatagagatattaaatgttccaatatccttctaaataatagagggcagataaaacttgcagactttggacttgctcgattgtatagctcagaagaaagtcggccgtatactaacaaggtaattactttatggtaccgtccacctgaactgctactgggagaagaacgatacacaccagccattgatgtatggagctgtggctgtatccttggcgaactcttcactaaaaaacctatatttcaagcaaatcaggaacttgcacaactagaattaataagccgaatatgtgggagtccatgtcctgcagtgtggcctgatgtaatcaaactaccatatttcaacaccatgaaaccaaagaagcaatatcgtcgaaagttaagagaagaatttgtttttattcctgcagctgcgctagacttatttgattacatgcttgccttggatcctagtaagcgctgcactgctgaacaggctcttcagtgcgagttcctccgagatgtggaaccctcaaaaatgcctccaccagatctccctttatggcaagattgtcatgagttatggagtaaaaagcgaagaagacagaagcagatgggcatgactgatgatgtttccacaattaaagcccccaggaaggacttgtctctgggcttggatgacagcagaaccaacacaccccagggtgtgctgccatcttcacagctgaaatctcagggcagctcaaatgtggcacctggtgaaaaacagacagatccatcaacaccacaacaggagtcttcgaaaccgttgggaggaattcagccttcttctcagaccatccagcctaaagtggagactgatgctgcccaggcggctgtgcagagtgcatttgcagttctgttgactcagttaataaaggctcagcagtcaaagcagaaagatgtgctactagaagagagggaaaatggatcgggacatgaagcgtcattacaactcaggccacctccagaacctagcactccggtgtcgggacaagatgacctcatccagcatcaagatatgaggatcttggagctaacgccagaaccagaccggcctcgaattctgcctcctgaccaacgacctcccgagcctcctgaaccaccaccagtcactgaggaagatctagattatcggacagaaaaccagcatgtacccaccaccagttcttcattaactgaccctcatgccggagtgaaggcagccctgttacagctgcttgctcagcatcagccccaggatgaccccaaaagagaaggtgggattgattatcaagcaggagacacttacgtgtccacttcagactacaaggacaactttggatcctcttctttctcttctgctccttatgttagcaatgatggtctaggaagcagttctgctccaccactagaacgacgtagtttcattggaaattcagatattcagtctttggataactacagtactgcttcatctcattctggtggtccacctcagccttctgccttttctgagtcatttcccagttcagtagctggatatggagacatttacctcaatgctggtcccatgttgtttagtggagacaaggaccatagatttgaatatagccatggtcctattgcagtcctggcaaacagcagtgacccttccacggggccagagagtactcatcctttgccagcaaagatgcacaactataactatggtggtaacttacaggaaaatccgagtggccccagcctcatgcatggacagacctggacttctcctgcccaaggacctggatattcacaaggatacaggggacatattagcacatcaactggcagaggcagaggcagagggttaccatactgagtatctgtttttcctcaggcacatcatttttatctggaaagacttttctagctgcaatttaaggcagcaatccaagagacttgaataataataattcaacaacagctttatttttatgtggagaagggtcttgcatacaatagtttaaaaaagacaaaaaaaacctttgcttaaattcatgctgttctaaaaactagatcgattgtacatcttcacaaattctagttaacaattttattttgtattcttgcagttttaagtggatgctaattttaggggcataagccttttatggccctcttgcagatcttctgaactatgcacatttgtgctttttttgtaagtttggaccaacttttatgtaacaaacagcccctccccacctccagttttacaacaatcagaaagggcactgatttatttggtatttttctttttacaaagctacctttagtcaaaggtcactgtcagtctttgcacctgctttcagtgttattgtgaaaggtgtactttgtgctcatttcagaaaataaaacacaacctttctcttgatgcaacagttttataaaaaaaaa

SEQ ID NO: 123665 - DNA, 3099 bp, Homo sapiens
  Payload ID: 4274
  Gene Symbol: CDK13
  Gene Name: cyclin-dependent kinase 13
  ENST ID: ENST00000613626
  CDS Start-End: 2125-3099
gcatctggtgttttcgctgccgaggataggacgacgagcgcaatcgggagctccgccgcccggattcctgcttccctggggcccggaggctgctgcgtaccccactgtgacctggaacccagggacccgagtcccgacccggattatcgtggcgcttttcccggccggctctggtgctcggtgtccctccgccgccgctcccgtttccggcgggggagatggccaggatctgacccgggaggaggccgcacccgcgccgcgctctgcggctggctctaggcgatgccgagcagctcggacacggcgctggggggaggcgggggcctgagctgggcggagaagaagttggaggaacgccgcaagcggaggcgattcctgtcccctcagcagccgccgctgctgttgccgctcctgcagccgcagctcctgcaaccgccgccgcccccgccgcctctgctcttcctggctgctcccggcacggccgccgccgcagccgccgccgccgcggcctcctcctcttgcttcagcccgggcccccctctggaggtcaagcggctggcgagaggcaagaggcgcgcaggagggcggcagaagcggcgtcgcgggccccgcgccgggcaggaggcggagaagcgtcgggtcttctcgctgccccagccgcagcaggacggcggtggcggtgctagtagcggcgggggtgtgaccccgctggtggaatacgaggatgtgagctcccagtccgagcaggggctgctgctggggggggccagcgcggcaacggcggcgacggctgccgggggaacggggggcagcggcgggagtccggcctcctcctccggcacccagcggcgcggggaggggtcggagcgcaggccccgccgggaccgccgcagcagcagtggccgcagcaaggagcgccaccgcgagcaccggcggcgggatgggcagcgcggtggcagcgaggcctccaagtcccgcagccgccacagccacagcggcgaggaacgggccgaggtcgccaagagcggcagcagcagcagcagcggcggccgccggaaaagcgcttcggccacatccagcagcagtagcagccgcaaggaccgggactcgaaggcccaccgcagccggactaagtcgtccaaggagccgccttcggcctacaaggaaccgcccaaggcctaccgggaggacaagaccgagcctaaggcctacaggcggcggcggtccctcagcccactgggaggccgggacgacagcccggtgtcccacagggcctctcagagcctgaggagccgcaagtcccccagcccggcaggaggtggcagcagcccctattctcggcggctgccgcgctccccgagcccctacagtcgccgccgctcccccagctacagccgccacagctcctacgagcggggcggcgacgtgtcccctagtccctacagcagcagcagctggcgccgctctcgcagtccctacagccctgtgctcagacggtctggaaaatcccgaagcagaagcccgtattcatctaggcattcaagatctcgtagcaggcacagattgtctagatccagaagtcgtcattctagtatttctcctagcacactaactctgaagagtagcctggcagctgaattgaacaagaataaaaaagcacgagcagcagaggcagcaagagccgcagaagcagcgaaagctgcagaagcaactaaggctgctgaggctgctgccaaggctgcaaaagcttcaaacacttctacacctaccaaggggaacacggaaactagtgccagtgcatcacaaacaaaccatgtgaaggatgtgaagaaaattaaaattgaacatgcaccttctccctcaagtggtggaactttaaaaaatgacaaagcaaaaacaaagccacctcttcaggtaacgaaggtggaaaataatttgattgtagataaagccaccaagaaagcagtcatagttggaaaggagagtaaatctgctgctacaaaggaggaatcagtatctcttaaagagaaaaccaaaccacttacaccaagcataggagccaaggagaaggagcaacatgtagctttagtcacctctacattaccaccgttacctttgcctcccatgctgcctgaagataaagaagctgatagcttacgaggaaatatttcagtaaaagcagttaaaaaagaagtagaaaagaaactccgatgtcttcttgctgatttaccgctgccccctgagctaccaggaggagatgatctttcaaagagtccagaggaaaagaaaacagcaacacagttacatagtaaaaggaggcctaaaatatgtgggcctcgctatggtgaaaccaaagaaaaagatattgactggggaaaacgctgcgtggataaatttgatatcatcggaattattggagaaggtacttacggacaagtttacaaagccagggataaagacactggagaaatggtagccttaaaaaaagtacgtctggataatgaaaaggaaggctttccaattacagcaattcgagaaattaaaattctccggcagcttacccatcagagtattatcaatatgaaggaaatagtgactgataaagaagatgctttggatttcaagaaggacaaaggtgcattttatctggtgtttgaatatatggaccatgatctgatgggactactggaatcaggcttggttcattttaatgaaaatcacataaagtcatttatgagacagctcatggagggtctggattattgtcataagaagaactttttgcatagagatattaaatgttccaatatccttctaaataatagagggcagataaaacttgcagactttggacttgctcgattgtatagctcagaagaaagtcggccgtatactaacaaggtaattactttatggtaccgtccacctgaactgctactgggagaagaacgatacacaccagccattgatgtatggagctgtggctgtatccttggcgaactcttcactaaaaaacctatatttcaagcaaatcaggaacttgcacaactagaattaataagacatgaagaaaatgaagtttctgataaacaaatctga

SEQ ID NO: 123666 - DNA, 2222 bp, Homo sapiens
  Payload ID: 4274
  Gene Symbol: CDK13
  Gene Name: cyclin-dependent kinase 13
  ENST ID: ENST00000611390
  CDS Start-End: 772-2028
tccccgagcccctacagtcgccgccgctcccccagctacagccgccacagctcctacgagcggggcggcgacgtgtcccctagtccctacagcagcagcagctggcgccgctctcgcagtccctacagccctgtgctcagacggtctggaaaatcccgaagcagaagcccgtattcatctaggcattcaagatctcgtagcaggcacagattgtctagatccagaagtcgtcattctagtatttctcctagcacactaactctgaagagtagcctggcagctgaattgaacaagaataaaaaagcacgagcagcagaggcagcaagagccgcagaagcagcgaaagctgcagaagcaactaaggctgctgaggctgctgccaaggctgcaaaagcttcaaacacttctacacctaccaaggggaacacggaaactagtgccagtgcatcacaaacaaaccatgtgaaggatgtgaagaaaattaaaattgaacatgcaccttctccctcaagtggtggaactttaaaaaatgacaaagcaaaaacaaagccacctcttcaggtaacgaaggtggaaaataatttgattgtagataaagccaccaagaaagcagtcatagttggaaaggagagtaaatctgctgctacaaaggaggaatcagtatctcttaaagagaaaaccaaaccacttacaccaagcataggagccaaggagaaggagcaacatgtagctttagtcacctctacattaccaccgttacctttgcctcccatgctgcctgaagataaagaagctgatagcttacgaggaaatatttcagtaaaagcagttaaaaaagaagtagaaaagaaactccgatgtcttcttgctgatttaccgctgccccctgagctaccaggaggagatgatctttcaaagagtccagaggaaaagaaaacagcaacacagttacatagtaaaaggaggcctaaaatatgtgggcctcgctatggtgaaaccaaagaaaaagatattgactggggaaaacgctgcgtggataaatttgatatcatcggaattattggagaaggtacttacggacaagtttacaaagccagggataaagacactggagaaatggtagccttaaaaaaagtacgtctggataatgaaaaggaaggctttccaattacagcaattcgagaaattaaaattctccggcagcttacccatcagagtattatcaatatgaaggaaatagtgactgataaagaagatgctttggatttcaagaaggacaaaggtgcattttatctggtgtttgaatatatggaccatgatctgatgggactactggaatcaggcttggttcattttaatgaaaatcacataaagtcatttatgagacagctcatggagggtctggattattgtcataagaagaactttttgcatagagatattaaatgttccaatatccttctaaataatagagggcagataaaacttgcagactttggacttgctcgattgtatagctcagaagaaagtcggccgtatactaacaaggtaattactttatggtaccgtccacctgaactgctactgggagaagaacgatacacaccagccattgatgtatggagctgtggctgtatccttggcgaactcttcactaaaaaacctatatttcaagcaaatcaggaacttgcacaactagaattaataagccgaatatgtgggagtccatgtcctgcagtgtggcctgatgtaatcaaactaccatatttcaacaccatgaaaccaaagaagcaatatcgtcgaaagttaagagaagaatttgtttttattcctgcagctgcgctagacttatttgattacatgcttgccttggatcctagtaagcgctgcactgctgaacaggctcttcagtgcgagttcctccgagatgtggaaccctcaaaatgcctccaccagatctccctttatggcaagattgtcatgagttatggagtaaaaagcgaagaagacagaagcagatgggcatgactgatgatgtttccacaattaaagcccccaggaaggacttgtctctgggcttggatgacagcagaaccaacacaccccagggtgtgctgccatcttcacagctgaaatctcagggcagctcaaatgtggcacctggtgaaaaacagacagatccatcaacaccacaacaggagtcttcgaaaccgttgggagga

SEQ ID NO: 123667 - DNA, 4953 bp, Homo sapiens
  Payload ID: 4275
  Gene Symbol: CDK14
  Gene Name: cyclin-dependent kinase 14
  Uniprot ID: O94921
  ENST ID: ENST00000265741
  CDS Start-End: 145-1500
gcatccccttgattaaatgtttttcctcctatgcaatcaccattagctgtttggctcccattctgtattcttctgaagcagccctgcattgcaaatcaatatctttctgaaaagacagtgtgttgtgaattgccttgacagcatatgcacggttactttggctgcaatgctgctgcagagcccggttactctgccttcgtgggaactccacagatatgtgtcacaaagatgtctacacggaactgccagggaatggactcagtgatcaaacccctggacacaattcctgaggataaaaaagtcagagttcagaggacacagagcacttttgacccatttgagaaaccagctaatcaagtaaagagggtgcattctgagaacaatgcttgcattaactttaagacctcctccactggcaaagagtcacctaaagttaggcggcactccagccccagctcgccaacaagtcccaaatttggaaaagctgactcatatgaaaagctggaaaaactaggggaaggatcttatgctacagtatacaaagggaaaagcaaggtaaatgggaagttggtagctctgaaggtgatcaggctgcaggaagaagaagggacacctttcacagctatcagggaagcttctcttttaaaaggactaaaacatgctaacatagtgctacttcatgacatcatccataccaaggagacgctgacacttgtgtttgaatatgtgcacactgatttatgtcagtacatggacaagcaccctggggggctgcatccagataatgtgaagttgtttttatttcagttgctgcgaggtctgtcttacatccaccagcgttatattttgcacagagacctgaaaccacagaaccttctgatcagtgacacgggggagttaaagctggcagatttcggtcttgcaagagcaaaatccgtccctagccacacatactccaacgaagtggttaccttgtggtacagacctccagatgtccttctaggctcaacagaatattccacctgccttgacatgtggggagtaggttgcatctttgttgaaatgatccaaggagttgctgcttttccaggaatgaaagacattcaggatcaacttgaacgaatatttctggttcttggaacaccaaatgaggacacatggcctggagttcattctttaccacattttaagccagaacgctttaccctgtacagctctaaaaaccttagacaagcatggaataagctcagctatgtgaaccatgcagaggacctggcctccaagctcctacaatgttccccaaagaacagactgtcggcacaggctgccttgagccacgagtattttagtgacctgccgccacggctatgggaactcaccgacatgtcttctatttttactgtcccaaatgtgagattgcaaccagaagctggagaaagcatgcgggcctttgggaaaaacaatagttatggcaaaagtctatcaaacagcaagcactgacaagcagcacattctcaagagcacacaggattaagttgtcatcattctgggaagaaaaaaaaaacattaatgaagaggccaataatatgaagggaatcatggatcagttttctttcgctccctgtggtggatttcacttacaagaaaattgaagctggcaagaccctgttttctctgcaatttatttaaaaccttgcacgcatttggataccttgtgatttccaagaactacgtgaagattaagctttgcttactgatacatggcatgtattcttttcagtcttttgtgtttgattttgtttgatttccctctgcagcacagcgtctctgtaaaggtttttatgctttcaccagccatgtcttaaatacattaagacaacacatttggtgttcacacttcttcagtaatgtctgaacttgaaagccacagagtggcataaaacaatgtgtgttttctttgagagcagtgcacattttgcaaccactaggaaggaaattttctgctaaagcaaacccctgttctctgacttgacaacttggccccggactgtggggccccacctgttgcttaccttttgaggtaattttgcaaatgtggtttttttacttggaaataactgcacatttatatataggatattggactctgcttagcattttcaagccacatagcatgactgttttttgaataggttggaattgaaaaaacaattatcaaacgttaagaacaaagacagggataaattgcttacatttcaacctctggagattgaggtaactttttgtgtctgggtcttgtcaacatctaatttttttccatccattctgttacactttgtattttctaactggagaaaagagtgaggaacagaatgttttaaatctggtgcaaaagaactatatctgctggatgagccttgaaagcagtcttggcctgttagggcttacaaagtaaattacaaagtgatccagttcaaagtttgcttagttacaacaaagcacctttaaaaaaaatacattttaaaaaaacattccaagccaattggaagacatcattgggttcttactttaagacatctcctggaataactgttcaaatgcaggttttagaaacaatgcaggaatcttgctttaaagatgaaaaagggaatgggccagcttcccttactcaaggagttgagggaccttggaggatgaaggcgagtatgtgacactggagaaaagtggaccaggcatgtcttttgctttgatctggagggagggctgcctgatgcaggccggctcccagtggggcaggcctcgctgcagaatgcccagtagtactgcggccaaggggacagttaggagacttcatctaaagcatgaaacctagctcctctacacacaaattcctatggaaatacctttgtgtacagtgtcttacattttcctattagtcagaaagaaggagagaatgagtgagtgcttgaaatgtgtcatactgttttaggatcaagactaggaattaggagccaggttgacaaggactttttctgagagttgggtgagggtaaagcttttctataatcaagctcaatacaccaaggaaactggatccagaattcctaaactttaaaatggtactgtctgcggagtggagtatggatggttatgtcaaagtcatagttcatcctatccagatgtagcattcatggtaaacttttaagtgctaagcaaggaattatttactgattggttttaaagagagcagaaaacacccaagtgtagaatgtctactgtttgctacctagaaatcttttccattcctctttcatacattccaacccactggaagtctttagaggtattttgatttaaagtatacttaaattaggatttcttaaagaaaacatagggagaaaactttacatgcaattaaaaatggactttcctgtgatttgtttttaatcattcatttggagaagaggcatgacctttgtatttcactaagtttaaagcaagagcaactgatgattaaatgttgctttttaataaggtttttaacttgaaaatttgaaaatatttaatgttgaaagacttcaattagggctattagagttatatctccctgtcgtaggcagcttcttcggagaagtgaaatataacattactcagtggacggagaaatctgttttgttacagagacatgcctctcagaaggtcaggaggttttgagtacctatccttgccacccatacaggaaatccaaagtttggtgtctctctctctctgtctctttctttctctttctccccccaaacccctctcactccctccctccctctctccttcccctatttgcaatcatattctccctctgcttcttttctcttctgccctccttgtgggcagtcatgaaaatcaattcagactgtgttgattagcagatttattattctattgagaaagcactggaatgttttgtgagattatttttatatgaaggaatagcctgaactcaaacagatggtaagaatagtacaaacaccttagcacatcactgcacacacagtattctgaaaggagatttgacacttaattcccattttcttaaaataacagttttgttgacttaaaaatatgagatacataggatgtgaaaaaaaatgtttgcagtactcagcaaaaaatagggtacataaagcagggtggctgtccatccactgattctggggtgagaagcgatttctacctcgcaagagtgactagaaagtttctaggagcacctccaggcttgcaaagaaagtgaggcctcttggtatcctttcctcagtgtgtatatgacagccagtataatcaataccctaggttatgcgtctatatgatactcatctgtgaatattattggttttgtaatctttgttatataagaggatgtttaggctgtatatactggggtagattattgcctgccccttatacataggaatatgctgcataattgcgcataacttccatctcccttactggcttgtaggcagaggaaactgtatatgttactgccttgtacttttctcatacaccaaaaacacaccaaaaaaatcaataaaataagcaatcttctattctcattccttttcccacagcagcatattttagaggcacatacaaaacctacattctctagttgggagtggatttttaaagttttccttttatcttttatttttttttgtatgatgcactgagatgtgtactttctaacaggggattggtacctaagaaatgtggtagcattattcagaaaactattatactttcaaatgacacatagtaaggagaatggaataatacatgttgcatatttgttaccagttgtaatttgtctgtattatgaaagatgtaatggtttgtcagctgtcactgttgttttcttgtaacatgatatggaataaagtatagcagaatctccgt

SEQ ID NO: 123668 - DNA, 4995 bp, Homo sapiens
  Payload ID: 4275
  Gene Symbol: CDK14
  Gene Name: cyclin-dependent kinase 14
  Uniprot ID: O94921
  ENST ID: ENST00000380050
  CDS Start-End: 132-1541
cgtcgcttcccggcccgccgaggaggtggtggaggaggaggcgccgctttccccgcggcgcgcgccctcgccgttgtctgagctgtgcctggaccagtttggggaagttgtcggggctccgcgtcgcccagatgtgtgacctcattgagccgcagccggccgagaagatcggcaagatgaagaagttgcggagaactttgtcggagagtttcagtcgcattgctttgaagaaagatgacaccacctttgatgagatatgtgtcacaaagatgtctacacggaactgccagggaatggactcagtgatcaaacccctggacacaattcctgaggataaaaaagtcagagttcagaggacacagagcacttttgacccatttgagaaaccagctaatcaagtaaagagggtgcattctgagaacaatgcttgcattaactttaagacctcctccactggcaaagagtcacctaaagttaggcggcactccagccccagctcgccaacaagtcccaaatttggaaaagctgactcatatgaaaagctggaaaaactaggggaaggatcttatgctacagtatacaaagggaaaagcaaggtaaatgggaagttggtagctctgaaggtgatcaggctgcaggaagaagaagggacacctttcacagctatcagggaagcttctcttttaaaaggactaaaacatgctaacatagtgctacttcatgacatcatccataccaaggagacgctgacacttgtgtttgaatatgtgcacactgatttatgtcagtacatggacaagcaccctggggggctgcatccagataatgtgaagttgtttttatttcagttgctgcgaggtctgtcttacatccaccagcgttatattttgcacagagacctgaaaccacagaaccttctgatcagtgacacgggggagttaaagctggcagatttcggtcttgcaagagcaaaatccgtccctagccacacatactccaacgaagtggttaccttgtggtacagacctccagatgtccttctaggctcaacagaatattccacctgccttgacatgtggggagtaggttgcatctttgttgaaatgatccaaggagttgctgcttttccaggaatgaaagacattcaggatcaacttgaacgaatatttctggttcttggaacaccaaatgaggacacatggcctggagttcattctttaccacattttaagccagaacgctttaccctgtacagctctaaaaaccttagacaagcatggaataagctcagctatgtgaaccatgcagaggacctggcctccaagctcctacaatgttccccaaagaacagactgtcggcacaggctgccttgagccacgagtattttagtgacctgccgccacggctatgggaactcaccgacatgtcttctatttttactgtcccaaatgtgagattgcaaccagaagctggagaaagcatgcgggcctttgggaaaaacaatagttatggcaaaagtctatcaaacagcaagcactgacaagcagcacattctcaagagcacacaggattaagttgtcatcattctgggaagaaaaaaaaaacattaatgaagaggccaataatatgaagggaatcatggatcagttttctttcgctccctgtggtggatttcacttacaagaaaattgaagctggcaagaccctgttttctctgcaatttatttaaaaccttgcacgcatttggataccttgtgatttccaagaactacgtgaagattaagctttgcttactgatacatggcatgtattcttttcagtcttttgtgtttgattttgtttgatttccctctgcagcacagcgtctctgtaaaggtttttatgctttcaccagccatgtcttaaatacattaagacaacacatttggtgttcacacttcttcagtaatgtctgaacttgaaagccacagagtggcataaaacaatgtgtgttttctttgagagcagtgcacattttgcaaccactaggaaggaaattttctgctaaagcaaacccctgttctctgacttgacaacttggccccggactgtggggccccacctgttgcttaccttttgaggtaattttgcaaatgtggtttttttacttggaaataactgcacatttatatataggatattggactctgcttagcattttcaagccacatagcatgactgttttttgaataggttggaattgaaaaaacaattatcaaacgttaagaacaaagacagggataaattgcttacatttcaacctctggagattgaggtaactttttgtgtctgggtcttgtcaacatctaatttttttccatccattctgttacactttgtattttctaactggagaaaagagtgaggaacagaatgttttaaatctggtgcaaaagaactatatctgctggatgagccttgaaagcagtcttggcctgttagggcttacaaagtaaattacaaagtgatccagttcaaagtttgcttagttacaacaaagcacctttaaaaaaaatacattttaaaaaaacattccaagccaattggaagacatcattgggttcttactttaagacatctcctggaataactgttcaaatgcaggttttagaaacaatgcaggaatcttgctttaaagatgaaaaagggaatgggccagcttcccttactcaaggagttgagggaccttggaggatgaaggcgagtatgtgacactggagaaaagtggaccaggcatgtcttttgctttgatctggagggagggctgcctgatgcaggccggctcccagtggggcaggcctcgctgcagaatgcccagtagtactgcggccaaggggacagttaggagacttcatctaaagcatgaaacctagctcctctacacacaaattcctatggaaatacctttgtgtacagtgtcttacattttcctattagtcagaaagaaggagagaatgagtgagtgcttgaaatgtgtcatactgttttaggatcaagactaggaattaggagccaggttgacaaggactttttctgagagttgggtgagggtaaagcttttctataatcaagctcaatacaccaaggaaactggatccagaattcctaaactttaaaatggtactgtctgcggagtggagtatggatggttatgtcaaagtcatagttcatcctatccagatgtagcattcatggtaaacttttaagtgctaagcaaggaattatttactgattggttttaaagagagcagaaaacacccaagtgtagaatgtctactgtttgctacctagaaatcttttccattcctctttcatacattccaacccactggaagtctttagaggtattttgatttaaagtatacttaaattaggatttcttaaagaaaacatagggagaaaactttacatgcaattaaaaatggactttcctgtgatttgtttttaatcattcatttggagaagaggcatgacctttgtatttcactaagtttaaagcaagagcaactgatgattaaatgttgctttttaataaggtttttaacttgaaaatttgaaaatatttaatgttgaaagacttcaattagggctattagagttatatctccctgtcgtaggcagcttcttcggagaagtgaaatataacattactcagtggacggagaaatctgttttgttacagagacatgcctctcagaaggtcaggaggttttgagtacctatccttgccacccatacaggaaatccaaagtttggtgtctctctctctctgtctctttctttctctttctccccccaaacccctctcactccctccctccctctctccttcccctatttgcaatcatattctccctctgcttcttttctcttctgccctccttgtgggcagtcatgaaaatcaattcagactgtgttgattagcagatttattattctattgagaaagcactggaatgttttgtgagattatttttatatgaaggaatagcctgaactcaaacagatggtaagaatagtacaaacaccttagcacatcactgcacacacagtattctgaaaggagatttgacacttaattcccattttcttaaaataacagttttgttgacttaaaaatatgagatacataggatgtgaaaaaaaatgtttgcagtactcagcaaaaaatagggtacataaagcagggtggctgtccatccactgattctggggtgagaagcgatttctacctcgcaagagtgactagaaagtttctaggagcacctccaggcttgcaaagaaagtgaggcctcttggtatcctttcctcagtgtgtatatgacagccagtataatcaataccctaggttatgcgtctatatgatactcatctgtgaatattattggttttgtaatctttgttatataagaggatgtttaggctgtatatactggggtagattattgcctgccccttatacataggaatatgctgcataattgcgcataacttccatctcccttactggcttgtaggcagaggaaactgtatatgttactgccttgtacttttctcatacaccaaaaacacaccaaaaaaatcaataaaataagcaatcttctattctcattccttttcccacagcagcatattttagaggcacatacaaaacctacattctctagttgggagtggatttttaaagttttccttttatcttttatttttttttgtatgatgcactgagatgtgtactttctaacaggggattggtacctaagaaatgtggtagcattattcagaaaactattatactttcaaatgacacatagtaaggagaatggaataatacatgttgcatatttgttaccagttgtaatttgtctgtattatgaaagatgtaatggtttgtcagctgtcactgttgttttcttgtaacatgatatggaataaagtatagcagaatctccgta

SEQ ID NO: 123669 - DNA, 5163 bp, Homo sapiens
  Payload ID: 4275
  Gene Symbol: CDK14
  Gene Name: cyclin-dependent kinase 14
  Uniprot ID: O94921
  ENST ID: ENST00000406263
  CDS Start-End: 443-1714
cttgacagcatatgcacggttactttggctgcaatgctgctgcagagcccggttactctgccttcgtgggaactccacaggcaagtccatcgtgtttggaaaaaaaaattagattttttggagaaaataattgagctgttaaagctattgatactgaatgttagcatgtcctttgagttcttctcaacagtttttggtcttattccactgagattagcttctcttaggggatttctgggcttttttttttttgcttgcttatgcatccccctctcttggttgtagtacggccgtaccatttcagcttgctagtgcagaaagatgtgaattcagttgctgtatgagcctggcctggtgcaaacacattgctagagacatgttaaagagttccaggtgaatcaagcctgagggagacaacagcaaaacgatatgtgtcacaaagatgtctacacggaactgccagggaatggactcagtgatcaaacccctggacacaattcctgaggataaaaaagtcagagttcagaggacacagagcacttttgacccatttgagaaaccagctaatcaagtaaagagggtgcattctgagaacaatgcttgcattaactttaagacctcctccactggcaaagagtcacctaaagttaggcggcactccagccccagctcgccaacaagtcccaaatttggaaaagctgactcatatgaaaagctggaaaaactaggggaaggatcttatgctacagtatacaaagggaaaagcaaggtaaatgggaagttggtagctctgaaggtgatcaggctgcaggaagaagaagggacacctttcacagctatcagggaagcttctcttttaaaaggactaaaacatgctaacatagtgctacttcatgacatcatccataccaaggagacgctgacacttgtgtttgaatatgtgcacactgatttatgtcagtacatggacaagcaccctggggggctgcatccagataatgtgaagttgtttttatttcagttgctgcgaggtctgtcttacatccaccagcgttatattttgcacagagacctgaaaccacagaaccttctgatcagtgacacgggggagttaaagctggcagatttcggtcttgcaagagcaaaatccgtccctagccacacatactccaacgaagtggttaccttgtggtacagacctccagatgtccttctaggctcaacagaatattccacctgccttgacatgtggggagtaggttgcatctttgttgaaatgatccaaggagttgctgcttttccaggaatgaaagacattcaggatcaacttgaacgaatatttctggttcttggaacaccaaatgaggacacatggcctggagttcattctttaccacattttaagccagaacgctttaccctgtacagctctaaaaaccttagacaagcatggaataagctcagctatgtgaaccatgcagaggacctggcctccaagctcctacaatgttccccaaagaacagactgtcggcacaggctgccttgagccacgagtattttagtgacctgccgccacggctatgggaactcaccgacatgtcttctatttttactgtcccaaatgtgagattgcaaccagaagctggagaaagcatgcgggcctttgggaaaaacaatagttatggcaaaagtctatcaaacagcaagcactgacaagcagcacattctcaagagcacacaggattaagttgtcatcattctgggaagaaaaaaaaaacattaatgaagaggccaataatatgaagggaatcatggatcagttttctttcgctccctgtggtggatttcacttacaagaaaattgaagctggcaagaccctgttttctctgcaatttatttaaaaccttgcacgcatttggataccttgtgatttccaagaactacgtgaagattaagctttgcttactgatacatggcatgtattcttttcagtcttttgtgtttgattttgtttgatttccctctgcagcacagcgtctctgtaaaggtttttatgctttcaccagccatgtcttaaatacattaagacaacacatttggtgttcacacttcttcagtaatgtctgaacttgaaagccacagagtggcataaaacaatgtgtgttttctttgagagcagtgcacattttgcaaccactaggaaggaaattttctgctaaagcaaacccctgttctctgacttgacaacttggccccggactgtggggccccacctgttgcttaccttttgaggtaattttgcaaatgtggtttttttacttggaaataactgcacatttatatataggatattggactctgcttagcattttcaagccacatagcatgactgttttttgaataggttggaattgaaaaaacaattatcaaacgttaagaacaaagacagggataaattgcttacatttcaacctctggagattgaggtaactttttgtgtctgggtcttgtcaacatctaatttttttccatccattctgttacactttgtattttctaactggagaaaagagtgaggaacagaatgttttaaatctggtgcaaaagaactatatctgctggatgagccttgaaagcagtcttggcctgttagggcttacaaagtaaattacaaagtgatccagttcaaagtttgcttagttacaacaaagcacctttaaaaaaaatacattttaaaaaaacattccaagccaattggaagacatcattgggttcttactttaagacatctcctggaataactgttcaaatgcaggttttagaaacaatgcaggaatcttgctttaaagatgaaaaagggaatgggccagcttcccttactcaaggagttgagggaccttggaggatgaaggcgagtatgtgacactggagaaaagtggaccaggcatgtcttttgctttgatctggagggagggctgcctgatgcaggccggctcccagtggggcaggcctcgctgcagaatgcccagtagtactgcggccaaggggacagttaggagacttcatctaaagcatgaaacctagctcctctacacacaaattcctatggaaatacctttgtgtacagtgtcttacattttcctattagtcagaaagaaggagagaatgagtgagtgcttgaaatgtgtcatactgttttaggatcaagactaggaattaggagccaggttgacaaggactttttctgagagttgggtgagggtaaagcttttctataatcaagctcaatacaccaaggaaactggatccagaattcctaaactttaaaatggtactgtctgcggagtggagtatggatggttatgtcaaagtcatagttcatcctatccagatgtagcattcatggtaaacttttaagtgctaagcaaggaattatttactgattggttttaaagagagcagaaaacacccaagtgtagaatgtctactgtttgctacctagaaatcttttccattcctctttcatacattccaacccactggaagtctttagaggtattttgatttaaagtatacttaaattaggatttcttaaagaaaacatagggagaaaactttacatgcaattaaaaatggactttcctgtgatttgtttttaatcattcatttggagaagaggcatgacctttgtatttcactaagtttaaagcaagagcaactgatgattaaatgttgctttttaataaggtttttaacttgaaaatttgaaaatatttaatgttgaaagacttcaattagggctattagagttatatctccctgtcgtaggcagcttcttcggagaagtgaaatataacattactcagtggacggagaaatctgttttgttacagagacatgcctctcagaaggtcaggaggttttgagtacctatccttgccacccatacaggaaatccaaagtttggtgtctctctctctctgtctctttctttctctttctccccccaaacccctctcactccctccctccctctctccttcccctatttgcaatcatattctccctctgcttcttttctcttctgccctccttgtgggcagtcatgaaaatcaattcagactgtgttgattagcagatttattattctattgagaaagcactggaatgttttgtgagattatttttatatgaaggaatagcctgaactcaaacagatggtaagaatagtacaaacaccttagcacatcactgcacacacagtattctgaaaggagatttgacacttaattcccattttcttaaaataacagttttgttgacttaaaaatatgagatacataggatgtgaaaaaaaatgtttgcagtactcagcaaaaaatagggtacataaagcagggtggctgtccatccactgattctggggtgagaagcgatttctacctcgcaagagtgactagaaagtttctaggagcacctccaggcttgcaaagaaagtgaggcctcttggtatcctttcctcagtgtgtatatgacagccagtataatcaataccctaggttatgcgtctatatgatactcatctgtgaatattattggttttgtaatctttgttatataagaggatgtttaggctgtatatactggggtagattattgcctgccccttatacataggaatatgctgcataattgcgcataacttccatctcccttactggcttgtaggcagaggaaactgtatatgttactgccttgtacttttctcatacaccaaaaacacaccaaaaaaatcaataaaataagcaatcttctattctcattccttttcccacagcagcatattttagaggcacatacaaaacctacattctctagttgggagtggatttttaaagttttccttttatcttttatttttttttgtatgatgcactgagatgtgtactttctaacaggggattggtacctaagaaatgtggtagcattattcagaaaactattatactttcaaatgacacatagtaaggagaatggaataatacatgttgcatatttgttaccagttgtaatttgtctgtattatgaaagatgtaatggtttgtcagctgtcactgttgttttcttgtaacatgatatggaataaagtatagcagaatct

SEQ ID NO: 123670 - DNA, 801 bp, Homo sapiens
  Payload ID: 4275
  Gene Symbol: CDK14
  Gene Name: cyclin-dependent kinase 14
  ENST ID: ENST00000431029
  CDS Start-End: 112-453
agttgctgtatgagcctggcctggtgcaaacacattgctagagacatgttaaagagttccaggtgaatcaagcctgagggagacaacagcaaaacgatatgtgtcacaaagatgtctacacggaactgccagggaatggactcagtgatcaaacccctggacacaattcctgaggataaaaaagtcagagttcagaggacacagagcacttttgacccatttgagaaaccagctaatcaagtaaagagggtgcattctgagaacaatgcttgcattaactttaagacctcctccactggcaaagagtcacctaaagttaggcggcactccagccccagctcgggtaaatgggaagttggtagctctgaaggtgatcaggctgcaggaagaagaagggacacctttcacagctatcagggaagcttctcttttaaaaggactaaaacatgctaacatagtgctacttcatgacatcatccataccaaggagacgctgacacttgtgtttgaatatgtgcacactgatttatgtcagtacatggacaagcaccctggggggctgcatccagataatgtgaagttgtttttatttcagttgctgcgaggtctgtcttacatccaccagcgttatattttgcacagagacctgaaaccacagaaccttctgatcagtgacacgggggagttaaagctggcagatttcggtcttgcaagagcaaaatccgtccctagccacacatactccaacgaagtggttaccttgtggtacagacctccagatgtccttctaggctcaacaga

SEQ ID NO: 123671 - DNA, 759 bp, Homo sapiens
  Payload ID: 4275
  Gene Symbol: CDK14
  Gene Name: cyclin-dependent kinase 14
  ENST ID: ENST00000449528
  CDS Start-End: 378-759
ccccgctgcaagttcttagattcctggaggatctgcagagtcaacattaggagtatccatccattcaccaaggccatcaggaatgtgctgaatgtgctgtaaagaagagttgtcaattgtgcacagaagataagaaatatatgatgaatagataattgaaaagagatcctccagaaagagcagaaggaagtttcttcaatgataccagtaacagcaattcaaagatgtgaatgggattaattcagggctgttgctcctgacagataagtcagtctacctgttgttgaatgacatgcagaaaagaaatttggtaagaagaaagtgatttgactttgaagaaagatgacaccacctttgatgagatatgtgtcacaaagatgtctacacggaactgccagggaatggactcagtgatcaaacccctggacacaattcctgaggataaaaaagtcagagttcagaggacacagagcacttttgacccatttgagaaaccagctaatcaagtaaagagggtgcattctgagaacaatgcttgcattaactttaagacctcctccactggcaaagagtcacctaaagttaggcggcactccagccccagctcgccaacaagtcccaaatttggaaaagctgactcatatgaaaagctggaaaaactaggggaaggatcttatgctacagtatacaaagggaaaagcaaggtaaatgggaagttggtagctctgaaggtgatcaggctgcaggaagaagaaggga

SEQ ID NO: 123672 - DNA, 565 bp, Homo sapiens
  Payload ID: 4275
  Gene Symbol: CDK14
  Gene Name: cyclin-dependent kinase 14
  ENST ID: ENST00000430760
  CDS Start-End: 184-565
ttcagggctgttgctcctgacagataagtcagtctacctgttgttgaatgacatgcagaaaagaaatttggtaagaagaaagtgatttgactttgaagaaagatgacaccacctttgatgagctttgatgattgccagaacaaagtgttggctctgcctggctctttgatatgtgtcacaaagatgtctacacggaactgccagggaatggactcagtgatcaaacccctggacacaattcctgaggataaaaaagtcagagttcagaggacacagagcacttttgacccatttgagaaaccagctaatcaagtaaagagggtgcattctgagaacaatgcttgcattaactttaagacctcctccactggcaaagagtcacctaaagttaggcggcactccagccccagctcgccaacaagtcccaaatttggaaaagctgactcatatgaaaagctggaaaaactaggggaaggatcttatgctacagtatacaaagggaaaagcaaggtaaatgggaagttggtagctctgaaggtgatcaggctgcaggaagaagaaggga

SEQ ID NO: 123673 - DNA, 4787 bp, Homo sapiens
  Payload ID: 4275
  Gene Symbol: CDK14
  Gene Name: cyclin-dependent kinase 14
  ENST ID: ENST00000436577
  CDS Start-End: 312-1334
tacggccgtaccatttcagcttgctagtgcagaaagatgtgaattcagttgctgtatgagcctggcctggtgcaaacacattgctagagacatgttaaagagttccaggtgaatcaagcctgagggagacaacagcaaaacgatatgtgtcacaaagatgtctacacggaactgccagggaatggactcagtgatcaaacccctggacacaattcctgaggataaaaaagtcagagttcagaggacacagagcacttttgacccatttgagaaaccagctaatcaagtaaagagggtgcattctgagaacaatgcttgcattaactttaagacctcctccactggcaaagagtcacctaaagttaggcggcactccagccccagctcgggtaaatgggaagttggtagctctgaaggtgatcaggctgcaggaagaagaagggacacctttcacagctatcagggaagcttctcttttaaaaggactaaaacatgctaacatagtgctacttcatgacatcatccataccaaggagacgctgacacttgtgtttgaatatgtgcacactgatttatgtcagtacatggacaagcaccctggggggctgcatccagataatgtgaagttgtttttatttcagttgctgcgaggtctgtcttacatccaccagcgttatattttgcacagagacctgaaaccacagaaccttctgatcagtgacacgggggagttaaagctggcagatttcggtcttgcaagagcaaaatccgtccctagccacacatactccaacgaagtggttaccttgtggtacagacctccagatgtccttctaggctcaacagaatattccacctgccttgacatgtggggagtaggttgcatctttgttgaaatgatccaaggagttgctgcttttccaggaatgaaagacattcaggatcaacttgaacgaatatttctggttcttggaacaccaaatgaggacacatggcctggagttcattctttaccacattttaagccagaacgctttaccctgtacagctctaaaaaccttagacaagcatggaataagctcagctatgtgaaccatgcagaggacctggcctccaagctcctacaatgttccccaaagaacagactgtcggcacaggctgccttgagccacgagtattttagtgacctgccgccacggctatgggaactcaccgacatgtcttctatttttactgtcccaaatgtgagattgcaaccagaagctggagaaagcatgcgggcctttgggaaaaacaatagttatggcaaaagtctatcaaacagcaagcactgacaagcagcacattctcaagagcacacaggattaagttgtcatcattctgggaagaaaaaaaaaacattaatgaagaggccaataatatgaagggaatcatggatcagttttctttcgctccctgtggtggatttcacttacaagaaaattgaagctggcaagaccctgttttctctgcaatttatttaaaaccttgcacgcatttggataccttgtgatttccaagaactacgtgaagattaagctttgcttactgatacatggcatgtattcttttcagtcttttgtgtttgattttgtttgatttccctctgcagcacagcgtctctgtaaaggtttttatgctttcaccagccatgtcttaaatacattaagacaacacatttggtgttcacacttcttcagtaatgtctgaacttgaaagccacagagtggcataaaacaatgtgtgttttctttgagagcagtgcacattttgcaaccactaggaaggaaattttctgctaaagcaaacccctgttctctgacttgacaacttggccccggactgtggggccccacctgttgcttaccttttgaggtaattttgcaaatgtggtttttttacttggaaataactgcacatttatatataggatattggactctgcttagcattttcaagccacatagcatgactgttttttgaataggttggaattgaaaaaacaattatcaaacgttaagaacaaagacagggataaattgcttacatttcaacctctggagattgaggtaactttttgtgtctgggtcttgtcaacatctaatttttttccatccattctgttacactttgtattttctaactggagaaaagagtgaggaacagaatgttttaaatctggtgcaaaagaactatatctgctggatgagccttgaaagcagtcttggcctgttagggcttacaaagtaaattacaaagtgatccagttcaaagtttgcttagttacaacaaagcacctttaaaaaaaatacattttaaaaaaacattccaagccaattggaagacatcattgggttcttactttaagacatctcctggaataactgttcaaatgcaggttttagaaacaatgcaggaatcttgctttaaagatgaaaaagggaatgggccagcttcccttactcaaggagttgagggaccttggaggatgaaggcgagtatgtgacactggagaaaagtggaccaggcatgtcttttgctttgatctggagggagggctgcctgatgcaggccggctcccagtggggcaggcctcgctgcagaatgcccagtagtactgcggccaaggggacagttaggagacttcatctaaagcatgaaacctagctcctctacacacaaattcctatggaaatacctttgtgtacagtgtcttacattttcctattagtcagaaagaaggagagaatgagtgagtgcttgaaatgtgtcatactgttttaggatcaagactaggaattaggagccaggttgacaaggactttttctgagagttgggtgagggtaaagcttttctataatcaagctcaatacaccaaggaaactggatccagaattcctaaactttaaaatggtactgtctgcggagtggagtatggatggttatgtcaaagtcatagttcatcctatccagatgtagcattcatggtaaacttttaagtgctaagcaaggaattatttactgattggttttaaagagagcagaaaacacccaagtgtagaatgtctactgtttgctacctagaaatcttttccattcctctttcatacattccaacccactggaagtctttagaggtattttgatttaaagtatacttaaattaggatttcttaaagaaaacatagggagaaaactttacatgcaattaaaaatggactttcctgtgatttgtttttaatcattcatttggagaagaggcatgacctttgtatttcactaagtttaaagcaagagcaactgatgattaaatgttgctttttaataaggtttttaacttgaaaatttgaaaatatttaatgttgaaagacttcaattagggctattagagttatatctccctgtcgtaggcagcttcttcggagaagtgaaatataacattactcagtggacggagaaatctgttttgttacagagacatgcctctcagaaggtcaggaggttttgagtacctatccttgccacccatacaggaaatccaaagtttggtgtctctctctctctgtctctttctttctctttctccccccaaacccctctcactccctccctccctctctccttcccctatttgcaatcatattctccctctgcttcttttctcttctgccctccttgtgggcagtcatgaaaatcaattcagactgtgttgattagcagatttattattctattgagaaagcactggaatgttttgtgagattatttttatatgaaggaatagcctgaactcaaacagatggtaagaatagtacaaacaccttagcacatcactgcacacacagtattctgaaaggagatttgacacttaattcccattttcttaaaataacagttttgttgacttaaaaatatgagatacataggatgtgaaaaaaaatgtttgcagtactcagcaaaaaatagggtacataaagcagggtggctgtccatccactgattctggggtgagaagcgatttctacctcgcaagagtgactagaaagtttctaggagcacctccaggcttgcaaagaaagtgaggcctcttggtatcctttcctcagtgtgtatatgacagccagtataatcaataccctaggttatgcgtctatatgatactcatctgtgaatattattggttttgtaatctttgttatataagaggatgtttaggctgtatatactggggtagattattgcctgccccttatacataggaatatgctgcataattgcgcataacttccatctcccttactggcttgtaggcagaggaaactgtatatgttactgccttgtacttttctcatacaccaaaaacacaccaaaaaaatcaataaaataagcaatcttctattctcattccttttcccacagcagcatattttagaggcacatacaaaacctacattctctagttgggagtggatttttaaagttttccttttatcttttatttttttttgtatgatgcactgagatgtgtactttctaacaggggattggtacctaagaaatgtggtagcattattcagaaaactattatactttcaaatgacacatagtaaggagaatggaataatacatgttgcatatttgttaccagttgtaatttgtctgtattatgaaagatgtaatggtttgtcagctgtcactgttgttttcttgtaacatgatatggaataaagtatagcagaatctccgt

SEQ ID NO: 123674 - DNA, 563 bp, Homo sapiens
  Payload ID: 4275
  Gene Symbol: CDK14
  Gene Name: cyclin-dependent kinase 14
  ENST ID: ENST00000446790
  CDS Start-End: 288-563
gcagcatgcatgatggtggctgaaacttggccttctataggatcccagattattatttaatggggttgtcactcaggacacttactggctttctccagtgctcttaaaaaattgaattgagcatgatgagtacggccgtaccatttcagcttgctagtgcagaaagatgtgaattcagttgctgtatgagcctggcctggtgcaaacacattgctagagacatgttaaagagttccaggtgaatcaagcctgagggagacaacagcaaaacgatatgtgtcacaaagatgtctacacggaactgccagggaatggactcagtgatcaaacccctggacacaattcctgaggataaaaaagtcagagttcagaggacacagagcacttttgacccatttgagaaaccagctaatcaagtaaagagggtgcattctgagaacaatgcttgcattaactttaagacctcctccactggcaaagagtcacctaaagttaggcggcactccagccccagctcgccaacaagtcccaaatttggaaaagctgactcatatgaaaagctg

SEQ ID NO: 123675 - DNA, 620 bp, Homo sapiens
  Payload ID: 4275
  Gene Symbol: CDK14
  Gene Name: cyclin-dependent kinase 14
  ENST ID: ENST00000456689
  CDS Start-End: 239-620
ttcagggctgttgctcctgacagataagtcagtctacctgttgttgaatgacatgcagaaaagaaatttggtaagaagaaagtgatttgactttgaagaaagatgacaccacctttgatgagctttgatgattgccagaacaaagtgttggctctgcctggctctttgatcctgaggtgacttccttctaagtttttcctccaaagctaccaaataaaccctaatatgtgtcacaaagatgtctacacggaactgccagggaatggactcagtgatcaaacccctggacacaattcctgaggataaaaaagtcagagttcagaggacacagagcacttttgacccatttgagaaaccagctaatcaagtaaagagggtgcattctgagaacaatgcttgcattaactttaagacctcctccactggcaaagagtcacctaaagttaggcggcactccagccccagctcgccaacaagtcccaaatttggaaaagctgactcatatgaaaagctggaaaaactaggggaaggatcttatgctacagtatacaaagggaaaagcaaggtaaatgggaagttggtagctctgaaggtgatcaggctgcaggaagaagaaggga

SEQ ID NO: 123676 - DNA, 590 bp, Homo sapiens
  Payload ID: 4275
  Gene Symbol: CDK14
  Gene Name: cyclin-dependent kinase 14
  ENST ID: ENST00000446224
  CDS Start-End: 210-590
ttcagggctgttgctcctgacagataagtcagtctacctgttgttgaatgacatgcagaaaagaaatttggtaagaagaaagtgatttgactttgaagaaagatgacaccacctttgatgaggctgtggaagtgattctgattctctgccagggttgtgacgctgcagctttccatgaagtacttcacaagtagatatgtgtcacaaagatgtctacacggaactgccagggaatggactcagtgatcaaacccctggacacaattcctgaggataaaaaagtcagagttcagaggacacagagcacttttgacccatttgagaaaccagctaatcaagtaaagagggtgcattctgagaacaatgcttgcattaactttaagacctcctccactggcaaagagtcacctaaagttaggcggcactccagccccagctcgccaacaagtcccaaatttggaaaagctgactcatatgaaaagctggaaaaactaggggaaggatcttatgctacagtatacaaagggaaaagcaaggtaaatgggaagttggtagctctgaaggtgatcaggctgcaggaagaagaaggg

SEQ ID NO: 123677 - DNA, 1635 bp, Homo sapiens
  Payload ID: 4276
  Gene Symbol: CDK15
  Gene Name: cyclin-dependent kinase 15
  Uniprot ID: Q96Q40
  ENST ID: ENST00000260967
  CDS Start-End: 204-1358
tgtggccagaacaagaaccttaactgtgccaaattttattctattcaataacagctgcctcgttttcagttgtgcacatctgaatgcaagcaatccctgtctgatgtggagtttcttgcactgataaggaaaaactgctgaagttgtgaggctgctccaggcagagccatcatctaacagacctaaaagaagcatcatgttccatgacttcatttcaccccaggggacttcaagctgcccgtgcccagaagttcaagagtaaaaggccacggagtaacagtgattgttttcaggaagaggatctgaggcagggttttcagtggaggaagagcctcccttttggggcagcctcatcttacttgaacttggagaagctgggtgaaggctcttatgcgacagtttacaaggggattagcagaataaatggacaactagtggctttaaaagtcatcagcatgaatgcagaggaaggagtcccatttacagctatccgagaagcttctctcctgaagggtttgaaacatgccaatattgtgctcctgcatgacataatccacaccaaagagacactgacattcgtttttgaatacatgcacacagacctggcccagtatatgtctcagcatccaggagggcttcatcctcataatgtcagacttttcatgtttcaacttttgcggggcctggcgtacatccaccaccaacacgttcttcacagggacctgaaacctcagaacttactcatcagtcacctgggagagctcaaactggctgattttggtcttgcccgggccaagtccattcccagccagacatactcttcagaagtcgtgaccctctggtaccggccccctgatgctttgctgggagccactgaatattcctctgagctggacatatggggtgcaggctgcatctttattgaaatgttccagggtcaacctttgtttcctggggtttccaacatccttgaacagctggagaaaatctgggaggtgctgggagtccctacagaggatacttggccgggagtctccaagctacctaactacaatccagaatggttcccactgcctacgcctcgaagccttcatgttgtctggaacaggctgggcagggttcctgaagctgaagacctggcctcccagatgctaaaaggctttcccagagaccgcgtctccgcccaggaagcacttgttcatgattatttcagcgccctgccatctcagctgtaccagcttcctgatgaggagtctttgtttacagtttcaggagtgaggctaaagccagaaatgtgtgaccttttggcctcctaccagaaaggtcaccacccagcccagtttagcaaatgctggtgaaaagaaagggcgagatcaccaaggttcttccagggctgtatttctgcagtttcggttttcatttgcttcagcttactaagaagcttcaaatctaactccatactgaacaaggggctttatgtcctcacctatgacctggaatagtttaaatatggtgttcaaggcaatagtacataatagtggaagaaaattcagtggaaggttattgctattgtcatttgcatagaatttaagtgattgatttaaaaaaactggacataaactaagtctaagaaga

SEQ ID NO: 123678 - DNA, 1780 bp, Homo sapiens
  Payload ID: 4276
  Gene Symbol: CDK15
  Gene Name: cyclin-dependent kinase 15
  Uniprot ID: Q96Q40
  ENST ID: ENST00000410091
  CDS Start-End: 350-1504
agataaggcccagactgaacactgggtccactcaaattaggaagttgagcaggggaggaggaatcagcaaagatggttgcagaggagtccccagagaggcaggaggaaaaccaaggaagtgcccacttcacagaatcaaggaggctttcaaaaagggtggcatgattatggtgttaaatgccaccaaagagtaaagcaagctgcctcgttttcagttgtgcacatctgaatgcaagcaatccctgtctgatgtggagtttcttgcactgataaggaaaaactgctgaagttgtgaggctgctccaggcagagccatcatctaacagacctaaaagaagcatcatgttccatgacttcatttcaccccaggggacttcaagctgcccgtgcccagaagttcaagagtaaaaggccacggagtaacagtgattgttttcaggaagaggatctgaggcagggttttcagtggaggaagagcctcccttttggggcagcctcatcttacttgaacttggagaagctgggtgaaggctcttatgcgacagtttacaaggggattagcagaataaatggacaactagtggctttaaaagtcatcagcatgaatgcagaggaaggagtcccatttacagctatccgagaagcttctctcctgaagggtttgaaacatgccaatattgtgctcctgcatgacataatccacaccaaagagacactgacattcgtttttgaatacatgcacacagacctggcccagtatatgtctcagcatccaggagggcttcatcctcataatgtcagacttttcatgtttcaacttttgcggggcctggcgtacatccaccaccaacacgttcttcacagggacctgaaacctcagaacttactcatcagtcacctgggagagctcaaactggctgattttggtcttgcccgggccaagtccattcccagccagacatactcttcagaagtcgtgaccctctggtaccggccccctgatgctttgctgggagccactgaatattcctctgagctggacatatggggtgcaggctgcatctttattgaaatgttccagggtcaacctttgtttcctggggtttccaacatccttgaacagctggagaaaatctgggaggtgctgggagtccctacagaggatacttggccgggagtctccaagctacctaactacaatccagaatggttcccactgcctacgcctcgaagccttcatgttgtctggaacaggctgggcagggttcctgaagctgaagacctggcctcccagatgctaaaaggctttcccagagaccgcgtctccgcccaggaagcacttgttcatgattatttcagcgccctgccatctcagctgtaccagcttcctgatgaggagtctttgtttacagtttcaggagtgaggctaaagccagaaatgtgtgaccttttggcctcctaccagaaaggtcaccacccagcccagtttagcaaatgctggtgaaaagaaagggcgagatcaccaaggttcttccagggctgtatttctgcagtttcggttttcatttgcttcagcttactaagaagcttcaaatctaactccatactgaacaaggggctttatgtcctcacctatgacctggaatagtttaaatatggtgttcaaggcaatagtacataatagtggaagaaaattcagtggaaggttattgctattgtcatttgcatagaatttaagtgattgatttaaaaaaactggacataaactaagtctaagaag

SEQ ID NO: 123679 - DNA, 1437 bp, Homo sapiens
  Payload ID: 4276
  Gene Symbol: CDK15
  Gene Name: cyclin-dependent kinase 15
  ENST ID: ENST00000451080
  CDS Start-End: 468-632
agataaggcccagactgaacactgggtccactcaaattaggaagttgagcaggggaggaggaatcagcaaagatggttgcagaggagtccccagagaggcaggaggaaaaccaaggaagtgcccacttcacagaatcaaggaggctttcaaaaagggtggcatgattatggtgttaaatgccaccaaagagtaaagcaaggatcttgctctgtcacccagtctgaagtgctgtggcacaaccatggctctatgcagccttgacctcctgaactcaagcaattgtcctacctcagccttcccagttgctaggaccacagctgcctcgttttcagttgtgcacatctgaatgcaagcaatccctgtctgatgtggagtttcttgcactgataaggaaaaactgctgaagttgtgaggctgctccaggcagagccatcatctaacagacctaaaagaagcatcatgttccatgacttcatttcaccccaggggacttcaagctgcccgtgcccagaagttcaagagtaaaaggccacggagtaacagtgattgttttcaggaagaggatctgaggcagggttttcagtggagcagaggaagagcctcccttttggggcagcctcatcttacttgaacttggagaagctgggtgaaggctcttatgcgacagtttacaaggggattagcagaataaatggacaactagtggctttaaaagtcatcagcatgaatgcagaggaaggagtcccatttacagctatccgagaagcttctctcctgaagggtttgaaacatgccaatattgtgctcctgcatgacataatccacaccaaagagacactgacattcgtttttgaatacatgcacacagacctggcccagtatatgtctcagcatccaggagggcttcatcctcataatgtcagacttttcatgtttcaacttttgcggggcctggcgtacatccaccaccaacacgttcttcacagggacctgaaacctcagaacttactcatcagtcacctgggagagctcaaactggctgattttggtcttgcccgggccaagtccattcccagccagacatactcttcagaagtcgtgaccctctggtaccggccccctgatgctttgctgggagccactgaatattcctctgagctggacatatggggtgcaggctgcatctttattgaaatgttccagggtcaacctttgtttcctggggtttccaacatccttgaacagctggagaaaatctgggaggtgctgggagtccctacagaggatacttggccgggagtctccaagctacctaactacaatccagaatggttcccactgcctacgcctcgaagccttcatgttgtctggaacaggaggaagagacttcacttgcccgctttgccctggtgaccacctctaccggcgaaggagaa

SEQ ID NO: 123680 - DNA, 3659 bp, Homo sapiens
  Payload ID: 4276
  Gene Symbol: CDK15
  Gene Name: cyclin-dependent kinase 15
  Uniprot ID: Q96Q40
  ENST ID: ENST00000450471
  CDS Start-End: 87-1376
ctctggcaaaaagggagagaacaaggataggagaggcagtgggggaaaggttcaagtgcgggttttctccttgaacctacaagattatgggtcaagagctgtgtgcaaagactgtacagcctggatgcagctgctaccattgttcagagggaggcgaggcacacagctgtcggaggagtcagcctgagaccacggaggctgcgttcaagctaacagacctaaaagaagcatcatgttccatgacttcatttcaccccaggggacttcaagctgcccgtgcccagaagttcaagagtaaaaggccacggagtaacagtgattgttttcaggaagaggatctgaggcagggttttcagtggaggaagagcctcccttttggggcagcctcatcttacttgaacttggagaagctgggtgaaggctcttatgcgacagtttacaaggggattagcagaataaatggacaactagtggctttaaaagtcatcagcatgaatgcagaggaaggagtcccatttacagctatccgagaagcttctctcctgaagggtttgaaacatgccaatattgtgctcctgcatgacataatccacaccaaagagacactgacattcgtttttgaatacatgcacacagacctggcccagtatatgtctcagcatccaggagggcttcatcctcataatgtcagacttttcatgtttcaacttttgcggggcctggcgtacatccaccaccaacacgttcttcacagggacctgaaacctcagaacttactcatcagtcacctgggagagctcaaactggctgattttggtcttgcccgggccaagtccattcccagccagacatactcttcagaagtcgtgaccctctggtaccggccccctgatgctttgctgggagccactgaatattcctctgagctggacatatggggtgcaggctgcatctttattgaaatgttccagggtcaacctttgtttcctggggtttccaacatccttgaacagctggagaaaatctgggaggtgctgggagtccctacagaggatacttggccgggagtctccaagctacctaactacaatccagaatggttcccactgcctacgcctcgaagccttcatgttgtctggaacaggctgggcagggttcctgaagctgaagacctggcctcccagatgctaaaaggctttcccagagaccgcgtctccgcccaggaagcacttgttcatgattatttcagcgccctgccatctcagctgtaccagcttcctgatgtttcaggagtgaggctaaagccagaaatgtgtgaccttttggcctcctaccagaaaggtcaccacccagcccagtttagcaaatgctggtgaaaagaaagggcgagatcaccaaggttcttccagggctgtatttctgcagtttcggttttcatttgcttcagcttactaagaagcttcaaatctaactccatactgaacaaggggctttatgtcctcacctatgacctggaatagtttaaatatggtgttcaaggcaatagtacataatagtggaagaaaattcagtggaaggttattgctattgtcatttgcatagaatttaagtgattgatttaaaaaaactggacataaactaagtctaagaagagggcttctgaataacttcattcattttggcatttgttaagagattcctgggctagaaggttgatttcccaaaaagacagataagagactgacaatttaaaagaatctggagacagagctggtgcttacagagacctgccactcctgtgttcacttacaatttctcccaacaaaaggatttctgtggcaaggagaaaactagcctaaagtttagaaaaagatggtttcttggataacattgttaacaaaaggacttcctgaggactatttattattattttgtagggggcacttcctccttcactaaactggattatcagaacgtattaccacccaacccatattttagaagtttggatttggctgctgattagaaatgaatttcaggctatctcctcctactgaatcttaattgtctgtgatgatggcaacagtgatggggaatctaagcgctggtttgatggtggagatattgaataagtagttgggagcagagttccaaagatgtaatttaagccctgttgcaccaccacacacacacacacacacacacacacacacacacacacacccctcaagtaaaatgagagatctgtcttagctaacacgtgtgccgttttatacaatgactccttctaaaagcagccagggaaactcaaatcgcttctgtccagggatcatctcaggaaatgtagcagcctagaaaccagagacctctgtatatcctttggaagagcaaggaggaactaattaagagataattaaaaaatagtaactatcccccaatgtctgagatggaaaaaggaaaaagacacatgggtagcccaaatcaacctgcctgagtaagtatctgattttagtaaggcatttgacaaagactgtccagctatacctgaaagatgaaacagtgtaggctgggtgatggagcagatatatgtactcaaatcatggtgtttatttaacccagagaaaggccagccgtggtgtgctacaaggttcagtcttgagtcctattctggtcaaatatttttattaattactcgaataaatcagagtacatggacaactttatacaactccttgaagtaagtactattattattaatttatgacttccatttcacaaaagaggagactgaggctcagtgaagttaggtaactccttcatagtagcatgccagagtgaagatgcaaacctcagacctggttctccaatgttcctgacacctatcgaatttagagaatacacaactcttgcagaggcagctgctatttagtattggatcatgattcaaaagacaccttgctagaagccaatgaacagcaggccaaaacaacacttacttgcatcaaatttcatctgacttaaattcttacactttgggctacaacttaaaaaaggctatgacttagtggaaattggcacttttaagtacaatatgaattaatagtataatttcgctgtcccccagagataatgctagtaccaatcgaaagctcagggatgctactgttgacgcatcagcaagagttcttgagcagttttacctgtccatcaatacaaagagttcccacaacagtagtgggattcctctgcctctctgaagatatgagagctataggagggattcccatgttggaggttagaagagctgacctccaatgtcccgtctaattccaagattctccaataatgactttggaacagctgtgtacagattatacttggaattatgcttagatactattgctgcaggaatgaatagacaaattttgttattaaaaaattgattttattaagtggaagttgacagaattatcctctttataatggaggaacattatgcttatgcatatgcatataccttatgcatatgattatgcttgtgcttccttctttaatggatttacctattcaaaagcttaataaatgttataagactctaaaacatttaaatctttcatttctcaattttatcaaataaacattcctggaatttgtgcata

SEQ ID NO: 123681 - DNA, 2240 bp, Homo sapiens
  Payload ID: 4276
  Gene Symbol: CDK15
  Gene Name: cyclin-dependent kinase 15
  Uniprot ID: Q96Q40
  ENST ID: ENST00000434439
  CDS Start-End: 45-1247
gggaaaggttcaagtgcgggttttctccttgaacctacaagattatgggtcaagagctgtgtgcaaagactgtacagcctggatgcagctgctaccattgttcagagggaggcgaggcacacagctgtcggaggagtcagcctgagaccacggaggctgcgttcaagctaacagacctaaaagaagcatcatgttccatgacttcatttcaccccaggggacttcaagctgcccgtgcccagaagttcaagagtaaaaggccacggagtaacagtgattgttttcaggaagaggatctgaggcagggttttcagtggaggaagagcctcccttttggggcagcctcatcttacttgaacttggagaagctgggtgaaggctcttatgcgacagtttacaaggggattagcagaataaatggacaactagtggctttaaaagtcatcagcatgaatgcagaggaaggagtcccatttacagctatccgagaagcttctctcctgaagggtttgaaacatgccaatattgtgctcctgcatgacataatccacaccaaagagacactgacattcgtttttgaatacatgcacacagacctggcccagtatatgtctcagcatccaggagggcttcatcctcataatgtcagacttttcatgtttcaacttttgcggggcctggcgtacatccaccaccaacacgttcttcacagggacctgaaacctcagaacttactcatcagtcacctgggagagctcaaactggctgattttggtcttgcccgggccaagtccattcccagccagacatactcttcagaagtcgtgaccctctggtaccggccccctgatgctttgctgggagccactgaatattcctctgagctggacatatggggtgcaggctgcatctttattgaaatgttccagggtcaacctttgtttcctggggtttccaacatccttgaacagctggagaaaatctgggaggtgctgggagtccctacagaggatacttggccgggagtctccaagctacctaactacaatccagaatggttcccactgcctacgcctcgaagccttcatgttgtctggaacaggctgggcagggttcctgaagctgaagacctggcctcccagatgctaaaaggctttcccagagaccgcgtctccgcccaggaagcacttgttcatgattatttcagcgccctgccatctcagctgtaccagcttcctgatgagtgaagcagctgcgataattatgctgtcagcctcgggaagctaatgaggagtcaccagagtggaaggttttgcatttgtgagattgctgaaggagagccgcgctgcagcttttttcgttttttatttccctttctttctttcttcctcctttttctttttctatgagttgggaaggagagtctggcagtccacagccaaattggaatccttttgattaaccggttgccttcccagcatgttctgccagatagtgtctctctctctctccctccctccctgcttttgaggagctgctgcttttgaggggcaaggaagccggagggaaatcccagcttttcatgccactgtccccaaggcaagaggatacttctccccgagagaagttccccaaatggtttggatttgagttgatttgagaataattggtaaagtatacgcactgtttattttagccatttaactgtctatgctatgacaagatctaatagaaagtagaatacaaaattgcatattataatatccgtgtgaaaatgtcttatgcatatcaacaaatggtatgatggctcccctttccagcctatttggaatatgcgattccaaatacaagacaacgagaccccagattacccacagcatttaagggcagaagtttaggccaggcgaggcagagctggcaagtttatttcttccctttgggtgtgagcagcttccagcaaacagtattatttaaggcattttatgcttttggtgcagtaataacagaaggctctctttttgttaaattgtgagatattttgagcaccccagatttatgcaaattgtgaacctgggaaaagcaatgcccaagtggaaaggggccctgagtaaattttgcggatgtgctttggtgacaatgtggctgctgcctcttgctatttttctcagatatctgtgctaatacttgtaacaatggctaccatttattaaaaacatattgtgtatcataaactaacacaa

SEQ ID NO: 123682 - DNA, 3016 bp, Homo sapiens
  Payload ID: 4277
  Gene Symbol: CDK16
  Gene Name: cyclin-dependent kinase 16
  Uniprot ID: Q00536
  ENST ID: ENST00000276052
  CDS Start-End: 79-1791
tagagaagtcaggaagagggtccctgtggccacagggaatagtctgccttggcctttgagggtggtgctaggggaactatgccactctatggccgtgctcgagaccatgtcacccatccttcaattctgggcacacgccctggccgacccatggctgggcccatcactgcagctgtacctgagaagatctgcaatggagccttctgctcctgcagtggggcttttcccctagatcccaacaatccatcgttagggcccttgccctcaatcagccacctaaatctgagaactcagatcgccatggatcggatgaagaagatcaaacggcagctgtcaatgacactccgaggtggccgaggcatagacaagaccaatggtgcccctgagcagataggcctggatgagagtggtggtggtggcggcagtgaccctggagaggcccccacacgtgctgctcctggggaacttcgttctgcacggggcccactcagctctgcaccagagattgtgcacgaggacttgaagatggggtctgatggggagagtgaccaggcttcagccacgtcctcggatgaggtgcagtctccagtgagagtgcgtatgcgcaaccatcccccacgcaagatctccactgaggacatcaacaagcgcctatcactaccagctgacatccggctgcctgagggctacctggagaagctgaccctcaatagccccatctttgacaagcccctcagccgccgcctccgtcgtgtcagcctatctgagattggctttgggaaactggagacctacattaagctggacaaactgggcgagggtacctatgccaccgtctacaaaggcaaaagcaagctcacagacaaccttgtggcactcaaggagatcagactggaacatgaagagggggcaccctgcaccgccatccgggaagtgtccctgctcaaggacctcaaacacgccaacatcgttacgctacatgacattatccacacggagaagtccctcacccttgtctttgagtacctggacaaggacctgaagcagtacctggatgactgtgggaacatcatcaacatgcacaacgtgaaactgttcctgttccagctgctccgtggcctggcctactgccaccggcagaaggtgctacaccgagacctcaagccccagaacctgctcatcaacgagaggggagagctcaagctggctgactttggcctggcccgagccaagtcaatcccaacaaagacatactccaatgaggtggtgacactgtggtaccggccccctgacatcctgcttgggtccacggactactccactcagattgacatgtggggtgtgggctgcatcttctatgagatggccacaggccgtcccctctttccgggctccacggtggaggaacagctacacttcatcttccgtatcttaggaaccccaactgaggagacgtggccaggcatcctgtccaacgaggagttcaagacatacaactaccccaagtaccgagccgaggcccttttgagccacgcaccccgacttgatagcgacggggccgacctcctcaccaagctgttgcagtttgagggtcgaaatcggatctccgcagaggatgccatgaaacatccattcttcctcagtctgggggagcggatccacaaacttcctgacactacttccatatttgcactaaaggagattcagctacaaaaggaggccagccttcggtcttcgtcgatgcctgactcaggcaggccagctttccgcgtggtggacaccgagttctaagccacagaccgaggccccagcaggcagcggctggagggatgccacacccctcacagggcagcccccaactacatcttccctgcttactctctgcctacctgcctgagccatgttcacctgcccacttgtcccctgctgcctgcccaaacaccccaccattggcctgtcaacccacccattggcctgtctgctgggtgctaacaaagctctcatcactccttcacttggtctgtctgtctctgtcttggtagttgccggtggacagcatggccgtgccagcctcccacactgaggccaggtctaccccccatcataccagcccccaggaccactaccccacggccagccaggggtccagagctagcccaggctggggatctcgactcagacaagatggtgacaatgccttgagtctgaggcatcctctgcctgctttcctgcctgccccacctgcctcatattgtgtgggcctttttttgtttgtttcattcattgtttttttttttttaattattttaaatgagatttttgttttttttaaatgcaatatctctgtatacagactggctgggccccaccccctgcgtgtggccctcccacagtattttgtgcaatgaagccctgctcccagcctttcagagacagggacacagcccctatttggaaccctgatcatcaccagaccctgggattggctatgggaaagcatgccacagccactcgccttcctacccccgcccgccatccccagttgcagggggatctggggactaccagagactctgggaaatggacaaggtggggggccccactctttctctcctgcagtcccgtagctggggcctccttccttctcagggtctccccagcccagtccccttgctcccatcccactcggtgctgttgggtaggggccctgccaggaactgaccagctcagcgaggagccataatgtgcatatgtgcacaagcagggttgggggaggggggtgtgaggggttgtgcccaggtgttgccccctatctcctggggagggtgaggcagggcagggacagtctccagggtcagtccctggatgggtggttacctccccttcctccaccctaagccctggggccctgaaatggggtgggagggcaggggtgggagccctcctagtgggtttggggggttgggttcctgaatgcaccataatcgctgtatgaaatattaaaaagtctaaagtg

SEQ ID NO: 123683 - DNA, 3144 bp, Homo sapiens
  Payload ID: 4277
  Gene Symbol: CDK16
  Gene Name: cyclin-dependent kinase 16
  Uniprot ID: Q00536
  ENST ID: ENST00000357227
  CDS Start-End: 425-1915
acccttccgagcgcctgcgtgcgcatgcgcggagcgcggcgcgcgcggcggttgggccgttggctgttcggccctgggatccgccgccactccgcgatcagaccgctctgtgccgcgagccgccgtgagcactcggattcaagccggcgccaacgagtccgggggcatcgcccgcagcggccaagctcatggccggctgagcgggacgccgcctccgcctcagccaccgccgccgccgccgcctcctcctcctcagccggcggcggcccgggcccagcaaccatggctgaagactactgggacgggcgcctgcggcgaacaggaggagaaggaggtcgcgcggcctcatcccgggccgccgccccaggcgccgccgcgccggccccgcggctctgaggttgctcgcgcgcccccgccgatcgccatggatcggatgaagaagatcaaacggcagctgtcaatgacactccgaggtggccgaggcatagacaagaccaatggtgcccctgagcagataggcctggatgagagtggtggtggtggcggcagtgaccctggagaggcccccacacgtgctgctcctggggaacttcgttctgcacggggcccactcagctctgcaccagagattgtgcacgaggacttgaagatggggtctgatggggagagtgaccaggcttcagccacgtcctcggatgaggtgcagtctccagtgagagtgcgtatgcgcaaccatcccccacgcaagatctccactgaggacatcaacaagcgcctatcactaccagctgacatccggctgcctgagggctacctggagaagctgaccctcaatagccccatctttgacaagcccctcagccgccgcctccgtcgtgtcagcctatctgagattggctttgggaaactggagacctacattaagctggacaaactgggcgagggtacctatgccaccgtctacaaaggcaaaagcaagctcacagacaaccttgtggcactcaaggagatcagactggaacatgaagagggggcaccctgcaccgccatccgggaagtgtccctgctcaaggacctcaaacacgccaacatcgttacgctacatgacattatccacacggagaagtccctcacccttgtctttgagtacctggacaaggacctgaagcagtacctggatgactgtgggaacatcatcaacatgcacaacgtgaaactgttcctgttccagctgctccgtggcctggcctactgccaccggcagaaggtgctacaccgagacctcaagccccagaacctgctcatcaacgagaggggagagctcaagctggctgactttggcctggcccgagccaagtcaatcccaacaaagacatactccaatgaggtggtgacactgtggtaccggccccctgacatcctgcttgggtccacggactactccactcagattgacatgtggggtgtgggctgcatcttctatgagatggccacaggccgtcccctctttccgggctccacggtggaggaacagctacacttcatcttccgtatcttaggaaccccaactgaggagacgtggccaggcatcctgtccaacgaggagttcaagacatacaactaccccaagtaccgagccgaggcccttttgagccacgcaccccgacttgatagcgacggggccgacctcctcaccaagctgttgcagtttgagggtcgaaatcggatctccgcagaggatgccatgaaacatccattcttcctcagtctgggggagcggatccacaaacttcctgacactacttccatatttgcactaaaggagattcagctacaaaaggaggccagccttcggtcttcgtcgatgcctgactcaggcaggccagctttccgcgtggtggacaccgagttctaagccacagaccgaggccccagcaggcagcggctggagggatgccacacccctcacagggcagcccccaactacatcttccctgcttactctctgcctacctgcctgagccatgttcacctgcccacttgtcccctgctgcctgcccaaacaccccaccattggcctgtcaacccacccattggcctgtctgctgggtgctaacaaagctctcatcactccttcacttggtctgtctgtctctgtcttggtagttgccggtggacagcatggccgtgccagcctcccacactgaggccaggtctaccccccatcataccagcccccaggaccactaccccacggccagccaggggtccagagctagcccaggctggggatctcgactcagacaagatggtgacaatgccttgagtctgaggcatcctctgcctgctttcctgcctgccccacctgcctcatattgtgtgggcctttttttgtttgtttcattcattgtttttttttttttaattattttaaatgagatttttgttttttttaaatgcaatatctctgtatacagactggctgggccccaccccctgcgtgtggccctcccacagtattttgtgcaatgaagccctgctcccagcctttcagagacagggacacagcccctatttggaaccctgatcatcaccagaccctgggattggctatgggaaagcatgccacagccactcgccttcctacccccgcccgccatccccagttgcagggggatctggggactaccagagactctgggaaatggacaaggtggggggccccactctttctctcctgcagtcccgtagctggggcctccttccttctcagggtctccccagcccagtccccttgctcccatcccactcggtgctgttgggtaggggccctgccaggaactgaccagctcagcgaggagccataatgtgcatatgtgcacaagcagggttgggggaggggggtgtgaggggttgtgcccaggtgttgccccctatctcctggggagggtgaggcagggcagggacagtctccagggtcagtccctggatgggtggttacctccccttcctccaccctaagccctggggccctgaaatggggtgggagggcaggggtgggagccctcctagtgggtttggggggttgggttcctgaatgcaccataatcgctgtatgaaatattaaaaagtctaaagtgaaaa

SEQ ID NO: 123684 - DNA, 3158 bp, Homo sapiens
  Payload ID: 4277
  Gene Symbol: CDK16
  Gene Name: cyclin-dependent kinase 16
  Uniprot ID: Q00536
  ENST ID: ENST00000457458
  CDS Start-End: 421-1929
ggagggggcagttgggcggggataggccgtcctagctaaggtggtaaaggccaataactcttcaggctgcctctcctcgaaaagtcatcttctcgcgaacctttaaaatgccttcctccccaagcacctcaagggactagaactgagtgcttcatttgtcttttttcctccttgcaaaagtcccgtttgccaccatggggatgtaccaagtgagaccgagtagggggaacgagtggtgattgacgcgccaggttactggccactgctcacctaggcgctagcaaacttctgccaagatcggaactgagtactaaacagcctccacagttctccctggtgccgtctccggcttggcgccgcatcctcctctgggctcgcgatggccgcgtcccctcccgctgcggacgggtcctttggtacatgcagtccgagatcgccatggatcggatgaagaagatcaaacggcagctgtcaatgacactccgaggtggccgaggcatagacaagaccaatggtgcccctgagcagataggcctggatgagagtggtggtggtggcggcagtgaccctggagaggcccccacacgtgctgctcctggggaacttcgttctgcacggggcccactcagctctgcaccagagattgtgcacgaggacttgaagatggggtctgatggggagagtgaccaggcttcagccacgtcctcggatgaggtgcagtctccagtgagagtgcgtatgcgcaaccatcccccacgcaagatctccactgaggacatcaacaagcgcctatcactaccagctgacatccggctgcctgagggctacctggagaagctgaccctcaatagccccatctttgacaagcccctcagccgccgcctccgtcgtgtcagcctatctgagattggctttgggaaactggagacctacattaagctggacaaactgggcgagggtacctatgccaccgtctacaaaggcaaaagcaagctcacagacaaccttgtggcactcaaggagatcagactggaacatgaagagggggcaccctgcaccgccatccgggaagtgtccctgctcaaggacctcaaacacgccaacatcgttacgctacatgacattatccacacggagaagtccctcacccttgtctttgagtacctggacaaggacctgaagcagtacctggatgactgtgggaacatcatcaacatgcacaacgtgaaactgttcctgttccagctgctccgtggcctggcctactgccaccggcagaaggtgctacaccgagacctcaagccccagaacctgctcatcaacgagaggggagagctcaagctggctgactttggcctggcccgagccaagtcaatcccaacaaagacatactccaatgaggtggtgacactgtggtaccggccccctgacatcctgcttgggtccacggactactccactcagattgacatgtggggtgtgggctgcatcttctatgagatggccacaggccgtcccctctttccgggctccacggtggaggaacagctacacttcatcttccgtatcttaggaaccccaactgaggagacgtggccaggcatcctgtccaacgaggagttcaagacatacaactaccccaagtaccgagccgaggcccttttgagccacgcaccccgacttgatagcgacggggccgacctcctcaccaagctgttgcagtttgagggtcgaaatcggatctccgcagaggatgccatgaaacatccattcttcctcagtctgggggagcggatccacaaacttcctgacactacttccatatttgcactaaaggagattcagctacaaaaggaggccagccttcggtcttcgtcgatgcctgactcaggcaggccagctttccgcgtggtggacaccgagttctaagccacagaccgaggccccagcaggcagcggctggagggatgccacacccctcacagggcagcccccaactacatcttccctgcttactctctgcctacctgcctgagccatgttcacctgcccacttgtcccctgctgcctgcccaaacaccccaccattggcctgtcaacccacccattggcctgtctgctgggtgctaacaaagctctcatcactccttcacttggtctgtctgtctctgtcttggtagttgccggtggacagcatggccgtgccagcctcccacactgaggccaggtctaccccccatcataccagcccccaggaccactaccccacggccagccaggggtccagagctagcccaggctggggatctcgactcagacaagatggtgacaatgccttgagtctgaggcatcctctgcctgctttcctgcctgccccacctgcctcatattgtgtgggcctttttttgtttgtttcattcattgtttttttttttttaattattttaaatgagatttttgttttttttaaatgcaatatctctgtatacagactggctgggccccaccccctgcgtgtggccctcccacagtattttgtgcaatgaagccctgctcccagcctttcagagacagggacacagcccctatttggaaccctgatcatcaccagaccctgggattggctatgggaaagcatgccacagccactcgccttcctacccccgcccgccatccccagttgcagggggatctggggactaccagagactctgggaaatggacaaggtggggggccccactctttctctcctgcagtcccgtagctggggcctccttccttctcagggtctccccagcccagtccccttgctcccatcccactcggtgctgttgggtaggggccctgccaggaactgaccagctcagcgaggagccataatgtgcatatgtgcacaagcagggttgggggaggggggtgtgaggggttgtgcccaggtgttgccccctatctcctggggagggtgaggcagggcagggacagtctccagggtcagtccctggatgggtggttacctccccttcctccaccctaagccctggggccctgaaatggggtgggagggcaggggtgggagccctcctagtgggtttggggggttgggttcctgaatgcaccataatcgctgtatgaaatattaaaaagtctaaagtgaaaa

SEQ ID NO: 123685 - DNA, 1266 bp, Homo sapiens
  Payload ID: 4277
  Gene Symbol: CDK16
  Gene Name: cyclin-dependent kinase 16
  ENST ID: ENST00000523344
  CDS Start-End: 1-783
gacaaggacctgaagcagtacctggatgactgtgggaacatcatcaacatgcacaacgtgaaactgttcctgttccagctgctccgtggcctggcctactgccaccggcagaaggtgctacaccgagacctcaagccccagaacctgctcatcaacgagaggggagagctcaagctggctgactttggcctggcccgagccaagtcaatcccaacaaagacatactccaatgaggtggtgacactgtggtaccggccccctgacatcctgcttgggtccacggactactccactcagattgacatgtggggtgtgggctgcatcttctatgagatggccacaggccgtcccctctttccgggctccacggtggaggaacagctacacttcatcttccgtatcttaggaaccccaactgaggagacgtggccaggcatcctgtccaacgaggagttcaagacatacaactaccccaagtaccgagccgaggcccttttgagccacgcaccccggtctctttgtccttgtggcagacttgatagcgacggggccgacctcctcaccaagctgttgcagtttgagggtcgaaatcggatctccgcagaggatgccatgaaacatccattcttcctcagtctgggggagcggatccacaaacttcctgacactacttccatatttgcactaaaggagattcagctacaaaaggaggccagccttcggtcttcgtcgatgcctgactcaggcaggccagctttccgcgtggtggacaccgagttctaagccacagaccgaggccccagcaggcagcggctggagggatgccacacccctcacagggcagcccccaactacatcttccctgcttactctctgcctacctgcctgagccatgttcacctgcccacttgtcccctgctgcctgcccaaacaccccaccattggcctgtcaacccacccattggcctgtctgctgggtgctaacaaagctctcatcactccttcacttggtctgtctgtctctgtcttggtagttgccggtggacagcatggccgtgccagcctcccacactgaggccaggtctaccccccatcataccagcccccaggaccactaccccacggccagccaggggtccagagctagcccaggctggggatctcgactcagacaagatggtgacaatgccttgagtctgaggcatcctctgcctgctttcctgcctgccccacctgcctcatattgtgtgggcctttttttgtttg

SEQ ID NO: 123686 - DNA, 943 bp, Homo sapiens
  Payload ID: 4277
  Gene Symbol: CDK16
  Gene Name: cyclin-dependent kinase 16
  ENST ID: ENST00000520893
  CDS Start-End: 485-943
gcatgcgcggagcgcggcgcgcgcggcggttgggccgttggctgttcggccctgggatccgccgccactccgcgatcagaccgctctgtgccgcgagccgccgtgagcactcggattcaagccggcgccaacgagtccgggggcatcgcccgcagcggccaagctcatggccggctgagcgggacgccgcctccgcctcagccaccgccgccgccgccgcctcctcctcctcagccggcggcggcccgggcccagcaaccatggctgaagactactgggacgggcgcctgcggcgaacaggaggagaaggaggtcgcgcggcctcatcccgggccgccgccccaggcgccgccgcgccggccccgcggctctgaggttgctcgcgcgcccccgccgtcactattccaggtcctcaggatatagccgtgacctaaacacagaaatctaccctggcggagctgatcttctagttgtggcgatcgccatggatcggatgaagaagatcaaacggcagctgtcaatgacactccgaggtggccgaggcatagacaagaccaatggtgcccctgagcagataggcctggatgagagtggtggtggtggcggcagtgaccctggagaggcccccacacgtgctgctcctggggaacttcgttctgcacggggcccactcagctctgcaccagagattgtgcacgaggacttgaagatggggtctgatggggagagtgaccaggcttcagccacgtcctcggatgaggtgcagtctccagtgagagtgcgtatgcgcaaccatcccccacgcaagatctccactgaggacatcaacaagcgcctatcactaccagctgacatccggctgcctgagggctacctggagaagctgaccctcaatagccccatctttgacaagcccctcagccgccgcctccgtcgtgtcagc

SEQ ID NO: 123687 - DNA, 785 bp, Homo sapiens
  Payload ID: 4277
  Gene Symbol: CDK16
  Gene Name: cyclin-dependent kinase 16
  ENST ID: ENST00000518391
  CDS Start-End: 218-785
taccttgtttagggttgttcaatgaatagcagggactcatcacctcagcagaggttggtcctaggccctcagccccctgattcacttatttctgccataagcactttttgagcatctactctgtgtcagtcactattccaggtcctcaggatatagccgtgacctaaacacagaaatctaccctggcggagctgatcttctagttgtggcgatcgccatggatcggatgaagaagatcaaacggcagctgtcaatgacactccgaggtggccgaggcatagacaagaccaatggtgcccctgagcagataggcctggatgagagtggtggtggtggcggcagtgaccctggagaggcccccacacgtgctgctcctggggaacttcgttctgcacggggcccactcagctctgcaccagagattgtgcacgaggacttgaagatggggtctgatggggagagtgaccaggcttcagccacgtcctcggatgaggtgcagtctccagtgagagtgcgtatgcgcaaccatcccccacgcaagatctccactgaggacatcaacaagcgcctatcactaccagctgacatccggctgcctgagggctacctggagaagctgaccctcaatagccccatctttgacaagcccctcagccgccgcctccgtcgtgtcagcctatctgagattggctttgggaaactggagacctacattaagctggacaaactgggcgagggtacctatgccaccgtctacaaaggcaaaagcaagctcacagacaacc

SEQ ID NO: 123688 - DNA, 991 bp, Homo sapiens
  Payload ID: 4277
  Gene Symbol: CDK16
  Gene Name: cyclin-dependent kinase 16
  ENST ID: ENST00000519758
  CDS Start-End: 542-991
cttccgagcgcctgcgtgcgcatgcgcggagcgcggcgcgcgcggcggttgggccgttggctgttcggccctgggatccgccgccactccgcgatcagaccgctctgtgccgcgagccgccgtgagcactcggattcaagccggcgccaacgagtccgggggcatcgcccgcagcggccaagctcatggccggctgagcgggacgccgcctccgcctcagccaccgccgccgccgccgcctcctcctcctcagccggcggcggcccgggcccagcaaccatggctgaagactactgggacgggcgcctgcggcgaacaggaggagaaggaggtcgcgcggcctcatcccgggccgccgccccaggcgccgccgcgccggccccgcggctctgaggttgctcgcgcgcccccgccgtcactattccaggtcctcaggatatagccgtgacctaaacacagaaatctaccctggcggagctgatcttctagttgtggcggtgaggagatagacagtaaagactaaagaaaccaataaatcgccatggatcggatgaagaagatcaaacggcagctgtcaatgacactccgaggtggccgaggcatagacaagaccaatggtgcccctgagcagataggcctggatgagagtggtggtggtggcggcagtgaccctggagaggcccccacacgtgctgctcctggggaacttcgttctgcacggggcccactcagctctgcaccagagattgtgcacgaggacttgaagatggggtctgatggggagagtgaccaggcttcagccacgtcctcggatgaggtgcagtctccagtgagagtgcgtatgcgcaaccatcccccacgcaagatctccactgaggacatcaacaagcgcctatcactaccagctgacatccggctgcctgagggctacctggagaagctgaccctcaatagccccatctttgacaagcccctcagccgccgcctccgt

SEQ ID NO: 123689 - DNA, 2022 bp, Homo sapiens
  Payload ID: 4277
  Gene Symbol: CDK16
  Gene Name: cyclin-dependent kinase 16
  Uniprot ID: Q00536
  ENST ID: ENST00000518022
  CDS Start-End: 310-1800
gatgagtgctagagaagtcaggaagagggtccctgtggccacagggaatagtctgccttggcctttgagggtggtgctaggggaactatgccactctatggccgtgctcgagaccatgtcacccatccttcaattctgggcacacgccctggccgacccatggctgggcccatcactgcagctgtacctgagaagatctgcaatggagccttctgctcctgcagtggggcttttcccctagatcccaacaatccatcgttagggcccttgccctcaatcagccacctaaatctgagaactcagatcgccatggatcggatgaagaagatcaaacggcagctgtcaatgacactccgaggtggccgaggcatagacaagaccaatggtgcccctgagcagataggcctggatgagagtggtggtggtggcggcagtgaccctggagaggcccccacacgtgctgctcctggggaacttcgttctgcacggggcccactcagctctgcaccagagattgtgcacgaggacttgaagatggggtctgatggggagagtgaccaggcttcagccacgtcctcggatgaggtgcagtctccagtgagagtgcgtatgcgcaaccatcccccacgcaagatctccactgaggacatcaacaagcgcctatcactaccagctgacatccggctgcctgagggctacctggagaagctgaccctcaatagccccatctttgacaagcccctcagccgccgcctccgtcgtgtcagcctatctgagattggctttgggaaactggagacctacattaagctggacaaactgggcgagggtacctatgccaccgtctacaaaggcaaaagcaagctcacagacaaccttgtggcactcaaggagatcagactggaacatgaagagggggcaccctgcaccgccatccgggaagtgtccctgctcaaggacctcaaacacgccaacatcgttacgctacatgacattatccacacggagaagtccctcacccttgtctttgagtacctggacaaggacctgaagcagtacctggatgactgtgggaacatcatcaacatgcacaacgtgaaactgttcctgttccagctgctccgtggcctggcctactgccaccggcagaaggtgctacaccgagacctcaagccccagaacctgctcatcaacgagaggggagagctcaagctggctgactttggcctggcccgagccaagtcaatcccaacaaagacatactccaatgaggtggtgacactgtggtaccggccccctgacatcctgcttgggtccacggactactccactcagattgacatgtggggtgtgggctgcatcttctatgagatggccacaggccgtcccctctttccgggctccacggtggaggaacagctacacttcatcttccgtatcttaggaaccccaactgaggagacgtggccaggcatcctgtccaacgaggagttcaagacatacaactaccccaagtaccgagccgaggcccttttgagccacgcaccccgacttgatagcgacggggccgacctcctcaccaagctgttgcagtttgagggtcgaaatcggatctccgcagaggatgccatgaaacatccattcttcctcagtctgggggagcggatccacaaacttcctgacactacttccatatttgcactaaaggagattcagctacaaaaggaggccagccttcggtcttcgtcgatgcctgactcaggcaggccagctttccgcgtggtggacaccgagttctaagccacagaccgaggccccagcaggcagcggctggagggatgccacacccctcacagggcagcccccaactacatcttccctgcttactctctgcctacctgcctgagccatgttcacctgcccacttgtcccctgctgcctgcccaaacaccccaccattggcctgtcaacccacccattggcctgtctgctgggtgctaacaaagctctcatcactccttc

SEQ ID NO: 123690 - DNA, 1574 bp, Homo sapiens
  Payload ID: 4277
  Gene Symbol: CDK16
  Gene Name: cyclin-dependent kinase 16
  ENST ID: ENST00000517426
  CDS Start-End: 395-1574
ggagcgcggcgcgcgcggcggttgggccgttggctgttcggccctgggatccgccgccactccgcgatcagaccgctctgtgccgcgagccgccgtgagcactcggattcaagccggcgccaacgagtccgggggcatcgcccgcagcggccaagctcatggccggctgagcgggacgccgcctccgcctcagccaccgccgccgccgccgcctcctcctcctcagccggcggcggcccgggcccagcaaccatggctgaagactactgggacgggcgcctgcggcgaacaggaggagaaggaggtcgcgcggcctcatcccgggccgccgccccaggcgccgccgcgccggccccgcggctctgaggttgctcgcgcgcccccgccgatcgccatggatcggatgaagaagatcaaacggcagctgtcaatgacactccgaggtggccgaggcatagacaagaccaatggtgcccctgagcagataggcctggatgagagtggtggtggtggcggcagtgaccctggagaggcccccacacgtgctgctcctggggaacttcgttctgcacggggcccactcagctctgcaccagagattgtgcacgaggacttgaagatggggtctgatggggagagtgaccaggcttcagccacgtcctcggatgaggtgcagtctccagtgagagtgcgtatgcgcaaccatcccccacgcaagatctccactgaggacatcaacaagcgcctatcactaccagctgacatccggctgcctgagggctacctggagaagctgaccctcaatagccccatctttgacaagcccctcagccgccgcctccgtcgtgtcagcctatctgagattggctttgggaaactggagacctacattaagctggacaaactgggcgagggtacctatgccaccgtctacaaaggcaaaagcaagctcacagacaaccttgtggcactcaaggagatcagactggaacatgaagagggggcaccctgcaccgccatccgggaagtgtccctgctcaaggacctcaaacacgccaacatcgttacgctacatgacattatccacacggagaagtccctcacccttgtctttgagtacctggacaaggacctgaagcagtacctggatgactgtgggaacatcatcaacatgcacaacgtgaaactgttcctgttccagctgctccgtggcctggcctactgccaccggcagaaggtgctacaccgagacctcaagccccagaacctgctcatcaacgagaggggagagctcaagctggctgactttggcctggcccgagccaagtcaatcccaacaaagacatactccaatgaggtggtgacactgtggtaccggccccctgacatcctgcttgggtccacggactactccactcagattgacatgtggggtgtgggctgcatcttctatgagatggccacaggccgtcccctctttccgggctccacggtggaggaacagctacacttcatcttccgtatcttagtattttgtgcaatgaagccctgctcccagcctttcagagacaggg

SEQ ID NO: 123691 - DNA, 454 bp, Homo sapiens
  Payload ID: 4277
  Gene Symbol: CDK16
  Gene Name: cyclin-dependent kinase 16
  ENST ID: ENST00000523034
  CDS Start-End: 1-454
ccctgagcagataggcctggatgagagtggtggtggtggcggcagtgaccctggagaggcccccacacgtgctgctcctggggaacttcgttctgcacggggcccactcagctctgcaccagagattgtgcacgaggacttgaagatggggtctgatggggagagtgaccaggcttcagccacgtcctcggatgaggtgcagtctccagtgagagacatcaacaagcgcctatcactaccagctgacatccggctgcctgagggctacctggagaagctgaccctcaatagccccatctttgacaagcccctcagccgccgcctccgtcgtgtcagcctatctgagattggctttgggaaactggagacctacattaagctggacaaactgggcgagggtacctatgccaccgtctacaaaggcaaaagcaagctcacagacaaccttgtggca

SEQ ID NO: 123692 - DNA, 664 bp, Homo sapiens
  Payload ID: 4277
  Gene Symbol: CDK16
  Gene Name: cyclin-dependent kinase 16
  ENST ID: ENST00000462827
  CDS Start-End: 1-253
acttgatagcgacggggccgacctcctcaccaagctgttgcagtttgagggtcgaaatcggatctccgcagaggatgccatgaaacatccattcttcctcagtctgggggagcggatccacaaacttcctgacactacttccatatttgcactaaaggagattcagctacaaaaggaggccagccttcggtcttcgtcgatgcctgactcagttgccggtggacagcatggccgtgccagcctcccacactgaggccaggtctaccccccatcataccagcccccaggaccactaccccacggccagccaggggtccagagctagcccaggctggggatctcgactcagacaagatggtgacaatgccttgagtctgaggcatcctctgcctgctttcctgcctgccccacctgcctcatattgtgtgggcctttttttgtttgtttcattcattgtttttttttttttaattattttaaatgagatttttgttttttttaaatgcaatatctctgtatacagactggctgggccccaccccctgcgtgtggccctcccacagtattttgtgcaatgaagccctgctcccagcctttcagagacagggacacagcccctatttggaaccctgatcatcaccagaccctgggattggctatggga

SEQ ID NO: 123693 - DNA, 573 bp, Homo sapiens
  Payload ID: 4277
  Gene Symbol: CDK16
  Gene Name: cyclin-dependent kinase 16
  ENST ID: ENST00000520295
  CDS Start-End: 267-518
tttgtcttttttcctccttgcaaaagtcccgtttgccaccatggggatgtaccaagtgagaccgagtagggggaacgagtggtgattgacgcgccaggttactggccactgctcacctaggcgctagcaaacttctgccaagatcggaactgagtactaaacagcctccacagttctccctggtgccgtctccggcttggcgccgcatcctcctctgggctcgcgatggccgcgtcccctcccgctgcggacgggtcctttggtacatgcagtccgagatcgccatggatcggatgaagaagatcaaacggcagctgtcaatgacactccgaggtggccgaggcatagacaagaccaatggtgcccctgagcagataggcctggatgagagtggtggtggtggcggcagtgaccctggagaggcccccacacgtgctgctcctggggaacttcgttctgcacggggcccactcagctctgcaccagattgtgcacgaggacttgaagatggggtctgatggggagagtgaccaggcttcagccacgtcctcggatgaggtgcagtctccagtg

SEQ ID NO: 123694 - DNA, 498 bp, Homo sapiens
  Payload ID: 4277
  Gene Symbol: CDK16
  Gene Name: cyclin-dependent kinase 16
  ENST ID: ENST00000520141
  CDS Start-End: 1-498
acttgatagcgacggggccgacctcctcaccaagctgttgcagtttgagggtcgaaatcggatctccgcagaggatgccatgaaacatccattcttcctcagtctgggggagcggatccacaaacttcctgacactacttccatatttgcactaaaggagattcagctacaaaaggaggccagccttcggtcttcgtcgatgcctgactcagccatctgctctgctttcccccacaggcaggccagctttccgcgtggtggacaccgagttctaagccacagaccgaggccccagcaggcagcggctggagggatgccacacccctcacagggcagcccccaactacatcttccctgcttactctctgcctacctgcctgagccatgttcacctgcccacttgtcccctgctgcctgcccaaacaccccaccattggcctgtcaacccacccattggcctgtctgctgggtgctaacaaagctctcatcactccttca

SEQ ID NO: 123695 - DNA, 601 bp, Homo sapiens
  Payload ID: 4277
  Gene Symbol: CDK16
  Gene Name: cyclin-dependent kinase 16
  ENST ID: ENST00000522883
  CDS Start-End: 431-601
gaaaagtcatcttctcgcgaacctttaaaatgccttcctccccaagcacctcaagggactagaactgagtgcttcatttgtcttttttcctccttgcaaaagtcccgtttgccaccatggggatgtaccaagtgagaccgagtagggggaacgagtggtgattgacgcgccaggttactggccactgctcacctaggcgctagcaaacttctgccaagatcggaactgagtactaaacagcctccacagttctccctggtgccgtctccggcttggcgccgcatcctcctctgggctcgcgatggccgcgtcccctcccgctgcggacgggtcctttggtacatgcagtccgaggtcctcaggatatagccgtgacctaaacacagaaatctaccctggcggagctgatcttctagttgtggcgatcgccatggatcggatgaagaagatcaaacggcagctgtcaatgacactccgaggtggccgaggcatagacaagaccaatggtgcccctgagcagataggcctggatgagagtggtggtggtggcggcagtgaccctggagaggcccccacacgtgctgctcctggggaacttcgt

SEQ ID NO: 123696 - DNA, 2968 bp, Homo sapiens
  Payload ID: 4277
  Gene Symbol: CDK16
  Gene Name: cyclin-dependent kinase 16
  ENST ID: ENST00000622098
  CDS Start-End: 397-1743
gcggagcgcggcgcgcgcggcggttgggccgttggctgttcggccctgggatccgccgccactccgcgatcagaccgctctgtgccgcgagccgccgtgagcactcggattcaagccggcgccaacgagtccgggggcatcgcccgcagcggccaagctcatggccggctgagcgggacgccgcctccgcctcagccaccgccgccgccgccgcctcctcctcctcagccggcggcggcccgggcccagcaaccatggctgaagactactgggacgggcgcctgcggcgaacaggaggagaaggaggtcgcgcggcctcatcccgggccgccgccccaggcgccgccgcgccggccccgcggctctgaggttgctcgcgcgcccccgccgatcgccatggatcggatgaagaagatcaaacggcagctgtcaatgacactccgctctgcaccagagattgtgcacgaggacttgaagatggggtctgatggggagagtgaccaggcttcagccacgtcctcggatgaggtgcagtctccagtgagagtgcgtatgcgcaaccatcccccacgcaagatctccactgaggacatcaacaagcgcctatcactaccagctgacatccggctgcctgagggctacctggagaagctgaccctcaatagccccatctttgacaagcccctcagccgccgcctccgtcgtgtcagcctatctgagattggctttgggaaactggagacctacattaagctggacaaactgggcgagggtacctatgccaccgtctacaaaggcaaaagcaagctcacagacaaccttgtggcactcaaggagatcagactggaacatgaagagggggcaccctgcaccgccatccgggaagtgtccctgctcaaggacctcaaacacgccaacatcgttacgctacatgacattatccacacggagaagtccctcacccttgtctttgagtacctggacaaggacctgaagcagtacctggatgactgtgggaacatcatcaacatgcacaacgtgaaactgttcctgttccagctgctccgtggcctggcctactgccaccggcagaaggtgctacaccgagacctcaagccccagaacctgctcatcaacgagaggggagagctcaagctggctgactttggcctggcccgagccaagtcaatcccaacaaagacatactccaatgaggtggtgacactgtggtaccggccccctgacatcctgcttgggtccacggactactccactcagattgacatgtggggtgtgggctgcatcttctatgagatggccacaggccgtcccctctttccgggctccacggtggaggaacagctacacttcatcttccgtatcttaggaaccccaactgaggagacgtggccaggcatcctgtccaacgaggagttcaagacatacaactaccccaagtaccgagccgaggcccttttgagccacgcaccccgacttgatagcgacggggccgacctcctcaccaagctgttgcagtttgagggtcgaaatcggatctccgcagaggatgccatgaaacatccattcttcctcagtctgggggagcggatccacaaacttcctgacactacttccatatttgcactaaaggagattcagctacaaaaggaggccagccttcggtcttcgtcgatgcctgactcaggcaggccagctttccgcgtggtggacaccgagttctaagccacagaccgaggccccagcaggcagcggctggagggatgccacacccctcacagggcagcccccaactacatcttccctgcttactctctgcctacctgcctgagccatgttcacctgcccacttgtcccctgctgcctgcccaaacaccccaccattggcctgtcaacccacccattggcctgtctgctgggtgctaacaaagctctcatcactccttcacttggtctgtctgtctctgtcttggtagttgccggtggacagcatggccgtgccagcctcccacactgaggccaggtctaccccccatcataccagcccccaggaccactaccccacggccagccaggggtccagagctagcccaggctggggatctcgactcagacaagatggtgacaatgccttgagtctgaggcatcctctgcctgctttcctgcctgccccacctgcctcatattgtgtgggcctttttttgtttgtttcattcattgtttttttttttttaattattttaaatgagatttttgttttttttaaatgcaatatctctgtatacagactggctgggccccaccccctgcgtgtggccctcccacagtattttgtgcaatgaagccctgctcccagcctttcagagacagggacacagcccctatttggaaccctgatcatcaccagaccctgggattggctatgggaaagcatgccacagccactcgccttcctacccccgcccgccatccccagttgcagggggatctggggactaccagagactctgggaaatggacaaggtggggggccccactctttctctcctgcagtcccgtagctggggcctccttccttctcagggtctccccagcccagtccccttgctcccatcccactcggtgctgttgggtaggggccctgccaggaactgaccagctcagcgaggagccataatgtgcatatgtgcacaagcagggttgggggaggggggtgtgaggggttgtgcccaggtgttgccccctatctcctggggagggtgaggcagggcagggacagtctccagggtcagtccctggatgggtggttacctccccttcctccaccctaagccctggggccctgaaatggggtgggagggcaggggtgggagccctcctagtgggtttggggggttgggttcctgaatgcaccataatcgctgtatgaaatattaaaaagtctaaagtg

SEQ ID NO: 123697 - DNA, 4157 bp, Homo sapiens
  Payload ID: 4278
  Gene Symbol: CDK17
  Gene Name: cyclin-dependent kinase 17
  Uniprot ID: Q00537
  ENST ID: ENST00000261211
  CDS Start-End: 605-2176
gcgggggtggggtaagctcccgcggccggtcgcttttctccgccgccgctggttggatcgtttcaataaaagtgttttttctcttgcactcgctctcctccggggaacaggcggaggcgtcaatccgcagccgccgagtgtgaaagcgacgcacacgcaaggagcgaacgcggccgcccgcagtctcctgagctccccgcgggccgccgcagagccgcggagaaggagccagcgcccggccagacagtctcagcccgccgtcggcgcccgccgcgctcgcgcccggctgctccgaggggattagtgggccgtccgcgcggctcgtcggcgcgggagccatgttgaccgagggacttggcaacgcgtgagacacccgcggcccctcccgaggctccggacccgcggcgagagccggaaggcggctgtggcggcggaggcctgcgctcggaagcgcctcacgtctgccggccgctgagacccggacttgcatccggtcgccgcgggcgtccgcggagcagcttccccccgcgcctctcttcgcctcgcctcgggacccgcggtccccgctcttgctggatttttcaagccacattcaattgataggatgaaaaaatttaagagaaggctatccctcacactccgaggaagtcagactattgatgaatcattgtctgaattggctgaacaaatgactattgaagaaaacagcagcaaggataatgagcctattgtgaagaatggcaggcctccaacgtctcacagtatgcattccttcctccaccagtacacaggatctttcaagaagcccccattgcggagaccacacagtgttattggagggagccttggctccttcatggcaatgcccagaaatggaagcagattagatattgttcatgaaaatctaaaaatgggatcagatggtgagagtgaccaagcttctgggacatcatctgatgaagtccagtcacctacaggtgtttgtctcagaaatcgtatacatagacggatctcaatggaggatttaaataagcggttatcactgcctgcagacatcagaatacctgatggatatcttgaaaagttgcagataaacagtccaccatttgaccaaccaatgagtcgaaggtctcgtagagcttccttatcagaaattggctttggaaaaatggaaacctacatcaaattggaaaagcttggagagggtacatatgcaacagtatataaaggaagaagtaaattgacagagaatttggtggcattaaaagagatccgattggaacatgaagaaggtgcaccctgcacagctataagagaagtttcactattaaaggatttaaaacatgcaaatatagtaaccttacatgacattgttcacacagataaatccttgactttggtgtttgagtatctggataaagacctgaaacagtacatggatgactgtggaaacatcatgagtatgcacaacgtaaagctgtttctgtaccaaattctacgtggtttggcatattgccatagaagaaaggtattgcatcgagacttgaaaccacagaacctcctcattaatgagaaaggagaattaaagctagcagattttggactagcccgagccaagtcagttcccacaaagacctactcaaatgaagttgtcacactatggtaccggccacctgatgtgcttcttggttcctcggagtactcaacacagattgacatgtggggtgttggttgcattttctttgaaatggcttctggaagacctttatttccaggatcaaccgtggaagatgaactgcacttaattttccgactgctaggaactccatctcaggaaacttggccaggtatttcttcaaatgaggagttcaagaactacaactttccaaaatataaaccacagcctctaattaaccacgcacccaggttagactctgaaggaattgagttgataacaaaatttcttcagtatgaatctaagaaaagggtttcagctgaagaggccatgaaacatgtgtactttcgaagtctgggaccaagaatacatgctttaccagaaagtgtatcaatattcagtttgaaagagattcagttgcaaaaggacccgggttttcgaaattcttcttatccagagacaggacatgggaagaacagaagacagagcatgctcttttaagtctgataacatggtttcaagcccagcccccagcctttcttaccaatcaaggactcagaactgaaggcaattatttcttttggtggacttggaatctccgtttgtctacactgtcctcttcacagtggagtctttttatttcagacctacagattgtttttatatttgttgtcacagtgtgacaattttttgtacagtcggttttaaggtcttctctgccattagagccagtaggttacagctattgatgtaactatagctgcaatttttgtgcaggactgagaaacacagtgcattatttattgcggaatcattgctgctaaataactactgtctgtttatttaacacaacaattgaatgcctgaagaagttgcagtggctttattatatgtgaatgcatctgtttctcctcacgaattgttttactgctgcattttttgtttttaaaattaaactgcagtgtttcctggaatgtaaatttagctttgcttaatagtaaaataagtgagccatcttgaacactttaagtttatactatataatttcttaatgaacattggcaaatagagtagctaagagattgacaagcacattacgtttagataagcatgtgatgcagaagttgattcaagcaagtgaatccctgacattttgaggatctcacattagacaccaacaaattaaagctccaaaattatttattttttatgtgttcctcactttagaaacgtctactgcatattactggatatttgtatactaatacacttacctattttacattgtgttttaaatttagttaaaacttaaccgtagaagtctgttcaaacgcgaaaggtcttgctttgtttgttttaaatacatttattttattagaaaggatgatatttcattggggaatagtttctttcatttgggggctatgtgtttcaataacattcacttggaatcagctgaaagctgtaatatgtctttgaaatgagccatgataaattacaaacaagagaaatgagaacttacaggattgcttgaaattattgtgggtattatctgtttaccagagatactaaatattagttttaattatgcatctctttgaacatcataaacacactttggtgttggtaacagtattttaagcatttttgttcacttttaaggactatttgtttagtgcatcttacaaactataaatcttaattggtatattttgaaatggtcgtgtaaatttttgccttatatatcatgaaaatagtcataacttaatttcttttcctgaaattcactgtaaaacattcaggggtcctaccatttctgttcaggaaatcttgtagtttattgttgttatttaacagtattaagtggatttttgtatatttcattttaactttatttgtgaatagtgattgtggcatgtttggggtgttattttaatatttcacgatactaaaattttaattttaaaaaattctggaagaaacagattcatgtgtaatggtgaatattggaccactactgcttttcacatttgtaaattggttttatgttaaaccttgtagcctaacaaactgctgttctttctaactgacagacatgtattaatattgtactttgaaggttataaatatgtggaaattccttcattttgttttgaaatttataataacaaaatctccatgttgttaaaatgtggttttattgagtcacagttctttcttggggatgaaggctgtgccgagtggggtccttttcttttatgggtcgttcttaagataatgaagtctcactgtgctagaggtgttattgttttctgtttgtgccaatcatttgcttagtaatttctgctgggttttttttatagcactctcaattataaagtatcaaatttgtcacttcatagaatgtatatttgatttgttgcaaatttgacattatagcttttcataggcttaattcttgcgtataaaagatgaaaatata

SEQ ID NO: 123698 - DNA, 1769 bp, Homo sapiens
  Payload ID: 4278
  Gene Symbol: CDK17
  Gene Name: cyclin-dependent kinase 17
  ENST ID: ENST00000542666
  CDS Start-End: 131-1543
gcatccggtcgccgcgggcgtccgcggagcagcttccccccgcgcctctcttcgcctcgcctcgggacccgcggtccccgctcttgctgagcctattgtgaagaatggcaggcctccaacgtctcacagtatgcattccttcctccaccagtacacaggatctttcaagaagcccccattgcggagaccacacagtgttattggagggagccttggctccttcatggcaatgcccagaaatggaagcagattagatattgttcatgaaaatctaaaaatgggatcagatggtgagagtgaccaagcttctgggacatcatctgatgaagtccagtcacctacaggtgtttgtctcagaaatcgtatacatagacggatctcaatggaggatttaaataagcggttatcactgcctgcagacatcagaatacctgatggatatcttgaaaagttgcagataaacagtccaccatttgaccaaccaatgagtcgaaggtctcgtagagcttccttatcagaaattggctttggaaaaatggaaacctacatcaaattggaaaagcttggagagggtacatatgcaacagtatataaaggaagaagtaaattgacagagaatttggtggcattaaaagagatccgattggaacatgaagaaggtgcaccctgcacagctataagagaagtttcactattaaaggatttaaaacatgcaaatatagtaaccttacatgacattgttcacacagataaatccttgactttggtgtttgagtatctggataaagacctgaaacagtacatggatgactgtggaaacatcatgagtatgcacaacgtaaagctgtttctgtaccaaattctacgtggtttggcatattgccatagaagaaaggtattgcatcgagacttgaaaccacagaacctcctcattaatgagaaaggagaattaaagctagcagattttggactagcccgagccaagtcagttcccacaaagacctactcaaatgaagttgtcacactatggtaccggccacctgatgtgcttcttggttcctcggagtactcaacacagattgacatgtggggtgttggttgcattttctttgaaatggcttctggaagacctttatttccaggatcaaccgtggaagatgaactgcacttaattttccgactgctaggaactccatctcaggaaacttggccaggtatttcttcaaatgaggagttcaagaactacaactttccaaaatataaaccacagcctctaattaaccacgcacccaggttagactctgaaggaattgagttgataacaaaatttcttcagtatgaatctaagaaaagggtttcagctgaagaggccatgaaacatgtgtactttcgaagtctgggaccaagaatacatgctttaccagaaagtgtatcaatattcagtttgaaagagattcagttgcaaaaggacccgggttttcgaaattcttcttatccagagacaggtgtgtttgtcataaaccatttcacgtgtcgatcatgaatttttgcgtggaaccaagcttttggtttataaattgatcagtaaaattattgatgtaaaaaccaatgtacagtgcattccacaactgtttatgtttagcattgcacgtactcacttttctgtatgatgtgggcagctcagtaaatcttcagagaaaaatctgactcagtcaagtcagggatcctgaaagctgcagatggcacaaagaccttttacaagtgacctg

SEQ ID NO: 123699 - DNA, 2442 bp, Homo sapiens
  Payload ID: 4278
  Gene Symbol: CDK17
  Gene Name: cyclin-dependent kinase 17
  Uniprot ID: Q00537
  ENST ID: ENST00000543119
  CDS Start-End: 525-2096
ctcttgcactcgctctcctccggggaacaggcggaggcgtcaatccgcagccgccgagtgtgaaagcgacgcacacgcaaggagcgaacgcggccgcccgcagtctcctgagctccccgcgggccgccgcagagccgcggagaaggagccagcgcccggccagacagtctcagcccgccgtcggcgcccgccgcgctcgcgcccggctgctccgaggggattagtgggccgtccgcgcggctcgtcggcgcgggagccatgttgaccgagggacttggcaacgcgtgagacacccgcggcccctcccgaggctccggacccgcggcgagagccggaaggcggctgtggcggcggaggcctgcgctcggaagcgcctcacgtctgccggccgctgagacccggacttgcatccggtcgccgcgggcgtccgcggagcagcttccccccgcgcctctcttcgcctcgcctcgggacccgcggtccccgctcttgctggatttttcaagccacattcaattgataggatgaaaaaatttaagagaaggctatccctcacactccgaggaagtcagactattgatgaatcattgtctgaattggctgaacaaatgactattgaagaaaacagcagcaaggataatgagcctattgtgaagaatggcaggcctccaacgtctcacagtatgcattccttcctccaccagtacacaggatctttcaagaagcccccattgcggagaccacacagtgttattggagggagccttggctccttcatggcaatgcccagaaatggaagcagattagatattgttcatgaaaatctaaaaatgggatcagatggtgagagtgaccaagcttctgggacatcatctgatgaagtccagtcacctacaggtgtttgtctcagaaatcgtatacatagacggatctcaatggaggatttaaataagcggttatcactgcctgcagacatcagaatacctgatggatatcttgaaaagttgcagataaacagtccaccatttgaccaaccaatgagtcgaaggtctcgtagagcttccttatcagaaattggctttggaaaaatggaaacctacatcaaattggaaaagcttggagagggtacatatgcaacagtatataaaggaagaagtaaattgacagagaatttggtggcattaaaagagatccgattggaacatgaagaaggtgcaccctgcacagctataagagaagtttcactattaaaggatttaaaacatgcaaatatagtaaccttacatgacattgttcacacagataaatccttgactttggtgtttgagtatctggataaagacctgaaacagtacatggatgactgtggaaacatcatgagtatgcacaacgtaaagctgtttctgtaccaaattctacgtggtttggcatattgccatagaagaaaggtattgcatcgagacttgaaaccacagaacctcctcattaatgagaaaggagaattaaagctagcagattttggactagcccgagccaagtcagttcccacaaagacctactcaaatgaagttgtcacactatggtaccggccacctgatgtgcttcttggttcctcggagtactcaacacagattgacatgtggggtgttggttgcattttctttgaaatggcttctggaagacctttatttccaggatcaaccgtggaagatgaactgcacttaattttccgactgctaggaactccatctcaggaaacttggccaggtatttcttcaaatgaggagttcaagaactacaactttccaaaatataaaccacagcctctaattaaccacgcacccaggttagactctgaaggaattgagttgataacaaaatttcttcagtatgaatctaagaaaagggtttcagctgaagaggccatgaaacatgtgtactttcgaagtctgggaccaagaatacatgctttaccagaaagtgtatcaatattcagtttgaaagagattcagttgcaaaaggacccgggttttcgaaattcttcttatccagagacaggtgtgtttgtcataaaccatttcacgtgtcgatcatgaatttttgcgtggaaccaagcttttggtttataaattgatcagtaaaattattgatgtaaaaaccaatgtacagtgcattccacaactgtttatgtttagcattgcacgtactcacttttctgtatgatgtgggcagctcagtaaatcttcagagaaaaatctgactcagtcaagtcagggatcctgaaagctgcagatggcacaaagaccttttacaagtgacctggcttgatcactgcacacgccatccctggtacctgaggcagaagacacatcttgtgcttccctagtcatcaggttcatcacttcgaagcatagaagctgtagactgaccccgtcaacagaa

SEQ ID NO: 123700 - DNA, 583 bp, Homo sapiens
  Payload ID: 4278
  Gene Symbol: CDK17
  Gene Name: cyclin-dependent kinase 17
  ENST ID: ENST00000552496
  CDS Start-End: 101-583
aaagatcagggcagcctcctgctggcgggtcacaccccggagtgttggtcaagagcggaggtagagggaaggatttttcaagccacattcaattgataggatgaaaaaatttaagagaaggctatccctcacactccgaggaagtcagactattgatgaatcattgtctgaattggctgaacaaatgactattgaagaaaacagcagcaaggataatgagcctattgtgaagaatggcaggcctccaacgtctcacagtatgcattccttcctccaccagtacacaggatctttcaagaagcccccattgcggagaccacacagtgttattggagggagccttggctccttcatggcaatgcccagaaatggaagcagattagatattgttcatgaaaatctaaaaatgggatcagatggtgagagtgaccaagcttctgggacatcatctgatgaagtccagtcacctacaggtgtttgtctcagaaatcgtatacatagacggatctcaatggaggatttaaataagcggttatcactgcctgcagacatcagaatacctgatggatatcttgaaaagttg

SEQ ID NO: 123701 - DNA, 556 bp, Homo sapiens
  Payload ID: 4278
  Gene Symbol: CDK17
  Gene Name: cyclin-dependent kinase 17
  ENST ID: ENST00000548734
  CDS Start-End: 169-556
atataatgattgatatttatgttatggaacctaagcatcaaaataatattgatattttactataatggtttttaaaatacacattttaagaaaatttccaatccttctaaacttatttgtgatgcttaaagtcccactctttagttacatggaattcctgctcttctgatgatgccaaataaatacagcattattcggagatttttcaagccacattcaattgataggatgaaaaaatttaagagaaggctatccctcacactccgaggaagtcagactattgatgaatcattgtctgaattggctgaacaaatgactattgaagaaaacagcagcaaggataatgagcctattgtgaagaatggcaggcctccaacgtctcacagtatgcattccttcctccaccagtacacaggatctttcaagaagcccccattgcggagaccacacagtgttattggagggagccttggctccttcatggcaatgcccagaaatggaagcagattagatattgttcatgaaaatctaaaaatgggatcagatggtgagagtg

SEQ ID NO: 123702 - DNA, 566 bp, Homo sapiens
  Payload ID: 4278
  Gene Symbol: CDK17
  Gene Name: cyclin-dependent kinase 17
  ENST ID: ENST00000552262
  CDS Start-End: 302-566
agtgttggtcaagagcggaggtagagggaaggtgggaaacccagcaaaccgatggggaggggaaaatggggggaggagggtgcctagtgctgtctccgtcgcagttgcttttctcagcatttttgtgcccgatgctatgcccgatgcttttgctccccaactcagctggatagctccagattccctccctcctgtcacccccacactgccacattgactctcctgtggtttttccctcgttctccccctacttttcacccactccttttcgggatttttcaagccacattcaattgataggatgaaaaaatttaagagaaggctatccctcacactccgaggaagtcagactattgatgaatcattgtctgaattggctgaacaaatgactattgaagaaaacagcagcaaggataatgagcctattgtgaagaatggcaggcctccaacgtctcacagtatgcattccttcctccaccagtacacaggatctttcaagaagcccccattgcggagaccacacagtgttattggagggagccttggctccttcatggcaatgccca

SEQ ID NO: 123703 - DNA, 626 bp, Homo sapiens
  Payload ID: 4278
  Gene Symbol: CDK17
  Gene Name: cyclin-dependent kinase 17
  ENST ID: ENST00000551816
  CDS Start-End: 90-626
aaagatcagggcagcctcctgctggcgggtcacaccccggagtgttggtcaagagcggaggatttttcaagccacattcaattgataggatgaaaaaatttaagagaaggctatccctcacactccgaggaagtcagactattgatgaatcattgtctgaattggctgaacaaatgactattgaagaaaacagcagcaaggataatgagcctattgtgaagaatggcaggcctccaacgtctcacagtatgcattccttcctccaccagtacacaggatctttcaagaagcccccattgcggagaccacacagtgttattggagggagccttggctccttcatggcaatgcccagaaatggaagcagattagatattgttcatgaaaatctaaaaatgggatcagatggtgagagtgaccaagcttctgggacatcatctgatgaagtccagtcacctacaggtgtttgtctcagaaatcgtatacatagacggatctcaatggaggatttaaataagcggttatcactgcctgcagacatcagaatacctgatggatatcttgaaaagttgcagataaacagtccaccatttgaccaaccaatgagtcgaaggtctcgtagagct

SEQ ID NO: 123704 - DNA, 3141 bp, Homo sapiens
  Payload ID: 4279
  Gene Symbol: CDK18
  Gene Name: cyclin-dependent kinase 18
  Uniprot ID: Q07002
  ENST ID: ENST00000360066
  CDS Start-End: 302-1726
cttcctcctcctcctcctcctcctcctccctcctcttccccaccttcctccactccctcccttcccctccccttctacctcctcctcggccagctcaggttgcagcttctctggggaactgctcacctttccggagcaggggaagctgccccgtgcccgggagggagcgggcgcaccgcggcccccaggacacgcgctgtgagtcccgcgggcggtgcgcctgggaggaagggggaggtcggaggagcgggcaccgcggcgccgggtataaggagcaaaggacccggctgcccagtccctcatgatcatgaacaagatgaagaactttaagcgccgtttctccctgtcagtgccccgcactgagaccattgaagaatccttggctgaattcacggagcaattcaaccagctccacaaccggcggaatgagaacttgcagctcggtcctcttggcagagaccccccgcaggagtgcagcaccttctccccaacagacagcggggaggagccggggcagctctcccctggcgtgcagttccagcggcggcagaaccagcgccgcttctccatggaggacgtcagcaagaggctctctctgcccatggatatccgcctgccccaggaattcctacagaagctacagatggagagcccagatctgcccaagccgctcagccgcatgtcccgccgggcctccctgtcagacattggctttgggaaactggaaacatacgtgaaactggacaaactgggagagggcacctatgccacagtcttcaaagggcgcagcaaactgacggagaaccttgtggccctgaaagagatccggctggagcacgaggagggagcgccctgcactgccatccgagaggtgtctctgctgaagaacctgaagcacgccaatattgtgaccctgcatgacctcatccacacagatcggtccctcaccctggtgtttgagtacctggacagtgacctgaagcagtatctggaccactgtgggaacctcatgagcatgcacaacgtcaagattttcatgttccagctgctccggggcctcgcctactgtcaccaccgcaagatcctgcaccgggacctgaagccccagaacctgctcatcaacgagaggggggagctgaagctggccgactttggactggccagggccaagtcagtgcccacaaagacttactccaatgaggtggtgaccctgtggtacaggccccccgatgtgctgctgggatccacagagtactccacccccattgatatgtggggcgtgggctgcatccactacgagatggccacagggaggcccctcttcccgggctccacagtcaaggaggagctgcacctcatctttcgcctcctcgggacccccacagaagagacgtggcccggcgtgaccgccttctctgagttccgcacctacagcttcccctgctacctcccgcagccgctcatcaaccacgcgcccaggttggatacggatggcatccacctcctgagcagcctgctcctgtatgaatccaagagtcgcatgtcagcagaggctgccctgagtcactcctacttccggtctctgggagagcgtgtgcaccagcttgaagacactgcctccatcttctccctgaaggagatccagctccagaaggacccaggctaccgaggcttggccttccagcagccaggacgagggaagaacaggcggcagagcatcttctgagccacgcccaccttgctgtggccaagggacaagagatcacatggagcacaaattcgggtaggatggagcctgtgtggccctcggaggactgaagaacgagggctgacagccagcctggaagaccgcttggcagcccttctggccacggctgtttcttctttgtgcttcccgtgtgcctccccagtagccctcacctgcataccaacccctcctttacccacgttggggctggcataagctgcttccctgagaggacatgaggggggggcggtcctcgtaccctctcccaccctggtgtttgggcacctgcgtgggatgcacacggatgacagaatcaaggcgccaggatgggcactctgccctggatacaggctctaccctcctcccccaggacctgcctagtgccagtttggtagtccccctttctggccccttggagcccacacacgtttcatctttttcccctctgagagcaagaagagacatggcatgttctctgggaccctggaatcctaggtacccacatgtgtgccaaagcctaccccacctggcaggtgtcccacagcaacagaaggaatagtagtccccactctttccatcagccctaccctaccctcattccccgacaccctctggcttgaaccatggctgagcagtgccggcatacgctttgctggcatgcttggatgcccagctgtgtccagaggtggcctgggaccgccagttgcacgcctgccacctcagccagcccccgcccagctcatcagtctgaatggagttgccttaaattggcaggtggtaccgtactcactgcccttggagctgtgaccggctcctgcctgtccaccccttcccgaggtggctcctgcttaccttatcatcccagggctctgattagccaggcctggtcagggtcctggggacggcacccagatatgcagagtcaccctgacactggtgccaggctgacctcagctcccgaaggctcgcacagcctccccatccttccttcccagcccttgtggctctgtccacctgatcccaataccagcttcccccagcccctgccaccccagagggcggccacgacagggagaggtgtagatgccaccatctgagggagaggaacgtggaacaggagcaggctctgatgctgagaggcttgcctccgggggctggaagcctgggtggccggggcccctgaagaaggctcccctctgtatcccccaggtctcctcaacactgggctgatcctgaatggcacaggccaaggggaggccagcctcgcctttctacccaggccccctgccctgcccacctcaggcccccaccctccactcctccccacggtactgtgaacgtcgtgtgactcagtgcagagacagataatatatttaattcatgtacagaaagga

SEQ ID NO: 123705 - DNA, 949 bp, Homo sapiens
  Payload ID: 4279
  Gene Symbol: CDK18
  Gene Name: cyclin-dependent kinase 18
  ENST ID: ENST00000419301
  CDS Start-End: 99-949
tcccgcgggcggtgcgcctgggaggaagggggaggtcggaggagcgggcaccgcggcgccgggtataaggagcaaaggacccggctgcccagtccctcatgatcatgaacaagatgaagaactttaagcgccgtttctccctgtcagtgccccgcactgagaccattgaagaatccttggctgaattcacggagcaattcaaccagctccacaaccggcggaatgagaacttgcagctcggtcctcttggcagagaccccccgcaggagtgcagcaccttctccccaacagacagcggggaggagccggggcagctctcccctggcgtgcagttccagcggcggcagaaccagcgccgcttctccatggaggtaagggcctctggagctctgccccggcaggtggcaggatgcacgcacaagggtgtgcacaggagggcagctgccttacagccagactttgacgtcagcaagaggctctctctgcccatggatatccgcctgccccaggaattcctacagaagctacagatggagagcccagatctgcccaagccgctcagccgcatgtcccgccgggcctccctgtcagacattggctttgggaaactggaaacatacgtgaaactggacaaactgggagagggcacctatgccacagtcttcaaagggcgcagcaaactgacggagaaccttgtggccctgaaagagatccggctggagcacgaggagggagcgccctgcactgccatccgagaggtgtctctgctgaagaacctgaagcacgccaatattgtgaccctgcatgacctcatccacacagatcggtccctcaccctggtgtttgagtacctggacagtgacctgaagcagtatctggaccactgtgggaacctcatgagcatgcacaacgtcaagattttcatgttccagctgctccggggcctcgc

SEQ ID NO: 123706 - DNA, 591 bp, Homo sapiens
  Payload ID: 4279
  Gene Symbol: CDK18
  Gene Name: cyclin-dependent kinase 18
  ENST ID: ENST00000443813
  CDS Start-End: 114-591
ttctctggggaactgctcacctttccggagcaggggaagctgccccgtgcccgggagggagcgggcgcaccgcggcccccaggacacgcgctgacccggctgcccagtccctcatgatcatgaacaagatgaagaactttaagcgccgtttctccctgtcagtgccccgcactgagaccattgaagaatccttggctgaattcacggagcaattcaaccagctccacaaccggcggaatgagaacagcggggaggagccggggcagctctcccctggcgtgcagttccagcggcggcagaaccagcgccgcttctccatggaggtaagggcctctggagctctgccccggcaggtggcaggatgcacgcacaagggtgtgcacaggagggcagctgccttacagccagactttgacgtcagcaagaggctctctctgcccatggatatccgcctgccccaggaattcctacagaagctacagatggagagcccagatctgcccaagccgctcagccgcatgtcccgccgggcctccctgtcagacattggctttgggaaactggaaacatacgtgaaactggacaaactgg

SEQ ID NO: 123707 - DNA, 1648 bp, Homo sapiens
  Payload ID: 4279
  Gene Symbol: CDK18
  Gene Name: cyclin-dependent kinase 18
  Uniprot ID: Q07002
  ENST ID: ENST00000429964
  CDS Start-End: 224-1648
tttccttcctcctcctcctcctcctcctcctccctcctcttccccaccttcctccactccctcccttcccctccccttctacctcctcctcggccagctcaggttgcagcttctctggggaactgctcacctttccggagcaggggaagctgccccgtgcccgggagggagcgggcgcaccgcggcccccaggacacgcgctgacccggctgcccagtccctcatgatcatgaacaagatgaagaactttaagcgccgtttctccctgtcagtgccccgcactgagaccattgaagaatccttggctgaattcacggagcaattcaaccagctccacaaccggcggaatgagaacttgcagctcggtcctcttggcagagaccccccgcaggagtgcagcaccttctccccaacagacagcggggaggagccggggcagctctcccctggcgtgcagttccagcggcggcagaaccagcgccgcttctccatggaggacgtcagcaagaggctctctctgcccatggatatccgcctgccccaggaattcctacagaagctacagatggagagcccagatctgcccaagccgctcagccgcatgtcccgccgggcctccctgtcagacattggctttgggaaactggaaacatacgtgaaactggacaaactgggagagggcacctatgccacagtcttcaaagggcgcagcaaactgacggagaaccttgtggccctgaaagagatccggctggagcacgaggagggagcgccctgcactgccatccgagaggtgtctctgctgaagaacctgaagcacgccaatattgtgaccctgcatgacctcatccacacagatcggtccctcaccctggtgtttgagtacctggacagtgacctgaagcagtatctggaccactgtgggaacctcatgagcatgcacaacgtcaagattttcatgttccagctgctccggggcctcgcctactgtcaccaccgcaagatcctgcaccgggacctgaagccccagaacctgctcatcaacgagaggggggagctgaagctggccgactttggactggccagggccaagtcagtgcccacaaagacttactccaatgaggtggtgaccctgtggtacaggccccccgatgtgctgctgggatccacagagtactccacccccattgatatgtggggcgtgggctgcatccactacgagatggccacagggaggcccctcttcccgggctccacagtcaaggaggagctgcacctcatctttcgcctcctcgggacccccacagaagagacgtggcccggcgtgaccgccttctctgagttccgcacctacagcttcccctgctacctcccgcagccgctcatcaaccacgcgcccaggttggatacggatggcatccacctcctgagcagcctgctcctgtatgaatccaagagtcgcatgtcagcagaggctgccctgagtcactcctacttccggtctctgggagagcgtgtgcaccagcttgaagacactgcctccatcttctccctgaaggagatccagctccagaaggacccaggctaccgaggcttggccttccagcagccaggacgagggaagaacaggcggcagagcatcttctga

SEQ ID NO: 123708 - DNA, 1134 bp, Homo sapiens
  Payload ID: 4279
  Gene Symbol: CDK18
  Gene Name: cyclin-dependent kinase 18
  ENST ID: ENST00000512922
  CDS Start-End: 229-447
ttccttcctcctcctcctcctcctcctcctccctcctcttccccaccttcctccactccctcccttcccctccccttctacctcctcctcggccagctcaggttgcagcttctctggggaactgctcacctttccggagcaggggaagctgccccgtgcccgggagggagcgggcgcaccgcggcccccaggacacgcgctgacccggctgcccagtccctcatgatcatgaacaagatgaagaactttaagcgccgtttctccctgtcagtgccccgcactgagaccattgaagaatccttggctgaattcacggagcaattcaaccagctccacaaccggcggaatgagagtgaggggtctgggcccacccagcacctctcccacctaccagacactccccagtcaccttcccctccccgcccaccccctccccactggccttaggggaggagcacagcgctgggggaggggggctacccttctctccctcaggacagagaggcagggaggggagctgacgcctgtccctcttagacttgcagctcggtcctcttggcagagaccccccgcaggagtgcagcaccttctccccaacagacagcggggaggagccggggcagctctcccctggcgtgcagttccagcggcggcagaaccagcgccgcttctccatggaggacgtcagcaagaggctctctctgcccatggatatccgcctgccccaggaattcctacagaagctacagatggagagcccagatctgcccaagccgctcagccgcatgtcccgccgggcctccctgtcagacattggctttgggaaactggaaacatacgtgaaactggacaaactgggagagggcacctatgccacagtcttcaaagggcgcagcaaactgacggagaaccttgtggccctgaaagagatccggctggagcacgaggagggagcgccctgcactgccatccgagaggtgtctctgctgaagaacctgaagcacgccaatattgtgaccctgcatgacctcatccacacagatcggtccctcaccctggtgtttgagtacctggacagtgacctgaagcagtatctggaccactgtgggaacctcatgagcatgcacaacgtca

SEQ ID NO: 123709 - DNA, 794 bp, Homo sapiens
  Payload ID: 4279
  Gene Symbol: CDK18
  Gene Name: cyclin-dependent kinase 18
  ENST ID: ENST00000462976
  CDS Start-End: 219-437
ccagctcaggttgcagcttctctggggaactgctcacctttccggagcaggggaagctgccccgtgcccgggagggagcgggcgcaccgcggcccccaggacacgcgctgtgagtcccgcgggcggtgcgcctgggaggaagggggaggtcggaggagcgggcaccgcggcgccgggtataaggagcaaaggacccggctgcccagtccctcatgatcatgaacaagatgaagaactttaagcgccgtttctccctgtcagtgccccgcactgagaccattgaagaatccttggctgaattcacggagcaattcaaccagctccacaaccggcggaatgagagtgaggggtctgggcccacccagcacctctcccacctaccagacactccccagtcaccttcccctccccgcccaccccctccccactggccttaggggaggagcacagcgctgggggaggggggctacccttctctccctcaggacagagaggcagggaggggagctgacgcctgtccctcttagacttgcagctcggtcctcttggcagagaccccccgcaggagtgcagcaccttctccccaacagacagcggggaggagccggggcagctctcccctggcgtgcagttccagcggcggcagaaccagcgccgcttctccatggaggacgtcagcaagaggctctctctgcccatggatatccgcctgccccaggaattcctacagaagctacagatggagagcccagatctgcccaagccgctcagccgcatgtcccgccgggcctccc

SEQ ID NO: 123710 - DNA, 782 bp, Homo sapiens
  Payload ID: 4279
  Gene Symbol: CDK18
  Gene Name: cyclin-dependent kinase 18
  ENST ID: ENST00000478560
  CDS Start-End: 241-782
caggttgcagcttctctggggaactgctcacctttccggagcaggggaagctgccccgtgcccgggagggagcgggcgcaccgcggcccccaggacacgcgctacttgcagctcggtcctcttggcagagaccccccgcaggagtgcagcaccttctccccaacagacagcggggaggagccggggcagctctcccctggcgtgcagttccagcggcggcagaaccagcgccgcttctccatggaggacgtcagcaagaggctctctctgcccatggatatccgcctgccccaggaattcctacagaagctacagatggagagcccagatctgcccaagccgctcagccgcatgtcccgccgggcctccctgtcagacattggctttgggaaactggaaacatacgtgaaactggacaaactgggagagggcacctatgccacagtcttcaaagggcgcagcaaactgacggagaaccttgtggccctgaaagagatccggctggagcacgaggagggagcgccctgcactgccatccgagaggtgtctctgctgaagaacctgaagcacgccaatattgtgaccctgcatgacctcatccacacagatcggtccctcaccctggtgtttgagtacctggacagtgacctgaagcagtatctggaccactgtgggaacctcatgagcatgcacaacgtcaagattttcatgttccagctgctccggggcctcgcctactgtcaccaccgcaagatcctgcaccgggacctgaagccccagaa

SEQ ID NO: 123711 - DNA, 2143 bp, Homo sapiens
  Payload ID: 4279
  Gene Symbol: CDK18
  Gene Name: cyclin-dependent kinase 18
  Uniprot ID: Q07002
  ENST ID: ENST00000506784
  CDS Start-End: 221-1735
ccttcctcctcctcctcctcctcctcctccctcctcttccccaccttcctccactccctcccttcccctccccttctacctcctcctcggccagctcaggttgcagcttctctggggaactgctcacctttccggagcaggggaagctgccccgtgcccgggagggagcgggcgcaccgcggcccccaggacacgcgctgacccggctgcccagtccctcatgatcatgaacaagatgaagaactttaagcgccgtttctccctgtcagtgccccgcactgagaccattgaagaatccttggctgaattcacggagcaattcaaccagctccacaaccggcggaatgagaacttgcagctcggtcctcttggcagagaccccccgcaggagtgcagcaccttctccccaacagacagcggggaggagccggggcagctctcccctggcgtgcagttccagcggcggcagaaccagcgccgcttctccatggaggtaagggcctctggagctctgccccggcaggtggcaggatgcacgcacaagggtgtgcacaggagggcagctgccttacagccagactttgacgtcagcaagaggctctctctgcccatggatatccgcctgccccaggaattcctacagaagctacagatggagagcccagatctgcccaagccgctcagccgcatgtcccgccgggcctccctgtcagacattggctttgggaaactggaaacatacgtgaaactggacaaactgggagagggcacctatgccacagtcttcaaagggcgcagcaaactgacggagaaccttgtggccctgaaagagatccggctggagcacgaggagggagcgccctgcactgccatccgagaggtgtctctgctgaagaacctgaagcacgccaatattgtgaccctgcatgacctcatccacacagatcggtccctcaccctggtgtttgagtacctggacagtgacctgaagcagtatctggaccactgtgggaacctcatgagcatgcacaacgtcaagattttcatgttccagctgctccggggcctcgcctactgtcaccaccgcaagatcctgcaccgggacctgaagccccagaacctgctcatcaacgagaggggggagctgaagctggccgactttggactggccagggccaagtcagtgcccacaaagacttactccaatgaggtggtgaccctgtggtacaggccccccgatgtgctgctgggatccacagagtactccacccccattgatatgtggggcgtgggctgcatccactacgagatggccacagggaggcccctcttcccgggctccacagtcaaggaggagctgcacctcatctttcgcctcctcgggacccccacagaagagacgtggcccggcgtgaccgccttctctgagttccgcacctacagcttcccctgctacctcccgcagccgctcatcaaccacgcgcccaggttggatacggatggcatccacctcctgagcagcctgctcctgtatgaatccaagagtcgcatgtcagcagaggctgccctgagtcactcctacttccggtctctgggagagcgtgtgcaccagcttgaagacactgcctccatcttctccctgaaggagatccagctccagaaggacccaggctaccgaggcttggccttccagcagccaggacgagggaagaacaggcggcagagcatcttctgagccacgcccaccttgctgtggccaagggacaagagatcacatggagcacaaattcgggtaggatggagcctgtgtggccctcggaggactgaagaacgagggctgacagccagcctggaagaccgcttggcagcccttctggccacggctgtttcttctttgtgcttcccgtgtgcctccccagtagccctcacctgcataccaacccctcctttacccacgttggggctggcataagctgcttccctgagaggacatgaggggggggcggtcctcgtaccctctcccaccctggtgtttgggcacctgcgtgggatgcacacggatgacagaatcaaggcgccaggatgggcactctgccctggatacaggctctaccctcctcccccaggacctgcctagtgccag

SEQ ID NO: 123712 - DNA, 2435 bp, Homo sapiens
  Payload ID: 4279
  Gene Symbol: CDK18
  Gene Name: cyclin-dependent kinase 18
  ENST ID: ENST00000504648
  CDS Start-End: 448-666
tccttcctcctcctcctcctcctcctcctccctcctcttccccaccttcctccactccctcccttcccctccccttctacctcctcctcggccagctcaggttgcagcttctctggggaactgctcacctttccggagcaggggaagctgccccgtgcccgggagggagcgggcgcaccgcggcccccaggacacgcgctgtgagtcccgcgggcggtgcgcctgggaggaagggggaggtcggaggagcgggcaccgcggcgccgggtataaggagcaaagaagacacaaccctggctcccagtgatggtggcatacagggcgacagagcttgatgagagagctgaattcccagtgggtggagacctggactggttgccttgttcttttcaactgctcttctcacacttcccatctcaggacccggctgcccagtccctcatgatcatgaacaagatgaagaactttaagcgccgtttctccctgtcagtgccccgcactgagaccattgaagaatccttggctgaattcacggagcaattcaaccagctccacaaccggcggaatgagagtgaggggtctgggcccacccagcacctctcccacctaccagacactccccagtcaccttcccctccccgcccaccccctccccactggccttaggggaggagcacagcgctgggggaggggggctacccttctctccctcaggacagagaggcagggaggggagctgacgcctgtccctcttagacttgcagctcggtcctcttggcagagaccccccgcaggagtgcagcaccttctccccaacagacagcggggaggagccggggcagctctcccctggcgtgcagttccagcggcggcagaaccagcgccgcttctccatggaggacgtcagcaagaggctctctctgcccatggatatccgcctgccccaggaattcctacagaagctacagatggagagcccagatctgcccaagccgctcagccgcatgtcccgccgggcctccctgtcagacattggctttgggaaactggaaacatacgtgaaactggacaaactgggagagggcacctatgccacagtcttcaaagggcgcagcaaactgacggagaaccttgtggccctgaaagagatccggctggagcacgaggagggagcgccctgcactgccatccgagaggtgtctctgctgaagaacctgaagcacgccaatattgtgaccctgcatgacctcatccacacagatcggtccctcaccctggtgtttgagtacctggacagtgacctgaagcagtatctggaccactgtgggaacctcatgagcatgcacaacgtcaagattttcatgttccagctgctccggggcctcgcctactgtcaccaccgcaagatcctgcaccgggacctgaagccccagaacctgctcatcaacgagaggggggagctgaagctggccgactttggactggccagggccaagtcagtgcccacaaagacttactccaatgaggtggtgaccctgtggtacaggccccccgatgtgctgctgggatccacagagtactccacccccattgatatgtggggcgtgggctgcatccactacgagatggccacagggaggcccctcttcccgggctccacagtcaaggaggagctgcacctcatctttcgcctcctcgggacccccacagaagagacgtggcccggcgtgaccgccttctctgagttccgcacctacagcttcccctgctacctcccgcagccgctcatcaaccacgcgcccaggttggatacggatggcatccacctcctgagcagcctgctcctgtatgaatccaagagtcgcatgtcagcagaggctgccctgagtcactcctacttccggtctctgggagagcgtgtgcaccagcttgaagacactgcctccatcttctccctgaaggagatccagctccagaaggacccaggctaccgaggcttggccttccagcagccaggacgagggaagaacaggcggcagagcatcttctgagccacgcccaccttgctgtggccaagggacaagagatcacatggagcacaaattcgggtaggatggagcctgtgtggccctcggaggactgaagaacgagggctgacagccagcctggaagaccgcttggcagcccttctggccacggctgtttcttctttgtgcttcccgtgtgcctccccagtagccctcacctgcataccaacccctcctttacccacgttggggctggcataagctgcttccctgagaggacatgaggggggggcggtcctcgtaccctctcccaccctggtgtttgggcacctgcgtgggatgcacacggatgacagaatcaaggcgccaggatgggcactctgccctggatacaggctctaccctcct

SEQ ID NO: 123713 - DNA, 3756 bp, Homo sapiens
  Payload ID: 4279
  Gene Symbol: CDK18
  Gene Name: cyclin-dependent kinase 18
  ENST ID: ENST00000515494
  CDS Start-End: 746-964
ccttccactgctcctgacctcctgtatttcagctggagagaaggtgcagctggccagctctgatgcactcttcccttcctcctctttttcccctcttgcctcctggggcatgccagagcagagaccttcaggtgtcagtatcagaggtgaaatgaggtttggacccaatcatgtcccaagggtgttggccaagctgacattcagtttacgggccttggtcagtaagatttattggctgttgacacattcaggcccttggacacaagttggtaaatttctgctggtccaaggactgcctggttctggcaccctccctgccaccccagcccttcccccagaactctctagacctccagcagctaaagggcttaggtctggggggccttcaggatcctctttgcacatcatgcctgctattatgaccaatactttgctggactaggtggtccatagagaactgcacagggcgtggcggggcgggcggtgggcagtggaggcagtgctgagggtcactgggaggaagaaggtgactgggaagaagagggtgaacacccaccctcagaggggtcaaactttgcagaagacacaaccctggctcccagtgatggtggcatacagggcgacagagcttgatgagagagctgaattcccagtgggtggagacctggactggttgccttgttcttttcaactgctcttctcacacttcccatctcaggacccggctgcccagtccctcatgatcatgaacaagatgaagaactttaagcgccgtttctccctgtcagtgccccgcactgagaccattgaagaatccttggctgaattcacggagcaattcaaccagctccacaaccggcggaatgagagtgaggggtctgggcccacccagcacctctcccacctaccagacactccccagtcaccttcccctccccgcccaccccctccccactggccttaggggaggagcacagcgctgggggaggggggctacccttctctccctcaggacagagaggcagggaggggagctgacgcctgtccctcttagacttgcagctcggtcctcttggcagagaccccccgcaggagtgcagcaccttctccccaacagacagcggggaggagccggggcagctctcccctggcgtgcagttccagcggcggcagaaccagcgccgcttctccatggaggacgtcagcaagaggctctctctgcccatggatatccgcctgccccaggaattcctacagaagctacagatggagagcccagatctgcccaagccgctcagccgcatgtcccgccgggcctccctgtcagacattggctttgggaaactggaaacatacgtgaaactggacaaactgggagagggcacctatgccacagtcttcaaagggcgcagcaaactgacggagaaccttgtggccctgaaagagatccggctggagcacgaggagggagcgccctgcactgccatccgagaggtgtctctgctgaagaacctgaagcacgccaatattgtgaccctgcatgacctcatccacacagatcggtccctcaccctggtgtttgagtacctggacagtgacctgaagcagtatctggaccactgtgggaacctcatgagcatgcacaacgtcaagattttcatgttccagctgctccggggcctcgcctactgtcaccaccgcaagatcctgcaccgggacctgaagccccagaacctgctcatcaacgagaggggggagctgaagctggccgactttggactggccagggccaagtcagtgcccacaaagacttactccaatgaggtggtgaccctgtggtacaggccccccgatgtgctgctgggatccacagagtactccacccccattgatatgtggggcgtgggctgcatccactacgagatggccacagggaggcccctcttcccgggctccacagtcaaggaggagctgcacctcatctttcgcctcctcgggacccccacagaagagacgtggcccggcgtgaccgccttctctgagttccgcacctacagcttcccctgctacctcccgcagccgctcatcaaccacgcgcccaggttggatacggatggcatccacctcctgagcagcctgctcctgtatgaatccaagagtcgcatgtcagcagaggctgccctgagtcactcctacttccggtctctgggagagcgtgtgcaccagcttgaagacactgcctccatcttctccctgaaggagatccagctccagaaggacccaggctaccgaggcttggccttccagcagccaggacgagggaagaacaggcggcagagcatcttctgagccacgcccaccttgctgtggccaagggacaagagatcacatggagcacaaattcgggtaggatggagcctgtgtggccctcggaggactgaagaacgagggctgacagccagcctggaagaccgcttggcagcccttctggccacggctgtttcttctttgtgcttcccgtgtgcctccccagtagccctcacctgcataccaacccctcctttacccacgttggggctggcataagctgcttccctgagaggacatgaggggggggcggtcctcgtaccctctcccaccctggtgtttgggcacctgcgtgggatgcacacggatgacagaatcaaggcgccaggatgggcactctgccctggatacaggctctaccctcctcccccaggacctgcctagtgccagtttggtagtccccctttctggccccttggagcccacacacgtttcatctttttcccctctgagagcaagaagagacatggcatgttctctgggaccctggaatcctaggtacccacatgtgtgccaaagcctaccccacctggcaggtgtcccacagcaacagaaggaatagtagtccccactctttccatcagccctaccctaccctcattccccgacaccctctggcttgaaccatggctgagcagtgccggcatacgctttgctggcatgcttggatgcccagctgtgtccagaggtggcctgggaccgccagttgcacgcctgccacctcagccagcccccgcccagctcatcagtctgaatggagttgccttaaattggcaggtggtaccgtactcactgcccttggagctgtgaccggctcctgcctgtccaccccttcccgaggtggctcctgcttaccttatcatcccagggctctgattagccaggcctggtcagggtcctggggacggcacccagatatgcagagtcaccctgacactggtgccaggctgacctcagctcccgaaggctcgcacagcctccccatccttccttcccagcccttgtggctctgtccacctgatcccaataccagcttcccccagcccctgccaccccagagggcggccacgacagggagaggtgtagatgccaccatctgagggagaggaacgtggaacaggagcaggctctgatgctgagaggcttgcctccgggggctggaagcctgggtggccggggcccctgaagaaggctcccctctgtatcccccaggtctcctcaacactgggctgatcctgaatggcacaggccaaggggaggccagcctcgcctttctacccaggccccctgccctgcccacctcaggcccccaccctccactcctccccacggtactgtgaacgtcgtgtgactcagtgcagagacagataatatatttaattcatgtac

SEQ ID NO: 123714 - DNA, 435 bp, Homo sapiens
  Payload ID: 4279
  Gene Symbol: CDK18
  Gene Name: cyclin-dependent kinase 18
  ENST ID: ENST00000506215
  CDS Start-End: 242-435
ccgtgcccgggagggagcgggcgcaccgcggcccccaggacacgcgcttgccccgcactgagaccattgaagaatccttggctgaattcacggagcaattcaaccagctccacaaccggcggaatgagaagaccccccgcaggagtgcagcaccttctccccaacagacagcggggaggagccggggcagctctcccctggcgtgcagttccagcggcggcagaaccagcgccgcttctccatggaggtaagggcctctggagctctgccccggcaggtggcaggatgcacgcacaagggtgtgcacaggagggcagctgccttacagccagactttgacgtcagcaagaggctctctctgcccatggatatccgcctgccccaggaattcctacagaagctacagatggagagcccagatctgcccaagccgct

SEQ ID NO: 123715 - DNA, 6067 bp, Homo sapiens
  Payload ID: 4280
  Gene Symbol: CDK19
  Gene Name: cyclin-dependent kinase 19
  Uniprot ID: Q9BWU1
  ENST ID: ENST00000323817
  CDS Start-End: 182-1510
agggggaggggcggccctggtacgcaggcgcgcatgctttgtgggggcgaggctgtggtggcccgagattccaggagggcttcgtgtatggacctcaagcgttggaggtagcagacttttcagcagaagaaaagatgaaaaggaatatgcattgaagcaaattgaaggcacaggaatatccatgtcggcttgtagagagattgcacttttgcgagaattgaagcaccctaatgtgattgcattgcagaaggtgttcctttctcacagtgacaggaaggtatggctgctgtttgattatgcagagcatgacttgtggcatattattaagtttcaccgtgcatcaaaagcaaataaaaagcccatgcagttgccaagatctatggttaaatccttactttaccagattcttgatggtatccattacctccatgcaaattgggtgcttcacagagacttgaaaccagcaaatatcctagtaatgggagaaggtcctgagagggggagagtcaaaatagctgacatgggttttgccagattattcaattctcctctaaagccactagcagatttggatccagtagttgtgacattttggtatcgggctccagaacttttgcttggtgcaaggcattatacaaaggccattgatatatgggcaataggttgtatatttgctgaattgttgacttcggaacctatttttcactgtcgtcaggaagatataaaaacaagcaatccctttcatcatgatcaactggatcggatatttagtgtcatggggtttcctgcagataaagactgggaagatattagaaagatgccagaatatcccacacttcaaaaagactttagaagaacaacgtatgccaacagtagcctcataaagtacatggagaaacacaaggtcaagcctgacagcaaagtgttcctcttgcttcagaaactcctgaccatggatccaaccaagagaattacctcggagcaagctctgcaggatccctattttcaggaggaccctttgccaacattagatgtatttgccggctgccagattccataccccaaacgagaattccttaatgaagatgatcctgaagaaaaaggtgacaagaatcagcaacagcagcagaaccagcatcagcagcccacagcccctccacagcaggcagcagcccctccacaggcgcccccaccacagcagaacagcacccagaccaacgggaccgcaggtggggctggggccggggtcgggggcaccggagcagggttgcagcacagccaggactccagcctgaaccaggtgcctccaaacaagaagccacggctagggccttcaggcgcaaactcaggtggacctgtgatgccctcggattatcagcactccagttctcgcctgaattaccaaagcagcgttcagggatcctctcagtcccagagcacacttggctactcttcctcgtctcagcagagctcacagtaccacccatctcaccaggcccaccggtactgaccagctcccgttgggccaggccagcccagcccagagcacaggctccagcaatatgtctgcattgaaaagaaccaaaaaaatgcaaactatgatgccatttaaaactcatacacatgggaggaaaaccttatatactgagcattgtgcaggactgatagctcttctttattgacttaaagaagattcttgtgaagtttccccagcaccccttccctgcatgtgttccattgtgacttctctgataaagcgtctgatctaatcccagcacttctgtaaccttcagcatttctttgaaggatttcctggtgcacctttctcatgctgtagcaatcactatggtttatcttttcaaagctcttttaataggattttaatgttttagaaacaggattccagtggtgtatagttttatacttcatgaactgatttagcaacacaggtaaaaatgcaccttttaaagcactacgttttcacagacaataactgttctgctcatggaagtcttaaacagaaactgttactgtcccaaagtactttactattacgttcgtatttatctagtttcagggaaggtctaataaaaagacaagcggtgggacagagggaacctacaaccaaaaactgcctagatctttgcagttatgtgctttatgccacgaagaactgaagtatgtggtaatttttatagaatcattcatatggaactgagttcccagcatcatcttattctgaatagcattcagtaattaagaattacaattttaaccttcatgtagctaagtctaccttaaaaagggtttcaagagctttgtacagtctcgatggcccacaccaaaacgctgaagagagtaacaactgcactaggatttctgtaaggagtaattttgatcaaaagacgtgttacttccctttgaaggaaaagtttttagtgtgtattgtacataaagtcggcttctctaaagaaccattggtttcttcacatctgggtctgcgtgagtaactttcttgcataatcaaggttactcaagtagaagcctgaaaattaatctgcttttaaaataaagagcagtgttctccattcgtatttgtattagatatagagtgactatttttaaagcatgttaaaaatttaggttttattcatgtttaaagtatgtattatgtatgcataattttgctgttgttactgaaacttaattctatcaagaatctttttcattgcactgaatgatttcttttgcccctaggagaaaacttaataattgtgcctaaaaactatgggcggatagtataagactatactagacaaagtgaatatttgcatttccattatctatgaattagtggctgagttctttcttagctgctttaaggagcccctcactccccagagtcaaaaggaaatgtaaaaacttagagctcccattgtaatgtaaggggcaagaaatttgtgttcttctgaatgctactagcagcaccagccttgttttaaatgttttcttgagctagaagaaatagctgattattgtatatgcaaattacatgcatttttaaaaactattctttctgaacttatctacctggttatgatactgtgggtccatacacaagtaaaataagattagacagaagccagtatacattttgcactattgatgtgatactgtagccagccaggaccttactgatctcagcataataatgctcactaataatgaagtctgcatagtgacactcatcaagactgaagatgaagcaggttacgtgctccattggaaggagtttctgatagtctcctgctgttttaccccttccattttttaaaataagaaattagcagccctctgcataatgtagctgcctatatgcagttttatcctgtgccctaaagcctcactgtccagagctgttggtcatcagatgcttattgcaccctcaccatgtgcctggtgccctgctgggtagagaacacagaggacagggcatacttcttgtccttaaggagcttgtgatctgtgacagtaagccctcctgggatgtctgtgccatgtgattgacttacaagtgaaactgtcttataatatgaaggtctttttgtttacttctaaacccacttgggtagttactatccccaaatctgttctgtaaataatattatggaagggtttctatgtcagtctaccttagagaaagccagtgattcaatatcacaaaaggcattgacgtatctttgaaatgttcacagcagccttttaacaacaactgggtggtccttgtaggcagaacatactctcctaagtggttgtaggaaattgcaaggaaaatagaaggtctgttcttgctctcaaggaggttacctttaataaaagaagacaaacccagatagatatgtaaaccaaaatactatgccccttaatactttataagcagcattgttaaatagttcttacgcttatacattcacagaactaccctgttttccttgtatataatgacttttgctggcagaactgaaatataaactgtaaggggatttcgtcagttgctcccagtatacaatatcctccaggacatagccagaaatctccattccacacatgactgagttcctatccctgcactggtactggctcttttctcctctttccttgcctcagggttcgtgctacccactgattccctttacccttagtaataattttggatcattttctttcctttaaaggggaacaaagccttttttttttttgagacggagtgttgctctgtcacccaagctggagtgcagtggcacgatcttggctcactccaacctccaccttccaggttcaagtgattctcctgcctcagcctcccgagtagctgggactacgggcacgcaccaccacgtctggctaatttttgtatttttagtagagatggggtttcaccctattggtcaggctggtcttgaattcctcacctcaggtcatccgcctgtctcggcctcccgaagtgctgggattataggtgtgagccaccgcacccagttgggaacaaagcctttttaacacacgtaagggccctcaaaccgtgggacctctaaggagacctttgaagctttttgagggcaaactttacctttgtggtccccaaatgatggcatttctctttgaaatttattagatactgttatgtcccccaagggtacaggaggggcatccctcagcctatgggaacacccaaactaggaggggttattgacaggaaggaatgaatccaagtgaaggctttctgctcttcgtgttacaaaccagtttcagagttagctttctggggaggtgtgtgtttgtgaaaggaattcaagtgttgcaggacagatgagctcaaggtaaggtagctttggcagcagggctgatactatgaggctgaaacaatccttgtgatgaagtagatcatgcagtgacatacaaagaccaaggattatgtatatttttatatctctgtggttttgaaactttagtacttagaattttggccttctgcactactcttttgctcttacgaacataatggactcttaagaatggaaagggatgacatttacctatgtgtgctgcctcattcctggtgaagcaactgctacttgttctctatgcctctaaaatgatgctgttttctctgctaaaggtaaaagaaaagaaaaaaatagttggaaaataagacatgcaacttgatgtgcttttgagtaaatttatgcagcagaaactatacaatgaaggaagaattctatggaaattacaaatccaaaactctatgatgatgtcttcctagggagtagagaaaggcagtgaaatggcagttagaccaacagaggcttgaaggattcaagtacaagtaatattttgtataaaacatagcagtttaggtccccataatcctcaaaaatagtcacaaatataacaaagttcattgttttagggtttttaaaaaacgtgttgtacctaaggccatacttactcttctatgctatcactgcaaaggggtgatatgtatgtattatataaaaaaaaaaacccttaatgcactgttatctcctaaatatttagtaaattaatactatttaatttttttaaagatttgtctgtgtagacactaaaagtattacacaaaatctggactgaaggtgtcctttttaacaacaatttaaagtactttttatatatgttatgtagtatatcctttctaaactgcctagtttgtatattcctataattcctatttgtgaagtgtacctgttcttgtctcttttttcagtcattttctgcacgcatccccctttatatggttatagagatgactgtagcttttcgtgctccactgcgaggtttgtgctcagagccgctgcaccccagcgaggcctgctccatggagtgcaggacgagctactgctttggagcgagggtttcctgcttttgagttgacctgacttccttcttgaaatgactgttaaaactaaaataaattacattgcatttattttatattcttggttgaaataaaatttaattgactttg

SEQ ID NO: 123716 - DNA, 6246 bp, Homo sapiens
  Payload ID: 4280
  Gene Symbol: CDK19
  Gene Name: cyclin-dependent kinase 19
  Uniprot ID: Q9BWU1
  ENST ID: ENST00000368911
  CDS Start-End: 181-1689
tgtggccgccgaggagtcccttgctgaaggcggaccgcggagcggcgggcggcgggcggcgcgcgcgcgcgcgcgagaggcggctgttggagaagtggagcggcggtcgcggggggaggaggaggagggactgagcggcggcggcccccgcgtcccgtgcctctatgggggaagcagacaatggattatgatttcaaggcgaagctggcggcggagcgggagcgggtggaggatttgtttgagtacgaagggtgcaaagtgggacgcggcacctacggtcacgtctacaaggcgaggcggaaagatggaaaagatgaaaaggaatatgcattgaagcaaattgaaggcacaggaatatccatgtcggcttgtagagagattgcacttttgcgagaattgaagcaccctaatgtgattgcattgcagaaggtgttcctttctcacagtgacaggaaggtatggctgctgtttgattatgcagagcatgacttgtggcatattattaagtttcaccgtgcatcaaaagcaaataaaaagcccatgcagttgccaagatctatggttaaatccttactttaccagattcttgatggtatccattacctccatgcaaattgggtgcttcacagagacttgaaaccagcaaatatcctagtaatgggagaaggtcctgagagggggagagtcaaaatagctgacatgggttttgccagattattcaattctcctctaaagccactagcagatttggatccagtagttgtgacattttggtatcgggctccagaacttttgcttggtgcaaggcattatacaaaggccattgatatatgggcaataggttgtatatttgctgaattgttgacttcggaacctatttttcactgtcgtcaggaagatataaaaacaagcaatccctttcatcatgatcaactggatcggatatttagtgtcatggggtttcctgcagataaagactgggaagatattagaaagatgccagaatatcccacacttcaaaaagactttagaagaacaacgtatgccaacagtagcctcataaagtacatggagaaacacaaggtcaagcctgacagcaaagtgttcctcttgcttcagaaactcctgaccatggatccaaccaagagaattacctcggagcaagctctgcaggatccctattttcaggaggaccctttgccaacattagatgtatttgccggctgccagattccataccccaaacgagaattccttaatgaagatgatcctgaagaaaaaggtgacaagaatcagcaacagcagcagaaccagcatcagcagcccacagcccctccacagcaggcagcagcccctccacaggcgcccccaccacagcagaacagcacccagaccaacgggaccgcaggtggggctggggccggggtcgggggcaccggagcagggttgcagcacagccaggactccagcctgaaccaggtgcctccaaacaagaagccacggctagggccttcaggcgcaaactcaggtggacctgtgatgccctcggattatcagcactccagttctcgcctgaattaccaaagcagcgttcagggatcctctcagtcccagagcacacttggctactcttcctcgtctcagcagagctcacagtaccacccatctcaccaggcccaccggtactgaccagctcccgttgggccaggccagcccagcccagagcacaggctccagcaatatgtctgcattgaaaagaaccaaaaaaatgcaaactatgatgccatttaaaactcatacacatgggaggaaaaccttatatactgagcattgtgcaggactgatagctcttctttattgacttaaagaagattcttgtgaagtttccccagcaccccttccctgcatgtgttccattgtgacttctctgataaagcgtctgatctaatcccagcacttctgtaaccttcagcatttctttgaaggatttcctggtgcacctttctcatgctgtagcaatcactatggtttatcttttcaaagctcttttaataggattttaatgttttagaaacaggattccagtggtgtatagttttatacttcatgaactgatttagcaacacaggtaaaaatgcaccttttaaagcactacgttttcacagacaataactgttctgctcatggaagtcttaaacagaaactgttactgtcccaaagtactttactattacgttcgtatttatctagtttcagggaaggtctaataaaaagacaagcggtgggacagagggaacctacaaccaaaaactgcctagatctttgcagttatgtgctttatgccacgaagaactgaagtatgtggtaatttttatagaatcattcatatggaactgagttcccagcatcatcttattctgaatagcattcagtaattaagaattacaattttaaccttcatgtagctaagtctaccttaaaaagggtttcaagagctttgtacagtctcgatggcccacaccaaaacgctgaagagagtaacaactgcactaggatttctgtaaggagtaattttgatcaaaagacgtgttacttccctttgaaggaaaagtttttagtgtgtattgtacataaagtcggcttctctaaagaaccattggtttcttcacatctgggtctgcgtgagtaactttcttgcataatcaaggttactcaagtagaagcctgaaaattaatctgcttttaaaataaagagcagtgttctccattcgtatttgtattagatatagagtgactatttttaaagcatgttaaaaatttaggttttattcatgtttaaagtatgtattatgtatgcataattttgctgttgttactgaaacttaattctatcaagaatctttttcattgcactgaatgatttcttttgcccctaggagaaaacttaataattgtgcctaaaaactatgggcggatagtataagactatactagacaaagtgaatatttgcatttccattatctatgaattagtggctgagttctttcttagctgctttaaggagcccctcactccccagagtcaaaaggaaatgtaaaaacttagagctcccattgtaatgtaaggggcaagaaatttgtgttcttctgaatgctactagcagcaccagccttgttttaaatgttttcttgagctagaagaaatagctgattattgtatatgcaaattacatgcatttttaaaaactattctttctgaacttatctacctggttatgatactgtgggtccatacacaagtaaaataagattagacagaagccagtatacattttgcactattgatgtgatactgtagccagccaggaccttactgatctcagcataataatgctcactaataatgaagtctgcatagtgacactcatcaagactgaagatgaagcaggttacgtgctccattggaaggagtttctgatagtctcctgctgttttaccccttccattttttaaaataagaaattagcagccctctgcataatgtagctgcctatatgcagttttatcctgtgccctaaagcctcactgtccagagctgttggtcatcagatgcttattgcaccctcaccatgtgcctggtgccctgctgggtagagaacacagaggacagggcatacttcttgtccttaaggagcttgtgatctgtgacagtaagccctcctgggatgtctgtgccatgtgattgacttacaagtgaaactgtcttataatatgaaggtctttttgtttacttctaaacccacttgggtagttactatccccaaatctgttctgtaaataatattatggaagggtttctatgtcagtctaccttagagaaagccagtgattcaatatcacaaaaggcattgacgtatctttgaaatgttcacagcagccttttaacaacaactgggtggtccttgtaggcagaacatactctcctaagtggttgtaggaaattgcaaggaaaatagaaggtctgttcttgctctcaaggaggttacctttaataaaagaagacaaacccagatagatatgtaaaccaaaatactatgccccttaatactttataagcagcattgttaaatagttcttacgcttatacattcacagaactaccctgttttccttgtatataatgacttttgctggcagaactgaaatataaactgtaaggggatttcgtcagttgctcccagtatacaatatcctccaggacatagccagaaatctccattccacacatgactgagttcctatccctgcactggtactggctcttttctcctctttccttgcctcagggttcgtgctacccactgattccctttacccttagtaataattttggatcattttctttcctttaaaggggaacaaagccttttttttttttgagacggagtgttgctctgtcacccaagctggagtgcagtggcacgatcttggctcactccaacctccaccttccaggttcaagtgattctcctgcctcagcctcccgagtagctgggactacgggcacgcaccaccacgtctggctaatttttgtatttttagtagagatggggtttcaccctattggtcaggctggtcttgaattcctcacctcaggtcatccgcctgtctcggcctcccgaagtgctgggattataggtgtgagccaccgcacccagttgggaacaaagcctttttaacacacgtaagggccctcaaaccgtgggacctctaaggagacctttgaagctttttgagggcaaactttacctttgtggtccccaaatgatggcatttctctttgaaatttattagatactgttatgtcccccaagggtacaggaggggcatccctcagcctatgggaacacccaaactaggaggggttattgacaggaaggaatgaatccaagtgaaggctttctgctcttcgtgttacaaaccagtttcagagttagctttctggggaggtgtgtgtttgtgaaaggaattcaagtgttgcaggacagatgagctcaaggtaaggtagctttggcagcagggctgatactatgaggctgaaacaatccttgtgatgaagtagatcatgcagtgacatacaaagaccaaggattatgtatatttttatatctctgtggttttgaaactttagtacttagaattttggccttctgcactactcttttgctcttacgaacataatggactcttaagaatggaaagggatgacatttacctatgtgtgctgcctcattcctggtgaagcaactgctacttgttctctatgcctctaaaatgatgctgttttctctgctaaaggtaaaagaaaagaaaaaaatagttggaaaataagacatgcaacttgatgtgcttttgagtaaatttatgcagcagaaactatacaatgaaggaagaattctatggaaattacaaatccaaaactctatgatgatgtcttcctagggagtagagaaaggcagtgaaatggcagttagaccaacagaggcttgaaggattcaagtacaagtaatattttgtataaaacatagcagtttaggtccccataatcctcaaaaatagtcacaaatataacaaagttcattgttttagggtttttaaaaaacgtgttgtacctaaggccatacttactcttctatgctatcactgcaaaggggtgatatgtatgtattatataaaaaaaaaaacccttaatgcactgttatctcctaaatatttagtaaattaatactatttaatttttttaaagatttgtctgtgtagacactaaaagtattacacaaaatctggactgaaggtgtcctttttaacaacaatttaaagtactttttatatatgttatgtagtatatcctttctaaactgcctagtttgtatattcctataattcctatttgtgaagtgtacctgttcttgtctcttttttcagtcattttctgcacgcatccccctttatatggttatagagatgactgtagcttttcgtgctccactgcgaggtttgtgctcagagccgctgcaccccagcgaggcctgctccatggagtgcaggacgagctactgctttggagcgagggtttcctgcttttgagttgacctgacttccttcttgaaatgactgttaaaactaaaataaattacattgcatttattttatattcttggttgaaataaaatttaattgactttg

SEQ ID NO: 123717 - DNA, 6007 bp, Homo sapiens
  Payload ID: 4280
  Gene Symbol: CDK19
  Gene Name: cyclin-dependent kinase 19
  ENST ID: ENST00000413605
  CDS Start-End: 254-1450
cgcggggggaggaggaggagggactgagcggcggcggcccccgcgtcccgtgcctctatgggggaagcagacaatggattatgatttcaaggcgaagctggcggcggagcgggagcgggtggaggatttgtttgagtacgaagggtgcaaagtgggacgcggcacctacggtcacgtctacaaggcgaggcggaaagatggaaaagatgaaaaggaatatgcattgaagcaaattgaaggcacaggaatatccatgtcggcttgtagagagattgcacttttgcgagaattgaagcaccctaatgtgattgcattgcagaaggtgttcctttctcacagtgacaggaaggtatggctgctgtttgattatgcagagcatgacttgtggcatattattaagtttcaccgtgcatcaaaagcaaataaaaagcccatgcagttgccaagatctatggttaaatccttactttaccagattcttgatggtatccattacctccatgcaaattgggtgcttcacagagacttgaaaccagcaaatatcctagtaatgggagaaggtcctgagagggggagagtcaaaatagatatatgggcaataggttgtatatttgctgaattgttgacttcggaacctatttttcactgtcgtcaggaagatataaaaacaagcaatccctttcatcatgatcaactggatcggatatttagtgtcatggggtttcctgcagataaagactgggaagatattagaaagatgccagaatatcccacacttcaaaaagactttagaagaacaacgtatgccaacagtagcctcataaagtacatggagaaacacaaggtcaagcctgacagcaaagtgttcctcttgcttcagaaactcctgaccatggatccaaccaagagaattacctcggagcaagctctgcaggatccctattttcaggaggaccctttgccaacattagatgtatttgccggctgccagattccataccccaaacgagaattccttaatgaagatgatcctgaagaaaaaggtgacaagaatcagcaacagcagcagaaccagcatcagcagcccacagcccctccacagcaggcagcagcccctccacaggcgcccccaccacagcagaacagcacccagaccaacgggaccgcaggtggggctggggccggggtcgggggcaccggagcagggttgcagcacagccaggactccagcctgaaccaggtgcctccaaacaagaagccacggctagggccttcaggcgcaaactcaggtggacctgtgatgccctcggattatcagcactccagttctcgcctgaattaccaaagcagcgttcagggatcctctcagtcccagagcacacttggctactcttcctcgtctcagcagagctcacagtaccacccatctcaccaggcccaccggtactgaccagctcccgttgggccaggccagcccagcccagagcacaggctccagcaatatgtctgcattgaaaagaaccaaaaaaatgcaaactatgatgccatttaaaactcatacacatgggaggaaaaccttatatactgagcattgtgcaggactgatagctcttctttattgacttaaagaagattcttgtgaagtttccccagcaccccttccctgcatgtgttccattgtgacttctctgataaagcgtctgatctaatcccagcacttctgtaaccttcagcatttctttgaaggatttcctggtgcacctttctcatgctgtagcaatcactatggtttatcttttcaaagctcttttaataggattttaatgttttagaaacaggattccagtggtgtatagttttatacttcatgaactgatttagcaacacaggtaaaaatgcaccttttaaagcactacgttttcacagacaataactgttctgctcatggaagtcttaaacagaaactgttactgtcccaaagtactttactattacgttcgtatttatctagtttcagggaaggtctaataaaaagacaagcggtgggacagagggaacctacaaccaaaaactgcctagatctttgcagttatgtgctttatgccacgaagaactgaagtatgtggtaatttttatagaatcattcatatggaactgagttcccagcatcatcttattctgaatagcattcagtaattaagaattacaattttaaccttcatgtagctaagtctaccttaaaaagggtttcaagagctttgtacagtctcgatggcccacaccaaaacgctgaagagagtaacaactgcactaggatttctgtaaggagtaattttgatcaaaagacgtgttacttccctttgaaggaaaagtttttagtgtgtattgtacataaagtcggcttctctaaagaaccattggtttcttcacatctgggtctgcgtgagtaactttcttgcataatcaaggttactcaagtagaagcctgaaaattaatctgcttttaaaataaagagcagtgttctccattcgtatttgtattagatatagagtgactatttttaaagcatgttaaaaatttaggttttattcatgtttaaagtatgtattatgtatgcataattttgctgttgttactgaaacttaattctatcaagaatctttttcattgcactgaatgatttcttttgcccctaggagaaaacttaataattgtgcctaaaaactatgggcggatagtataagactatactagacaaagtgaatatttgcatttccattatctatgaattagtggctgagttctttcttagctgctttaaggagcccctcactccccagagtcaaaaggaaatgtaaaaacttagagctcccattgtaatgtaaggggcaagaaatttgtgttcttctgaatgctactagcagcaccagccttgttttaaatgttttcttgagctagaagaaatagctgattattgtatatgcaaattacatgcatttttaaaaactattctttctgaacttatctacctggttatgatactgtgggtccatacacaagtaaaataagattagacagaagccagtatacattttgcactattgatgtgatactgtagccagccaggaccttactgatctcagcataataatgctcactaataatgaagtctgcatagtgacactcatcaagactgaagatgaagcaggttacgtgctccattggaaggagtttctgatagtctcctgctgttttaccccttccattttttaaaataagaaattagcagccctctgcataatgtagctgcctatatgcagttttatcctgtgccctaaagcctcactgtccagagctgttggtcatcagatgcttattgcaccctcaccatgtgcctggtgccctgctgggtagagaacacagaggacagggcatacttcttgtccttaaggagcttgtgatctgtgacagtaagccctcctgggatgtctgtgccatgtgattgacttacaagtgaaactgtcttataatatgaaggtctttttgtttacttctaaacccacttgggtagttactatccccaaatctgttctgtaaataatattatggaagggtttctatgtcagtctaccttagagaaagccagtgattcaatatcacaaaaggcattgacgtatctttgaaatgttcacagcagccttttaacaacaactgggtggtccttgtaggcagaacatactctcctaagtggttgtaggaaattgcaaggaaaatagaaggtctgttcttgctctcaaggaggttacctttaataaaagaagacaaacccagatagatatgtaaaccaaaatactatgccccttaatactttataagcagcattgttaaatagttcttacgcttatacattcacagaactaccctgttttccttgtatataatgacttttgctggcagaactgaaatataaactgtaaggggatttcgtcagttgctcccagtatacaatatcctccaggacatagccagaaatctccattccacacatgactgagttcctatccctgcactggtactggctcttttctcctctttccttgcctcagggttcgtgctacccactgattccctttacccttagtaataattttggatcattttctttcctttaaaggggaacaaagccttttttttttttgagacggagtgttgctctgtcacccaagctggagtgcagtggcacgatcttggctcactccaacctccaccttccaggttcaagtgattctcctgcctcagcctcccgagtagctgggactacgggcacgcaccaccacgtctggctaatttttgtatttttagtagagatggggtttcaccctattggtcaggctggtcttgaattcctcacctcaggtcatccgcctgtctcggcctcccgaagtgctgggattataggtgtgagccaccgcacccagttgggaacaaagcctttttaacacacgtaagggccctcaaaccgtgggacctctaaggagacctttgaagctttttgagggcaaactttacctttgtggtccccaaatgatggcatttctctttgaaatttattagatactgttatgtcccccaagggtacaggaggggcatccctcagcctatgggaacacccaaactaggaggggttattgacaggaaggaatgaatccaagtgaaggctttctgctcttcgtgttacaaaccagtttcagagttagctttctggggaggtgtgtgtttgtgaaaggaattcaagtgttgcaggacagatgagctcaaggtaaggtagctttggcagcagggctgatactatgaggctgaaacaatccttgtgatgaagtagatcatgcagtgacatacaaagaccaaggattatgtatatttttatatctctgtggttttgaaactttagtacttagaattttggccttctgcactactcttttgctcttacgaacataatggactcttaagaatggaaagggatgacatttacctatgtgtgctgcctcattcctggtgaagcaactgctacttgttctctatgcctctaaaatgatgctgttttctctgctaaaggtaaaagaaaagaaaaaaatagttggaaaataagacatgcaacttgatgtgcttttgagtaaatttatgcagcagaaactatacaatgaaggaagaattctatggaaattacaaatccaaaactctatgatgatgtcttcctagggagtagagaaaggcagtgaaatggcagttagaccaacagaggcttgaaggattcaagtacaagtaatattttgtataaaacatagcagtttaggtccccataatcctcaaaaatagtcacaaatataacaaagttcattgttttagggtttttaaaaaacgtgttgtacctaaggccatacttactcttctatgctatcactgcaaaggggtgatatgtatgtattatataaaaaaaaaaacccttaatgcactgttatctcctaaatatttagtaaattaatactatttaatttttttaaagatttgtctgtgtagacactaaaagtattacacaaaatctggactgaaggtgtcctttttaacaacaatttaaagtactttttatatatgttatgtagtatatcctttctaaactgcctagtttgtatattcctataattcctatttgtgaagtgtacctgttcttgtctcttttttcagtcattttctgcacgcatccccctttatatggttatagagatgactgtagcttttcgtgctccactgcgaggtttgtgctcagagccgctgcaccccagcgaggcctgctccatggagtgcaggacgagctactgctttggagcgagggtttcctgcttttgagttgacctgacttccttcttgaaatgactgttaaaactaaaataaattacattgcatttattttatattcttggttgaaataaaatttaattgactttg

SEQ ID NO: 123718 - DNA, 955 bp, Homo sapiens
  Payload ID: 4280
  Gene Symbol: CDK19
  Gene Name: cyclin-dependent kinase 19
  ENST ID: ENST00000457688
  CDS Start-End: 203-955
agcgggtggaggatttgtttgagtacgaagggtgcaaagtgggacgcggcacctacggtcacgtctacaaggcgaggcggaaagatggattccaggagggcttcgtgtatggacctcaagcgttggaggtagcagacttttcagcagaagaaaagatgaaaaggaatatgcattgaagcaaattgaaggcacaggaatatccatgtcggcttgtagagagattgcacttttgcgagaattgaagcaccctaatgtgattgcattgcagaaggtgttcctttctcacagtgacaggaaggtatggctgctgtttgattatgcagagcatgacttgtggcatattattaagtttcaccgtgcatcaaaagcaaataaaaagcccatgcagttgccaagatctatggttaaatccttactttaccagattcttgatggtatccattacctccatgcaaattgggtgcttcacagagacttgaaaccagcaaatatcctagtaatgggagaaggtcctgagagggggagagtcaaaatagctgacatgggttttgccagattattcaattctcctctaaagccactagcagatttggatccagtagttgtgacattttggtatcgggctccagaacttttgcttggtgcaaggcattatacaaaggccattgatatatgggcaataggttgtatatttgctgaattgttgacttcggaacctatttttcactgtcgtcaggaagatataaaaacaagcaatccctttcatcatgatcaactggatcggatatttagtgtcatggggtttcctgcagataaagactgggaagatattagaaagatgccagaatatcccacacttcaaaaagactttagaagaacaacgtatgccaacagtagcctcataaagtacatggagaaacacaaggtcaagcctgacagcaaagtgttcctcttg

SEQ ID NO: 123719 - DNA, 604 bp, Homo sapiens
  Payload ID: 4280
  Gene Symbol: CDK19
  Gene Name: cyclin-dependent kinase 19
  ENST ID: ENST00000463016
  CDS Start-End: 1-367
aaaagatgaaaaggaatatgcattgaagcaaattgaaggcacaggaatatccatgtcggcttgtagagagattgcacttttgcgagaattgaagcaccctaatgtgattgcattgcagaaggtgttcctttctcacagtgacaggaaggtatggctgctgtttgattatgcagagcatgacttgtggcatattattaagtttcaccgtgcatcaaaagcaaataaaaagcccatgcagttgccaagatctatggttaaatccttactttaccagattcttgatggtatccattacctccatgcaaattgggtgcttcacagagacttgctgacatgggttttgccagattattcaattctcctctaaagccactagcagatttggatccagtagttgtgacattttggtatcgggctccagaacttttgcttggtgcaaggcattatacaaaggccattgatatatgggcaataggttgtatatttgctgaattgttgacttcggaacctatttttcactgtcgtcaggaagatataaaaacaagcaatccctttcatcatgatcaactggatcggatatttagtgtcatggggtttcctgcag

SEQ ID NO: 123720 - DNA, 1260 bp, Homo sapiens
  Payload ID: 4281
  Gene Symbol: CDK2
  Gene Name: cyclin-dependent kinase 2
  Uniprot ID: P24941
  ENST ID: ENST00000354056
  CDS Start-End: 179-973
ttgtttcaagttggccaaattgacaagagcgagaggtatactgcgttccatcccgacccggggccacggtactgggccctgtttccccctcctcggcccccgagagccagggtccgccttctgcagggttcccaggcccccgctccagggccgggctgacccgactcgctggcgcttcatggagaacttccaaaaggtggaaaagatcggagagggcacgtacggagttgtgtacaaagccagaaacaagttgacgggagaggtggtggcgcttaagaaaatccgcctggacactgagactgagggtgtgcccagtactgccatccgagagatctctctgcttaaggagcttaaccatcctaatattgtcaagctgctggatgtcattcacacagaaaataaactctacctggtttttgaatttctgcaccaagatctcaagaaattcatggatgcctctgctctcactggcattcctcttcccctcatcaagagctatctgttccagctgctccagggcctagctttctgccattctcatcgggtcctccaccgagaccttaaacctcagaatctgcttattaacacagagggggccatcaagctagcagactttggactagccagagcttttggagtccctgttcgtacttacacccatgaggtgactcgccgggccctattccctggagattctgagattgaccagctcttccggatctttcggactctggggaccccagatgaggtggtgtggccaggagttacttctatgcctgattacaagccaagtttccccaagtgggcccggcaagattttagtaaagttgtacctcccctggatgaagatggacggagcttgttatcgcaaatgctgcactacgaccctaacaagcggatttcggccaaggcagccctggctcaccctttcttccaggatgtgaccaagccagtaccccatcttcgactctgatagccttcttgaagcccccagccctaatctcaccctctcctccagtgtgggcttgaccaggcttggccttgggctatttggactcaggtgggccctctgaacttgccttaaacactcaccttctagtcttggccagccaactctgggaatacaggggtgaaaggggggaaccagtgaaaatgaaaggaagtttcagtattagatgcacttaagttagcctccaccaccctttcccccttctcttagttattgctgaagagggttggtataaaaataattttaaaaaa

SEQ ID NO: 123721 - DNA, 2296 bp, Homo sapiens
  Payload ID: 4281
  Gene Symbol: CDK2
  Gene Name: cyclin-dependent kinase 2
  Uniprot ID: P24941
  ENST ID: ENST00000266970
  CDS Start-End: 241-1137
aacgcgggaagcaggggcggggcctctggtggcggtcgggaactcggtgggaggcggcaacattgtttcaagttggccaaattgacaagagcgagaggtatactgcgttccatcccgacccggggccacggtactgggccctgtttccccctcctcggcccccgagagccagggtccgccttctgcagggttcccaggcccccgctccagggccgggctgacccgactcgctggcgcttcatggagaacttccaaaaggtggaaaagatcggagagggcacgtacggagttgtgtacaaagccagaaacaagttgacgggagaggtggtggcgcttaagaaaatccgcctggacactgagactgagggtgtgcccagtactgccatccgagagatctctctgcttaaggagcttaaccatcctaatattgtcaagctgctggatgtcattcacacagaaaataaactctacctggtttttgaatttctgcaccaagatctcaagaaattcatggatgcctctgctctcactggcattcctcttcccctcatcaagagctatctgttccagctgctccagggcctagctttctgccattctcatcgggtcctccaccgagaccttaaacctcagaatctgcttattaacacagagggggccatcaagctagcagactttggactagccagagcttttggagtccctgttcgtacttacacccatgaggtggtgaccctgtggtaccgagctcctgaaatcctcctgggctgcaaatattattccacagctgtggacatctggagcctgggctgcatctttgctgagatggtgactcgccgggccctattccctggagattctgagattgaccagctcttccggatctttcggactctggggaccccagatgaggtggtgtggccaggagttacttctatgcctgattacaagccaagtttccccaagtgggcccggcaagattttagtaaagttgtacctcccctggatgaagatggacggagcttgttatcgcaaatgctgcactacgaccctaacaagcggatttcggccaaggcagccctggctcaccctttcttccaggatgtgaccaagccagtaccccatcttcgactctgatagccttcttgaagcccccagccctaatctcaccctctcctccagtgtgggcttgaccaggcttggccttgggctatttggactcaggtgggccctctgaacttgccttaaacactcaccttctagtcttggccagccaactctgggaatacaggggtgaaaggggggaaccagtgaaaatgaaaggaagtttcagtattagatgcacttaagttagcctccaccaccctttcccccttctcttagttattgctgaagagggttggtataaaaataattttaaaaaagccttcctacacgttagatttgccgtaccaatctctgaatgccccataattattatttccagtgtttgggatgaccaggatcccaagcctcctgctgccacaatgtttataaaggccaaatgatagcgggggctaagttggtgcttttgagaaccaagtaaaacaaaaccactgggaggagtctattttaaagaattcggttgaaaaaatagatccaatcagtttataccctagttagtgttttgcctcacctaataggctgggagactgaagactcagcccgggtggggctgcagaaaaatgattggccccagtccccttgtttgtcccttctacaggcatgaggaatctgggaggccctgagacagggattgtgcttcattccaatctattgcttcaccatggccttatgaggcaggtgagagatgtttgaatttttctcttccttttagtattcttagttgttcagttgccaaggatccctgatcccattttcctctgacgtccacctcctaccccataggagttagaagttagggtttaggcatcattttgagaatgctgacactttttcagggctgtgattgagtgagggcatgggtaaaaatatttctttaaaagaaggatgaacaattatatttatatttcaggttatatccaatagtagagttggctttttttttttttttttggtcatagtgggtggatttgttgccatgtgcaccttggggttttgtaatgacagtgctaaaaaaaaaaagcattttttttttatgatttgtctctgtcacccttgtccttgagtgctcttgctattaacgttatttgtaatttagtttgtagctcattaaaaaaatgtgcctagttttata

SEQ ID NO: 123722 - DNA, 1031 bp, Homo sapiens
  Payload ID: 4281
  Gene Symbol: CDK2
  Gene Name: cyclin-dependent kinase 2
  ENST ID: ENST00000440311
  CDS Start-End: 180-896
attgtttcaagttggccaaattgacaagagcgagaggtatactgcgttccatcccgacccggggccacggtactgggccctgtttccccctcctcggcccccgagagccagggtccgccttctgcagggttcccaggcccccgctccagggccgggctgacccgactcgctggcgcttcatggagaacttccaaaaggtggaaaagatcggagagggcacgtacggagttgtgtacaaagccagaaacaagttgacgggagaggtggtggcgcttaagaaaatccgcctggacacgctgctggatgtcattcacacagaaaataaactctacctggtttttgaatttctgcaccaagatctcaagaaattcatggatgcctctgctctcactggcattcctcttcccctcatcaagagctatctgttccagctgctccagggcctagctttctgccattctcatcgggtcctccaccgagaccttaaacctcagaatctgcttattaacacagagggggccatcaagctagcagactttggactagccagagcttttggagtccctgttcgtacttacacccatgaggtgactcgccgggccctattccctggagattctgagattgaccagctcttccggatctttcggactctggggaccccagatgaggtggtgtggccaggagttacttctatgcctgattacaagccaagtttccccaagtgggcccggcaagattttagtaaagttgtacctcccctggatgaagatggacggagcttgttatcgcaaatgctgcactacgaccctaacaagcggatttcggccaaggcagccctggctcaccctttcttccaggatgtgaccaagccagtaccccatcttcgactctgatagccttcttgaagcccccagccctaatctcaccctctcctccagtgtgggcttgaccaggcttggccttgggctatttggactcaggtgggccctctgaacttgccttaaacactcaccttctagtcttggcca

SEQ ID NO: 123723 - DNA, 2598 bp, Homo sapiens
  Payload ID: 4281
  Gene Symbol: CDK2
  Gene Name: cyclin-dependent kinase 2
  ENST ID: ENST00000555408
  CDS Start-End: 210-329
gcggtcgggaactcggtgggaggcggcaacattgtttcaagttggccaaattgacaagagcgagaggtatactgcgttccatcccgacccggggccacggtactgggccctgtttccccctcctcggcccccgagagccagggtccgccttctgcagggttcccaggcccccgctccagggccgggctgacccgactcgctggcgcttcatggagaacttccaaaaggtggaaaagatcggagagggcacgtacggagttgtgtacaaagccagaaacaagttgacgggagaggtggtggcgcttaagaaaatccgcctggacacgtgagtggcctctgtacccgggactcctaactggggacctccttgattgtcccccccaaccccccacgggcgggtagccgtccagggaccggaagagagcagggagggacttctttagaagtggagaggtgggttgggggccagtagaaggtgaagagtatacttatactccctggggagagtatagggtggtgtggaatccatggaaaactttcttcccaaactgagccggatcgtgcccccaaatgtgcgactacagactcggggagagaaaggaggtctctgagatgaggtccaagactctccatggagtggagttatgtgggaaccggcgagaatcgcctttctgaatgaagagccctcttcactgccccaccctcaccttagaattctctcctctttccaaagaatggcagttgaacctcactggcccctctggggaggctgggggctactcctgcattttttcccctccattacagtctccctgcttcaccttcaccaggcggctttacttacctacccctgggaaaagaggagataatggccttaatatatccaaaaaccacaccctgactacccaagaattagctcttaccatcaccctttctcttctctcactttcctagggggtgctgggtggtgtctccttgggggaaagaaatgactaggtgggggggaaaggaatatttgtaaccatattcccatctctgctttcccaacctctccaagtgagactgagggtgtgcccagtactgccatccgagagatctctctgcttaaggagcttaaccatcctaatattgtcaagctgctggatgtcattcacacagaaaataaactctacctggtttttgaatttctgcaccaagatctcaagaaattcatggatgcctctgctctcactggcattcctcttcccctcatcaagagctatctgttccagctgctccagggcctagctttctgccattctcatcgggtcctccaccgagaccttaaacctcagaatctgcttattaacacagagggggccatcaagctagcagactttggactagccagagcttttggagtccctgttcgtacttacacccatgaggtggtgaccctgtggtaccgagctcctgaaatcctcctgggctgcaaatattattccacagctgtggacatctggagcctgggctgcatctttgctgagatggtgactcgccgggccctattccctggagattctgagattgaccagctcttccggatctttcggactctggggaccccagatgaggtggtgtggccaggagttacttctatgcctgattacaagccaagtttccccaagtgggcccggcaagattttagtaaagttgtacctcccctggatgaagatggacggagcttgttatcgcaaatgctgcactacgaccctaacaagcggatttcggccaaggcagccctggctcaccctttcttccaggatgtgaccaagccagtaccccatcttcgactctgatagccttcttgaagcccccagccctaatctcaccctctcctccagtgtgggcttgaccaggcttggccttgggctatttggactcaggtgggccctctgaacttgccttaaacactcaccttctagtcttggccagccaactctgggaatacaggggtgaaaggggggaaccagtgaaaatgaaaggaagtttcagtattagatgcacttaagttagcctccaccaccctttcccccttctcttagttattgctgaagagggttggtataaaaataattttaaaaaagccttcctacacgttagatttgccgtaccaatctctgaatgccccataattattatttccagtgtttgggatgaccaggatcccaagcctcctgctgccacaatgtttataaaggccaaatgatagcgggggctaagttggtgcttttgagaaccaagtaaaacaaaaccactgggaggagtctattttaaagaattcggttgaaaaaatagatccaatcagtttataccctagttagtgttttgcctcacctaataggctgggagactgaagactcagcccgggtggggctgcagaaaaatgattggccccagtccccttgtttgtcccttctacaggcatgaggaatctgggaggccctgagacagggattgtgcttcattccaatctattgcttcaccatggccttatgaggcaggtgagagatgtttgaatttttctcttccttttagtattcttagttgttcagttgc

SEQ ID NO: 123724 - DNA, 1367 bp, Homo sapiens
  Payload ID: 4281
  Gene Symbol: CDK2
  Gene Name: cyclin-dependent kinase 2
  ENST ID: ENST00000555357
  CDS Start-End: 179-298
ttgtttcaagttggccaaattgacaagagcgagaggtatactgcgttccatcccgacccggggccacggtactgggccctgtttccccctcctcggcccccgagagccagggtccgccttctgcagggttcccaggcccccgctccagggccgggctgacccgactcgctggcgcttcatggagaacttccaaaaggtggaaaagatcggagagggcacgtacggagttgtgtacaaagccagaaacaagttgacgggagaggtggtggcgcttaagaaaatccgcctggacacgtgagtggcctctgtacccgggactcctaactggggacctccttgattgtcccccccaaccccccacgggcgggtagccgtccagggaccggaagagagcagggagggacttctttagaagtggagaggtgggttgggggccagtagaaggtgaagagtatacttatactccctggggagagtatagggtggtgtggaatccatggaaaactttcttcccaaactgagccggatcgtgcccccaaatgtgcgactacagactcggggagagaaaggaggtctctgagatgaggtccaagactctccatggagtggagttatgtgggaaccggcgagaatcgcctttctgaatgaagagccctcttcactgccccaccctcaccttagaattctctcctctttccaaagaatggcagttgaacctcactggcccctctggggaggctgggggctactcctgcattttttcccctccattacagtctccctgcttcaccttcaccaggcggctttacttacctacccctgggaaaagaggagataatggccttaatatatccaaaaaccacaccctgactacccaagaattagctcttaccatcaccctttctcttctctcactttcctagggggtgctgggtggtgtctccttgggggaaagaaatgactaggtgggggggaaaggaatatttgtaaccatattcccatctctgctttcccaacctctccaagtgagactgagggtgtgcccagtactgccatccgagagatctctctgcttaaggagcttaaccatcctaatattgtcaagctgctggatgtcattcacacagaaaataaactctacctggtttttgaatttctgcaccaagatctcaagaaattcatggatgcctctgctctcactggcattcctcttcccctcatcaaggtaatgcttctcatcagctcctctcatcatgggcatgtcttgggggactggtggcaggcaattcagggtgatattttatgattttggcctccttctgagccctcatctcctatacacacacactccccttctttttgtgtct

SEQ ID NO: 123725 - DNA, 1725 bp, Homo sapiens
  Payload ID: 4281
  Gene Symbol: CDK2
  Gene Name: cyclin-dependent kinase 2
  ENST ID: ENST00000553376
  CDS Start-End: 189-1229
ggcggcaacattgtttcaagttggccaaattgacaagagcgagaggtatactgcgttccatcccgacccggggccacggtactgggccctgtttccccctcctcggcccccgagagccagggtccgccttctgcagggttcccaggcccccgctccagggccgggctgacccgactcgctggcgcttcatggagaacttccaaaaggtggaaaagatcggagagggcacgtacggagttgtgtacaaagccagaaacaagttgacgggagaggtggtggcgcttaagaaaatccgcctggacactgagactgagggtgtgcccagtactgccatccgagagatctctctgcttaaggagcttaaccatcctaatattgtcaagctgctggatgtcattcacacagaaaataaactctacctggtttttgaatttctgcaccaagatctcaagaaattcatggatgcctctgctctcactggcattcctcttcccctcatcaagagctatctgttccagctgctccagggcctagctttctgccattctcatcgggtcctccaccgagaccttaaacctcagaatctgcttattaacacagagggggccatcaagctagcagactttggactagccagagcttttggagtccctgttcgtacttacacccatgaggtggtgaccctgtggtaccgagctcctgaaatcctcctgggctgcaaatattattccacagctgtggacatctggagcctgggctgcatctttgctgagatgcacctagtgggtacccagcaccatgctaggtgctgtggggaacacagaagaaatggaagacagagtctctgcccgctgtgctcgtatctagaagtggctgcatcacaaggttgggggatgaccgcagtgtctaccccctaccccgtgactcgccgggccctattccctggagattctgagattgaccagctcttccggatctttcggactctggggaccccagatgaggtggtgtggccaggagttacttctatgcctgattacaagccaagtttccccaagtgggcccggcaagattttagtaaagttgtacctcccctggatgaagatggacggagcttgttatcgcaaatgctgcactacgaccctaacaagcggatttcggccaaggcagccctggctcaccctttcttccaggatgtgaccaagccagtaccccatcttcgactctgatagccttcttgaagcccccagccctaatctcaccctctcctccagtgtgggcttgaccaggcttggccttgggctatttggactcaggtgggccctctgaacttgccttaaacactcaccttctagtcttggccagccaactctgggaatacaggggtgaaaggggggaaccagtgaaaatgaaaggaagtttcagtattagatgcacttaagttagcctccaccaccctttcccccttctcttagttattgctgaagagggttggtataaaaataattttaaaaaagccttcctacacgttagatttgccgtaccaatctctgaatgccccataattattatttccagtgtttgggatgaccaggatcccaagcctcctgctgccacaatgtttataaaggccaaatgatagcgggggctaagttggtgcttttgagaaccaagtaaaacaaaaccactgggaggagtctattttaaagaattcggttgaaaaaa

SEQ ID NO: 123726 - DNA, 1625 bp, Homo sapiens
  Payload ID: 4282
  Gene Symbol: CDK2AP1
  Gene Name: cyclin-dependent kinase 2 associated protein 1
  Uniprot ID: O14519
  ENST ID: ENST00000261692
  CDS Start-End: 523-870
gcccccaccatcaaggggaagaaagtgctcttcggattccggttcgccctggcctcccgcagccgccgcgggaccggcccccagcacacccccggggcgccgggcgcggggcagccgcccggacgcgcgcgggcctcaggcgccgccgggaccccagccccccaaactttggcaagttgcgggcgccgagcgcacccggaggcgcggggcgcggccgcaggcggagccgccccctgacgccgggccgccccctcccggccccggccgccccgccggctccgcggaaagtttgcggccgcccctgcgccgcacccggggcctgggtgagactgcggcggcggcagggcgcggacggccatatttgccggcgcggcccgagccgccgacaacaaaaagtgcgcgggcgctcggcgggcgctcggacgggcgcggggctgcagcgctaccgcccggcctcgccgccgccgccgccgccctcgcggcctggccccgccgcgcccggcgcgcccgccgcccggggggatgtcttacaaaccgaacttggccgcgcacatgcccgccgccgccctcaacgccgctgggagtgtccactcgccttccaccagcatggcaacgtcttcacagtaccgccagctgctcagtgactacgggccaccgtccctaggctacacccagggaactgggaacagccaggtgccccaaagcaaatacgcggagctgctggccatcattgaagagctggggaaggagatcagacccacgtacgcagggagcaagagtgccatggagaggctgaagcgcggcatcattcacgctagaggactggttcgggagtgcttggcagaaacggaacggaatgccagatcctagctgccttgttggttttgaaggatttccatctttttacaagatgagaagttacagttcatctcccctgttcagatgaaacccttgttttcaaaatggttacagtttcgtttttcctcccatggttcacttggctctgaacctacagtctcaaagattgagaaaagattttgcagttaattaggatttgcattttaagtagttaggaactgcccaggttttttttgttttttaagcattgatttaaaagatgcacggaaagttatcttacagcaaactgtagtttgcctccaagacaccattgtctccctttaatcttctcttttgtatacatttgttacccatggtgttctttgttccttttcataagctaataccactgtagggattttgttttgaacgcatattgacagcacgctttacttagtagccggttcccatttgccatacaatgtaggttctgcttaatgtaacttcttttttgcttaagcatttgcatgactattagtgcttcaaagtcaatttttaaaaatgcacaagttataaatacagaagaaagagcaacccaccaaacctaacaaggacccccgaacactttcatactaagactgtaagtagatctcagttctgcgtttattgtaagttgataaaaacatctggaagaaaatgactaaaactgtttgcatctttgtatgtatttattacttgatgtaataaagcttattttcattaacaatttgtattaaaatgtgggttcc

SEQ ID NO: 123727 - DNA, 931 bp, Homo sapiens
  Payload ID: 4282
  Gene Symbol: CDK2AP1
  Gene Name: cyclin-dependent kinase 2 associated protein 1
  Uniprot ID: O14519
  ENST ID: ENST00000544658
  CDS Start-End: 208-471
gtctcaaaggagtcttggatccccaaagggttaaaaaccacttcatacagacagagacatgaaatttatttgaaatcaatgtcaagcatcggttattctaatcctggggcttggccagacctgggcgtctggaatgatctacgtgcttaaatacaccactcgccaccattttctccagctgggagtgtccactcgccttccaccagcatggcaacgtcttcacagtaccgccagctgctcagtgactacgggccaccgtccctaggctacacccagggaactgggaacagccaggtgccccaaagcaaatacgcggagctgctggccatcattgaagagctggggaaggagatcagacccacgtacgcagggagcaagagtgccatggagaggctgaagcgcggcatcattcacgctagaggactggttcgggagtgcttggcagaaacggaacggaatgccagatcctagctgccttgttggttttgaaggatttccatctttttacaagatgagaagttacagttcatctcccctgttcagatgaaacccttgttttcaaaatggttacagtttcgtttttcctcccatggttcacttggctctgaacctacagtctcaaagattgagaaaagattttgcagttaattaggatttgcattttaagtagttaggaactgcccaggttttttttgttttttaagcattgatttaaaagatgcacggaaagttatcttacagcaaactgtagtttgcctccaagacaccattgtctccctttaatcttctcttttgtatacatttgttacccatggtgttctttgttccttttcataagctaataccactgtagggattttgttttgaacgcatattgacagcacgctttacttagtagccggttcccatttgccatacaatgtaggttctg

SEQ ID NO: 123728 - DNA, 1812 bp, Homo sapiens
  Payload ID: 4282
  Gene Symbol: CDK2AP1
  Gene Name: cyclin-dependent kinase 2 associated protein 1
  Uniprot ID: O14519
  ENST ID: ENST00000542174
  CDS Start-End: 825-1088
tcctagccacggactcccctgccagatccaggaggctgcgttctgggctgggccctgcttggtcactgactgcagctctggacaggccccaatgttgcatcccatatgtggggcctcaaccctcctgtcttgggatacagagcccttggggcatagactgctaagagtctggtcccctctttggggagggggagacaggcacagaggggttgaggggctttatctggggcacacagaggccatggtgttctctagatttctgatttgatgtccagcgtgcctgtctccagccagggttgggtctcaaatactccaaggccttcctgtcttccctgtcattgagcacagcagagatttgagcgcatagaagcaaaaaggcttggaagctcagcctggtttcgaccagcctatgtggcgctgtggtgtgatgtggcctctaggttctcagcctctggggaccaggacacagggagaggggatgggcagagttcaggccaggagtggcaataattttatctttgggagcagccctgctgcttggaaggttctggttggatgggatggagctctgtgaggaccagcggctgctgcagagctggggatggtcaggtgccttgtagctacatttcattatccatcttatatgctggtcaaaccggaggtggagagcagggttctccatcctgctacagttggtggtgtgggtcctgggcaagggctgttgcaggacccggagtccttgccttggtacaactggctgagctgactcctggcctctctctccccaccccacagctgggagtgtccactcgccttccaccagcatggcaacgtcttcacagtaccgccagctgctcagtgactacgggccaccgtccctaggctacacccagggaactgggaacagccaggtgccccaaagcaaatacgcggagctgctggccatcattgaagagctggggaaggagatcagacccacgtacgcagggagcaagagtgccatggagaggctgaagcgcggcatcattcacgctagaggactggttcgggagtgcttggcagaaacggaacggaatgccagatcctagctgccttgttggttttgaaggatttccatctttttacaagatgagaagttacagttcatctcccctgttcagatgaaacccttgttttcaaaatggttacagtttcgtttttcctcccatggttcacttggctctgaacctacagtctcaaagattgagaaaagattttgcagttaattaggatttgcattttaagtagttaggaactgcccaggttttttttgttttttaagcattgatttaaaagatgcacggaaagttatcttacagcaaactgtagtttgcctccaagacaccattgtctccctttaatcttctcttttgtatacatttgttacccatggtgttctttgttccttttcataagctaataccactgtagggattttgttttgaacgcatattgacagcacgctttacttagtagccggttcccatttgccatacaatgtaggttctgcttaatgtaacttcttttttgcttaagcatttgcatgactattagtgcttcaaagtcaatttttaaaaatgcacaagttataaatacagaagaaagagcaacccaccaaacctaacaaggacccccgaacactttcatactaagactgtaagtagatctcagttctgcgtttattgtaagttgataaaaacatctggaagaaaatgactaaaactgtttgcatctttgtatgtatttattacttgatgtaataaagcttatttt

SEQ ID NO: 123729 - DNA, 1161 bp, Homo sapiens
  Payload ID: 4282
  Gene Symbol: CDK2AP1
  Gene Name: cyclin-dependent kinase 2 associated protein 1
  Uniprot ID: O14519
  ENST ID: ENST00000538446
  CDS Start-End: 165-428
ctcttgggaagcactgcctctaacaaatggagaaactgaggactggagggcggggagcctgtctgaggtcacacagccaggagtggcacagctggggctggcacgaagtccagtggggaggacagaaaaggggagctgggagtgtccactcgccttccaccagcatggcaacgtcttcacagtaccgccagctgctcagtgactacgggccaccgtccctaggctacacccagggaactgggaacagccaggtgccccaaagcaaatacgcggagctgctggccatcattgaagagctggggaaggagatcagacccacgtacgcagggagcaagagtgccatggagaggctgaagcgcggcatcattcacgctagaggactggttcgggagtgcttggcagaaacggaacggaatgccagatcctagctgccttgttggttttgaaggatttccatctttttacaagatgagaagttacagttcatctcccctgttcagatgaaacccttgttttcaaaatggttacagtttcgtttttcctcccatggttcacttggctctgaacctacagtctcaaagattgagaaaagattttgcagttaattaggatttgcattttaagtagttaggaactgcccaggttttttttgttttttaagcattgatttaaaagatgcacggaaagttatcttacagcaaactgtagtttgcctccaagacaccattgtctccctttaatcttctcttttgtatacatttgttacccatggtgttctttgttccttttcataagctaataccactgtagggattttgttttgaacgcatattgacagcacgctttacttagtagccggttcccatttgccatacaatgtaggttctgcttaatgtaacttcttttttgcttaagcatttgcatgactattagtgcttcaaagtcaatttttaaaaatgcacaagttataaatacagaagaaagagcaacccaccaaacctaacaaggacccccgaacactttcatactaagactgtaagtagatctcagttctgcgtttattgtaagttgataaaaacatctggaagaaaatgactaaaactgtttgcatctttgtatgtatttattacttgatgtaataaagcttattttcattaacaa

SEQ ID NO: 123730 - DNA, 1281 bp, Homo sapiens
  Payload ID: 4282
  Gene Symbol: CDK2AP1
  Gene Name: cyclin-dependent kinase 2 associated protein 1
  Uniprot ID: O14519
  ENST ID: ENST00000535979
  CDS Start-End: 285-548
cggggtcgtgaagcagcccgggcggggggcgctgcgggcagggccaggacccgcgcgggcgggcgcggatggagggctgcggggctgcggggctgcggggctgccgggctgccgggggccctgaggtcgcggggccgccgggactgggaccaggatggggtcgccggcgggcagcgtactcggaggcccgggggcctcggccgggagcgtgggagcaggggctaccccatgcggtcacgcggggacccccgtaagctgggagtgtccactcgccttccaccagcatggcaacgtcttcacagtaccgccagctgctcagtgactacgggccaccgtccctaggctacacccagggaactgggaacagccaggtgccccaaagcaaatacgcggagctgctggccatcattgaagagctggggaaggagatcagacccacgtacgcagggagcaagagtgccatggagaggctgaagcgcggcatcattcacgctagaggactggttcgggagtgcttggcagaaacggaacggaatgccagatcctagctgccttgttggttttgaaggatttccatctttttacaagatgagaagttacagttcatctcccctgttcagatgaaacccttgttttcaaaatggttacagtttcgtttttcctcccatggttcacttggctctgaacctacagtctcaaagattgagaaaagattttgcagttaattaggatttgcattttaagtagttaggaactgcccaggttttttttgttttttaagcattgatttaaaagatgcacggaaagttatcttacagcaaactgtagtttgcctccaagacaccattgtctccctttaatcttctcttttgtatacatttgttacccatggtgttctttgttccttttcataagctaataccactgtagggattttgttttgaacgcatattgacagcacgctttacttagtagccggttcccatttgccatacaatgtaggttctgcttaatgtaacttcttttttgcttaagcatttgcatgactattagtgcttcaaagtcaatttttaaaaatgcacaagttataaatacagaagaaagagcaacccaccaaacctaacaaggacccccgaacactttcatactaagactgtaagtagatctcagttctgcgtttattgtaagttgataaaaacatctggaagaaaatgactaaaactgtttgcatctttgtatgtatttattacttgatgtaataaagcttattttcattaacaa

SEQ ID NO: 123731 - DNA, 344 bp, Homo sapiens
  Payload ID: 4282
  Gene Symbol: CDK2AP1
  Gene Name: cyclin-dependent kinase 2 associated protein 1
  ENST ID: ENST00000535796
  CDS Start-End: 146-344
cagcctggcaccagctgtctgtccccgaggccaagtctgcggcgcccactgtgtgtgtgagagagagaccgtgtggctctgggggcggcaggcgggcagctgccgaggaggactagctgggagtgtccactcgccttccaccagcatggcaacgtcttcacagtaccgccagctgctcagtgactacgggccaccgtccctaggctacacccagggaactgggaacagccaggtgccccaaagcaaatacgcggagctgctggccatcattgaagagctggggaaggagatcagacccacgtacgcagggagcaagagtgccatggagaggctgaagcgcggta

SEQ ID NO: 123732 - DNA, 1144 bp, Homo sapiens
  Payload ID: 4282
  Gene Symbol: CDK2AP1
  Gene Name: cyclin-dependent kinase 2 associated protein 1
  Uniprot ID: O14519
  ENST ID: ENST00000618072
  CDS Start-End: 116-379
ccaagtctgcggcgcccactgtgtgtgtgagagagagaccgtgtggctctgggggcggcaggcgggcagctgccgaggaggactagctgggagtgtccactcgccttccaccagcatggcaacgtcttcacagtaccgccagctgctcagtgactacgggccaccgtccctaggctacacccagggaactgggaacagccaggtgccccaaagcaaatacgcggagctgctggccatcattgaagagctggggaaggagatcagacccacgtacgcagggagcaagagtgccatggagaggctgaagcgcggcatcattcacgctagaggactggttcgggagtgcttggcagaaacggaacggaatgccagatcctagctgccttgttggttttgaaggatttccatctttttacaagatgagaagttacagttcatctcccctgttcagatgaaacccttgttttcaaaatggttacagtttcgtttttcctcccatggttcacttggctctgaacctacagtctcaaagattgagaaaagattttgcagttaattaggatttgcattttaagtagttaggaactgcccaggttttttttgttttttaagcattgatttaaaagatgcacggaaagttatcttacagcaaactgtagtttgcctccaagacaccattgtctccctttaatcttctcttttgtatacatttgttacccatggtgttctttgttccttttcataagctaataccactgtagggattttgttttgaacgcatattgacagcacgctttacttagtagccggttcccatttgccatacaatgtaggttctgcttaatgtaacttcttttttgcttaagcatttgcatgactattagtgcttcaaagtcaatttttaaaaatgcacaagttataaatacagaagaaagagcaacccaccaaacctaacaaggacccccgaacactttcatactaagactgtaagtagatctcagttctgcgtttattgtaagttgataaaaacatctggaagaaaatgactaaaactgtttgcatctttgtatgtatttattacttgatgtaataaagcttattttcattaacaatttgtattaaaatgtgggttccttgaattctt

SEQ ID NO: 123733 - DNA, 1378 bp, Homo sapiens
  Payload ID: 4283
  Gene Symbol: CDK2AP2
  Gene Name: cyclin-dependent kinase 2 associated protein 2
  Uniprot ID: O75956
  ENST ID: ENST00000301488
  CDS Start-End: 550-930
gcgcgcaaggcaccggtggcagcggcgacggcagctgcgacagcaacccctgctgggccgaaactgggcagagcggagcagacgtctgaagcagcgcgagtgaggcgcgagggtagcgcccgcgcccgggaagacccctcggcgcgaaccggcagcccagccccgggtcccggttcccaaggccccgcctctagggcctggggactaatcggattgagagcgcgccggcccgggccgcgaactcgccaattgcggagggcggtggccaccgcccaatccggagcagacaggtgcgaggtccggaaggcggaggccaatcggcggcggttgcgacctgctggggcaggtctcggccaataaggaggctcgagtgacatcttcgcgcaccaatcgggagtgagggagcattcgtgcccgctcgcccttccggccagacctctatttaccaggggcgtgcagcccgcttgccaatcagagcgcggctgagcggccccgcagccaacccccgaggagcggccggctggcgtccgccgcgcccaggagttggggatgtcctacaaacccatcgcccctgctcccagcagcacccctggctccagcacccctgggccgggcaccccggtccctacaggaagcgtcccgtcgccgtcgggctcagtgccaggagccggcgctcctttcagaccgctgtttaacgactttggaccgccttccatgggctacgtgcaggcgatgaagccacccggcgcccagggctcccagagcacctacacggacctgctgtcagtcatagaggagatgggcaaagagatccggcctacctatgctggcagcaagagcgccatggagcgcctgaagagaggtatcatccatgcccgggccctagtcagagagtgcctggcagagacagagcggaacgcccgcacgtaacaggaagcgcctcggcctcagcgtctggacctatccggccactgcagagcacccgcttctccctggccttcatcccgagttgcactaaccatcctgggcttcctgtcctgtgtcccttggtgggtcccctccaggaaccaaggagtggccctccaggtggcagcactaaggacacccccccacaacaagagttagcagcgaggtccccatgagtcccacccatgacctgccgacagtgttgcccaccggaacttttgtggcccctaccgctcagcccttcccagcacttctcccactttgtcccgagcctccttctcccccagcaggggcacaggcctggcacctccctgccttgtgtcctgagccatagtgactcttttatctgtgtgtcttttgctaaatatgccctttttatattaataaaagatgatttggagttgtgctctca

SEQ ID NO: 123734 - DNA, 634 bp, Homo sapiens
  Payload ID: 4283
  Gene Symbol: CDK2AP2
  Gene Name: cyclin-dependent kinase 2 associated protein 2
  ENST ID: ENST00000531506
  CDS Start-End: 10-330
gagttggggatgtcctacaaacccatcgcccctgctcccagcagcacccctggctccagcacccctgggccgggcaccccggtccctacaggaagcgtcccgtcgccgtcgggctcagtgccaggagccggcgctcctttcagaccgctgtttaacgactttggaccgccttccatgggctacgtgcaggcgatgaagccacccggcgcccagggctcccagagcacctacacggacctgctgtcagtcatagaggagatgggcaaagagatccggcctacctatgctggcagcaagagcgccatggagcgcctgaagagaggtaagtgaggccaggccgccctgctcaggaaaccgacactggactatccttcatgagggaaggaaggacatctggaggccacctgagccaagcctagaggatgtccagtattactaccagagaggtgttttgaatcgaattgaaattgagtccatttccagggaagagcatgggaatttgtatttcaacagggcaaccttgaggattaaccaaacctctaatttcatctagccgtcattagatttgaatttcttttgccgaaagtggaaagggagtggggaggcaggggtcctcctctggagggcagtgggt

SEQ ID NO: 123735 - DNA, 923 bp, Homo sapiens
  Payload ID: 4283
  Gene Symbol: CDK2AP2
  Gene Name: cyclin-dependent kinase 2 associated protein 2
  ENST ID: ENST00000531178
  CDS Start-End: 77-262
agagcgcggctgagcggccccgcagccaacccccgaggagcggccggctggcgtccgccgcgcccaggagttggggatgtcctacaaacccatcgcccctgctcccagcagcacccctggctccagcacccctgggccgggcaccccggtccctacaggtgaggatccagctccacccctgctcgcctgccgggcggtcgaggtctcgaagagaagacggcctgagttctgcaatactgggcctgccgcctaccctcgctgagcctcagtttgctggcctgtgaagtgggcgtggtcacgaagcgtcccgtcgccgtcgggctcagtgccaggagccggcgctcctttcagaccgctgtttaacgactttggaccgccttccatgggctacgtgcaggcgatgaagccacccggcgcccagggctcccagagcacctacacggacctgctgtcagtcatagaggagatgggcaaagagatccggcctacctatgctggcagcaagagcgccatggagcgcctgaagagaggtatcatccatgcccgggccctagtcagagagtgcctggcagagacagagcggaacgcccgcacgtaacaggaagcgcctcggcctcagcgtctggacctatccggccactgcagagcacccgcttctccctggccttcatcccgagttgcactaaccatcctgggcttcctgtcctgtgtcccttggtgggtcccctccaggaaccaaggagtggccctccaggtggcagcactaaggacacccccccacaacaagagttagcagcgaggtccccatgagtcccacccatgacctgccgacagtgttgcccaccggaacttttgtggcccctaccgctcagcccttcccagcacttctcccactttgtcccgagcctccttctcccccagca

SEQ ID NO: 123736 - DNA, 955 bp, Homo sapiens
  Payload ID: 4284
  Gene Symbol: CINP
  Gene Name: cyclin-dependent kinase 2 interacting protein
  Uniprot ID: Q9BW66
  ENST ID: ENST00000216756
  CDS Start-End: 42-680
gcggggcttcgcgtctccttctacggatatctgtggaccttatggaagcaaagactcttggaactgtaacgcccagaaaacctgtcttatctgtcagtgcaagaaaaattaaggacaatgcggctgattggcacaatttaatcctgaagtgggaaaccctcaatgatgcaggttttaccactgcaaataatattgccaacttgaaaatcagtttattgaataaagacaagatagaactagacagcagcagcccagcctcgaaggaaaatgaagaaaaggtgtgtctggaatataacgaggaactggagaagctgtgtgaggaactgcaggccaccttggatgggttgaccaaaatacaggtgaaaatggaaaagctgtcttcaactaccaagggaatttgtgaactagaaaactaccattatggggaggagagtaaacgaccccctctgttccacacgtggcctacaacccatttctatgaggtttcgcataagctcttggagatgtacaggaaggagctgctcctgaagcgcacggtggccaaggagcttgcccacaccggggatcccgacctcaccctgagctacctgtccatgtggctgcaccagccctatgtggagagcgacagcaggctgcatctggagagcatgctgctggagacaggccaccgagctctctgacgtcctgagacggctgcggacactggctccttccacgtctcaccaggcagacagtctgcctaggacccagtgccgcaggcctggatcagaccccaggatcagaccttggggtcttctggccagagcttgtcaccagccccatggcctctccaggcgtgctcatgcccacaacccgcggccagccccacgtggtgctgctcagccttctctgcccctcctgggaatctgtcattcgtgggtgcttcagagtaaaatcaatgagtttctgagcagaa

SEQ ID NO: 123737 - DNA, 845 bp, Homo sapiens
  Payload ID: 4284
  Gene Symbol: CINP
  Gene Name: cyclin-dependent kinase 2 interacting protein
  Uniprot ID: Q9BW66
  ENST ID: ENST00000536961
  CDS Start-End: 90-773
agcctagcccgcaggcccctcgcagcctctgcgagctgctcgggagacagttttgccgagcctccgttttttcacatgtgcagtgacagatgaacgggacgatatacgcaaatgagtgtcagcagatccgacatccaaattcaaagactcttggaactgtaacgcccagaaaacctgtcttatctgtcagtgcaagaaaaattaaggacaatgcggctgattggcacaatttaatcctgaagtgggaaaccctcaatgatgcaggttttaccactgcaaataatattgccaacttgaaaatcagtttattgaataaagacaagatagaactagacagcagcagcccagcctcgaaggaaaatgaagaaaaggtgtgtctggaatataacgaggaactggagaagctgtgtgaggaactgcaggccaccttggatgggttgaccaaaatacaggtgaaaatggaaaagctgtcttcaactaccaagggaatttgtgaactagaaaactaccattatggggaggagagtaaacgaccccctctgttccacacgtggcctacaacccatttctatgaggtttcgcataagctcttggagatgtacaggaaggagctgctcctgaagcgcacggtggccaaggagcttgcccacaccggggatcccgacctcaccctgagctacctgtccatgtggctgcaccagccctatgtggagagcgacagcaggctgcatctggagagcatgctgctggagacaggccaccgagctctctgacgtcctgagacggctgcggacactggctccttccacgtctcaccaggcagacagtctgcctaggacccagtg

SEQ ID NO: 123738 - DNA, 572 bp, Homo sapiens
  Payload ID: 4284
  Gene Symbol: CINP
  Gene Name: cyclin-dependent kinase 2 interacting protein
  Uniprot ID: Q9BW66
  ENST ID: ENST00000541568
  CDS Start-End: 18-374
ggatatctgtggaccttatggaagcaaagactcttggaactgtaacgcccagaaaacctgtcttatctgtcagtgcaagaaaaattaaggacaatgcggctgattggcacaatttaatcctgaagtgggaaaccctcaatgatgcaggttttaccactgcaaataatattgccaacttgaaaatcagtttattgaataaagacaagatagaactagacagcagcagcccagcctcgaaggaaaatgaagaaaaggtgtgtctggaatataacgaggaactggagaagctgtgtgaggaactgcaggccaccttggatgggttgatgaggtttcgcataagctcttggagatgtacaggaaggagctgctcctgaagcgcacggtggccaaggagcttgcccacaccggggatcccgacctcaccctgagctacctgtccatgtggctgcaccagccctatgtggagagcgacagcaggctgcatctggagagcatgctgctggagacaggccaccgagctctctgacgtcctgagacggctgcggacactggctccttccacgtctcaccag

SEQ ID NO: 123739 - DNA, 549 bp, Homo sapiens
  Payload ID: 4284
  Gene Symbol: CINP
  Gene Name: cyclin-dependent kinase 2 interacting protein
  ENST ID: ENST00000558764
  CDS Start-End: 64-405
aaatgcgtttccggtggggtgggcggggcttcgcgtctccttctacggatatctgtggaccttatggaagcaaagactcttggaactgtaacgcccagaaaacctgtcttatctgtcagtgcaagaaaaattaaggacaatgcggctgattggcacaatttaatcctgaagtgggaaaccctcaatgatgcaggttttaccactgcaaataatattgccaacttgaaaatcagtttattgaataaagacaagatagaactagacagcagcagcccagcctcgaaggaaaatgaagaaaaggtgtgtctggaatataacgaggaactggagaagctgtgtgaggaactgcaggccaccttggatgggttgagaatggtttccagacctggtctgtgtctttcataactttgaccttctgggggtttcatgcaccgttcttcctaagctgggctaacatttcactgtggtctgtgtttgctgtgggaagaagccaccgatgttgaaataccaaaatacaggtgaaaatggaaaagctgtcttcaactacca

SEQ ID NO: 123740 - DNA, 4270 bp, Homo sapiens
  Payload ID: 4284
  Gene Symbol: CINP
  Gene Name: cyclin-dependent kinase 2 interacting protein
  Uniprot ID: Q9BW66
  ENST ID: ENST00000559514
  CDS Start-End: 66-704
gcaaatgcgtttccggtggggtgggcggggcttcgcgtctccttctacggatatctgtggaccttatggaagcaaagactcttggaactgtaacgcccagaaaacctgtcttatctgtcagtgcaagaaaaattaaggacaatgcggctgattggcacaatttaatcctgaagtgggaaaccctcaatgatgcaggttttaccactgcaaataatattgccaacttgaaaatcagtttattgaataaagacaagatagaactagacagcagcagcccagcctcgaaggaaaatgaagaaaaggtgtgtctggaatataacgaggaactggagaagctgtgtgaggaactgcaggccaccttggatgggttgaccaaaatacaggtgaaaatggaaaagctgtcttcaactaccaagggaatttgtgaactagaaaactaccattatggggaggagagtaaacgaccccctctgttccacacgtggcctacaacccatttctatgaggtttcgcataagctcttggagatgtacaggaaggagctgctcctgaagcgcacggtggccaaggagcttgcccacaccggggatcccgacctcaccctgagctacctgtccatgtggctgcaccagccctatgtggagagcgacagcaggctgcatctggagagcatgctgctggagacaggccaccgagctctctgacgtcctgagacggctgcggacactggctccttccacgtctcaccaggcagacagtctgcctaggacccagtgccgcaggcctggatcagaccccaggatcagaccttggggtcttctggccagagcttgtcaccagccccatggcctctccaggcgtgctcatgcccacaacccgcggccagccccacgtggtgctgctcagccttctctgcccctcctgggaatctgtcattcgtgggtgcttcagagtaaaatcaatgagtttctgagcagaatgagatcccaggagggcactcatggtggtttatgggactctggactcctgagaagcggccttgagtctacaggatacatctacagcctgacctgaccacccaacactcccaggcagccgcggcttgctcccctgctggccatttccagcctgctagaaaacccacctttttgttcctaccgaccgtggctttgagatcaagtgagggtaggaaatgcccctggtcactaaaagggctgtaggaaaggctggctctctgagaatacagctgccctccagggcaggacctggaaggagcacagcgccagggcgacacatggtcacaagcccagctctgtccctgagcagcgtgctctctgcttggggtctctcctgaccgtctctgcaaggcgtggggagagacctgctgctccctttgaatgctttcttccacatgtggacaaatggcccttcccttccttccccgtaacacagcccacggaaatattgaagacatgccactaagtgactttccaagtgggacatcaaagaactgggcttctaccctgagcagcatcttgctgtggacctcaagtaagtcaccccatcatttatgcctcaccttcctcatctgtaaaatgtgaggagagccaggcaccgtggcgcacgcctgtagtcccagctactcaggaggccgaggcaggaggatcgcttaagcctgggagttaaaggctgcaatgagctatgattgcaccactgcactccagcctgggcaacagagtgaaaactcatctctaaaaaaaaaaatcaggccggggccgggcacagtggctcacgcctgtaatcccagcactttgggaggccgaggcaggcagatcacgaggtcaagagatcgagaccatcctggccaacatggtgaaacctcatctctactaaaaatacaaaaattagccgggtgtggtggcggacacctgtagtcccagctactcggcaggctgaggcaggagaatcacttgaacccaggaagcggagggtgcagtgagccgagattgcaccattgcacttcagcctggcgacagcaagactccatctcaaaaaaaaacaatcaggcccagtgcagtggctcacacctataatcccagcactttgggatgctgaggcgcgtagatcacctgaggtcaggagttcaagatcagcctgaccaccatggagataccccgtctctactaaaaatacaaaatgatccaggtgtgatggcacatgcctgtaatcccagctacttgggaggctgaggcaggagaattgcttgaaccctgtggtggaggttgcggtgagccaagatcgagccattgcactccagcttgggcaacaagaccaaaactccatctcaaaaaaaaaaaaaaaaatcattggccaggtgcagtggctcatgcctgtactgtaatcccagcactttgggaagctgaggtgggcggattgcctgagctcaagagtttgagaccaccctgggcaacatggtgaaaccccgtatctactaaaatacaaaaaaaaaaaattagctgggcatggtggcatgctcctgtagtcacagctactcaggaggctgaggcacgagaatcgcttgagcccaggcggcagaggttgcagtgagccaagatcgcgccactgcactccagcttgggctacagagtaagacttggtctcaaaaataattaaattaatttaatttaatttaatttaaaaaatcatgcaagtagaaatgactttttcccccttctatcaataaaatgctgcccagaatgactagcttattttctttttaattgaacccaaaagaagcttctagtatggagcaagtctggtggaaaagcagcatatctcccaggagagaagggaaacggagcagggccaatcatcaggtgacagtgcagtgctactcatcaccatcatgaaaaactcatgagcgtcagacgcgccacagggattcctgatcaggtaatatctgctattattatgacaagctccatagaaaaatgtagacagcagggcagaaagacattattctttataaataaaaggttcatctgtgcaatattcacattagaaaaatatacattgcttgccatagaccttctctggataaaatcagacgaatctaggatctgactccacttcactgtgagggctctggctccacggtgacgaccgactccacagcttctagaggaactccttctagcgggcccatccgcaggcacgcccctctgcatcagtcactgtgacaatgtcctcctcctgagacactattgtacctggaggggacaagataagcccatcggaagtctgaataaaaatctgcttctgtccctgagacagtaactcatggctcccattggaaatttcaaaagccatggcttcgccgacagcaaccacgctctccagttctctctggccagagtgcacctccatcccacaggggaaccggttcaagtcccccgaaaggcttctgagacacccttcagtcaatagtgatccatgtgggccaggctgaggccctggcttgggcacagtcctgtaggcacagtccactgccacgctatccacagacaaaattttctcaagcggaggggctgccacctctgtaggcaggacgctggtggggctgggctgctggtggttcaggtggaagtcacaaaccttgccgaggtgtcctgcctctgcatgtccaggccccccaggcggcagggactctgctccaccaccagatgacaaagggctgcagaaacccgggctcctcaggctgtcccaggtgtcctggtctgaagagtgttccaaagcattctctccaggaaacgctgccacctgtgcctgggtcagcctcctaggctctcctgactgagcataaacaggcagcccactgacatcccgggatgagagagcagcacctatagaccccctcctggcttctaagttagccagtgcctgaagctgcgggcccgcctggaacacgctcccattgccaccagaaaccgtcgttgtatggctttcttcagaacggggagagacagtcacatttactggaggggaaaaacctaaacattttgggaaacaggtgaacatggcgtgtactgtgtcatggcccactcactgcactcaccacccaaaaccagctaggccaagtcacctgccctgcagaaaagtcaaagcatcgatgctccttgctccttgggattggtagcaattttaaaaaatacgtccctattctctattcacaaagacagattttgtattaaaaatatgctctaagagccaa

SEQ ID NO: 123741 - DNA, 1781 bp, Homo sapiens
  Payload ID: 4284
  Gene Symbol: CINP
  Gene Name: cyclin-dependent kinase 2 interacting protein
  ENST ID: ENST00000559504
  CDS Start-End: 1-640
cctatcagcaaagactcttggaactgtaacgcccagaaaacctgtcttatctgtcagtgcaagaaaaattaaggacaatgcggctgattggcacaatttaatcctgaagtgggaaaccctcaatgatgcaggttttaccactgcaaataatattgccaacttgaaaatcagtttattgaataaagacaagatagaactagacagcagcagcccagcctcgaaggaaaatgaagaaaaggtgtgtctggaatataacgaggaactggagaagctgtgtgaggaactgcaggccaccttggatgggttgaccaaaatacaggtgaaaatggaaaagctgtcttcaactaccaagggaatttgtgaactagaaaactaccattatggggaggagagtaaacgaccccctctgttccacacgtggcctacaacccatttctatgaggtttcgcataagctcttggagatgtacaggaaggagctgctcctgaagcgcacggtggccaaggagcttgcccacaccggggatcccgacctcaccctgagctacctgtccatgtggctgcaccagccctatgtggagagcgacagcaggctgcatctggagagcatgctgctggagacaggccaccgagctctctgacgtcctgagacggctgcggacactggctccttccacgtctcaccaggcagacagtctgcctaggacccagtgccgcaggcctggatcagaccccaggatcagaccttggggtcttctggccagagcttgtcaccagccccatggcctctccaggcgtgctcatgcccacaacccgcggccagccccacgtggtgctgctcagccttctctgcccctcctgggaatctgtcattcgtgggtgcttcagagtaaaatcaatgagtttctgagcagaatgagatcccaggagggcactcatggtggtttatgggactctggactcctgagaagcggccttgagtctacaggatacatctacagcctgacctgaccacccaacactcccaggcagccgcggcttgctcccctgctggccatttccagcctgctagaaaacccacctttttgttcctaccgaccgtggctttgagatcaagtgagggtaggaaatgcccctggtcactaaaagggctgtaggaaaggctggctctctgagaatacagctgccctccagggcaggacctggaaggagcacagcgccagggcgacacatggtcacaagcccagctctgtccctgagcagcgtgctctctgcttggggtctctcctgaccgtctctgcaaggcgtggggagagacctgctgctccctttgaatgctttcttccacatgtggacaaatggcccttcccttccttccccgtaacacagcccacggaaatattgaagacatgccactaagtgactttccaagtgggacatcaaagaactgggcttctaccctgagcagcatcttgctgtggacctcaagtaagtcaccccatcatttatgcctcaccttcctcatctgtaaaatgtgaggagagccaggcaccgtggcgcacgcctgtagtcccagctactcaggaggccgaggcaggaggatcgcttaagcctgggagttaaaggctgcaatgagctatgattgcaccactgcactccagcctgggcaacagaagtaagacttggtctcaaaaataattaaattaatttaatttaatttaatttaaaaaatcatgcaagtagaaatgactttttcccccttctatcaataaaatgctgccc

SEQ ID NO: 123742 - DNA, 2175 bp, Homo sapiens
  Payload ID: 4285
  Gene Symbol: CDK20
  Gene Name: cyclin-dependent kinase 20
  Uniprot ID: Q8IZL9
  ENST ID: ENST00000325303
  CDS Start-End: 307-1347
ctgtcatcgttccgtgggccctgctgcgggcacgctctcggcgcatgcgttttttatgcgggattaagcttgctgctgcgtgacagcggagggctaggaaaaggcgcagtggggcccggagctgtcacccctgactcgacgcagcttccgttctcctggtgacgtcgcctacaggaaccgccccagtggtcagctgccgcgctgttgctaggcaacagcgtgcgagctcagatcagcgtggggtggaggagaagtggagtttggaagttcaggggcacaggggcacaggcccacgactgcagcgggatggaccagtactgcatcctgggccgcatcggggagggcgcccacggcatcgtcttcaaggccaagcacgtggagactggcgagatagttgccctcaagaaggtggccctaaggcggttggaggacggcttccctaaccaggccctgcgggagattaaggctctgcaggagatggaggacaatcagtatgtggtacaactgaaggctgtgttcccacacggtggaggctttgtgctggcctttgagttcatgctgtcggatctggccgaggtggtgcgccatgcccagaggccactagcccaggcacaggtcaagagctacctgcagatgctgctcaagggtgtcgccttctgccatgccaacaacattgtacatcgggacctgaaacctgccaacctgctcatcagcgcctcaggccagctcaagatagcggactttggcctggctcgagtcttttccccagacggcagccgcctctacacacaccaggtggccaccaggtggtaccgagcccccgagctcctgtatggtgcccgccagtatgaccagggcgtcgatctgtggtctgtgggctgcatcatgggggagctgttgaatgggtccccccttttcccgggcaagaacgatattgaacagctttgctatgtgcttcgcatcttgggcaccccaaaccctcaagtctggccggagctcactgagctgccggactacaacaagatctcctttaaggagcaggtgcccatgcccctggaggaggtgctgcctgacgtctctccccaggcattggatctgctgggtcaattccttctctaccctcctcaccagcgcatcgcagcttccaaggctctcctccatcagtacttcttcacagctcccctgcctgcccatccatctgagctgccgattcctcagcgtctagggggacctgcccccaaggcccatccagggcccccccacatccatgacttccacgtggaccggcctcttgaggagtcgctgttgaacccagagctgattcggcccttcatcctggaggggtgagaagttggccctggtcccgtctgcctgctcctcaggaccactcagtccacctgttcctctgccacctgcctggcttcaccctccaaggcctccccatggccacagtgggcccacaccacaccctgccccttagcccttgcgagggttggtctcgaggcagaggtcatgttcccagccaagagtatgagaacatccagtcgagcagaggagattcatggcctgtgctcggtgagccttaccttctgtgtgctactgacgtacccatcaggacagtgagctctgctgccagtcaaggcctgcatatgcagaatgacgatgcctgccttggtgctgcttccccgagtgctgcctcctggtcaaggagaagtgcagagagtaaggtgtccttatgttggaaactcaagtggaaggaagatttggtttggttttattctcagagccattaaacactagttcagtatgtgagatatagattctaaaaacctcaggtggctctgccttatgtctgttcctccttcatttctctcaagggaaatggctaaggtggcattgtctcatggctctcgtttttggggtcatggggagggtagcaccaggcatagccacttttgccctgagggactcctgtgtacttcacatcactgagcactcatttagaagtgagggagacagaagtctaggcccagggatggctccagttggggatccagcaggagaccctctgcacatgaggctggtttaccaacatctactccctcaggatgagcgtgagccagaagcagctgtgtatttaaggaaacaagcgttcctggaattaatttataaatt

SEQ ID NO: 123743 - DNA, 2176 bp, Homo sapiens
  Payload ID: 4285
  Gene Symbol: CDK20
  Gene Name: cyclin-dependent kinase 20
  Uniprot ID: Q8IZL9
  ENST ID: ENST00000336654
  CDS Start-End: 144-1160
gtcgcctacaggaaccgccccagtggtcagctgccgcgctgttgctaggcaacagcgtgcgagctcagatcagcgtggggtggaggagaagtggagtttggaagttcaggggcacaggggcacaggcccacgactgcagcgggatggaccagtactgcatcctgggccgcatcggggagggcgcccacggcatcgtcttcaaggccaagcacgtggagccgagggtgggctggcagtgtctgccttctatcctgcagactggcgagatagttgccctcaagaaggtggccctaaggcggttggaggacggcttccctaaccaggccctgcgggagattaaggctctgcaggagatggaggacaatcagtatgtggtacaactgaaggctgtgttcccacacggtggaggctttgtgctggcctttgagttcatgctgtcggatctggccgaggtggtgcgccatgcccagaggccactagcccaggcacaggtcaagagctacctgcagatgctgctcaagggtgtcgccttctgccatgccaacaacattgtacatcgggacctgaaacctgccaacctgctcatcagcgcctcaggccagctcaagatagcggactttggcctggctcgagtcttttccccagacggcagccgcctctacacacaccaggtggccaccaggtctgtgggctgcatcatgggggagctgttgaatgggtccccccttttcccgggcaagaacgatattgaacagctttgctatgtgcttcgcatcttgggcaccccaaaccctcaagtctggccggagctcactgagctgccggactacaacaagatctcctttaaggagcaggtgcccatgcccctggaggaggtgctgcctgacgtctctccccaggcattggatctgctgggtcaattccttctctaccctcctcaccagcgcatcgcagcttccaaggctctcctccatcagtacttcttcacagctcccctgcctgcccatccatctgagctgccgattcctcagcgtctagggggacctgcccccaaggcccatccagggcccccccacatccatgacttccacgtggaccggcctcttgaggagtcgctgttgaacccagagctgattcggcccttcatcctggaggggtgagaagttggccctggtcccgtctgcctgctcctcaggaccactcagtccacctgttcctctgccacctgcctggcttcaccctccaaggcctccccatggccacagtgggcccacaccacaccctgccccttagcccttgcgagggttggtctcgaggcagaggtcatgttcccagccaagagtatgagaacatccagtcgagcagaggagattcatggcctgtgctcggtgagccttaccttctgtgtgctactgacgtacccatcaggacagtgagctctgctgccagtcaaggcctgcatatgcagaatgacgatgcctgccttggtgctgcttccccgagtgctgcctcctggtcaaggagaagtgcagagagtaaggtgtccttatgttggaaactcaagtggaaggaagatttggtttggttttattctcagagccattaaacactagttcagtatgtgagatatagattctaaaaacctcaggtggctctgccttatgtctgttcctccttcatttctctcaagggaaatggctaaggtggcattgtctcatggctctcgtttttggggtcatggggagggtagcaccaggcatagccacttttgccctgagggactcctgtgtacttcacatcactgagcactcatttagaagtgagggagacagaagtctaggcccagggatggctccagttggggatccagcaggagaccctctgcacatgaggctggtttaccaacatctactccctcaggatgagcgtgagccagaagcagctgtgtatttaaggaaacaagcgttcctggaattaatttataaatttaataaatcccaatataatcccagctagtgctttttccttattataatttgataaggtgattataaaagatacatggaaggaagtggaaccagatgcagaagaggaaatgatggaaggacttacggtatcagataccaatatttaaaagtttgtataataataaagagtatgattgtggttcaaggat

SEQ ID NO: 123744 - DNA, 1907 bp, Homo sapiens
  Payload ID: 4285
  Gene Symbol: CDK20
  Gene Name: cyclin-dependent kinase 20
  Uniprot ID: Q8IZL9
  ENST ID: ENST00000375871
  CDS Start-End: 42-773
agttcaggggcacaggggcacaggcccacgactgcagcgggatggaccagtactgcatcctgggccgcatcggggagggcgcccacggcatcgtcttcaaggccaagcacgtggagactggcgagatagttgccctcaagaaggtggccctaaggcggttggaggacggcttccctaaccaggccctgcgggagattaaggctctgcaggagatggaggacaatcagtatgtggtacaactgaaggctgtgttcccacacggtggaggctttgtgctggcctttgagttcatgctgtcggatctggccgaggtggtgcgccatgcccagaggccactagcccaggcacaggtcaagagctacctgcagatgctgctcaagggtgtcgccttctgccatgccaacaacattgtacatcgggacctgaaacctgccaacctgctcatcagcgcctcaggccagctcaagatagcggactttggcctggctcgagtcttttccccagacggcagccgcctctacacacaccaggtggccaccaggagctcactgagctgccggactacaacaagatctcctttaaggagcaggtgcccatgcccctggaggaggtgctgcctgacgtctctccccaggcattggatctgctgggtcaattccttctctaccctcctcaccagcgcatcgcagcttccaaggctctcctccatcagtacttcttcacagctcccctgcctgcccatccatctgagctgccgattcctcagcgtctagggggacctgcccccaaggcccatccagggcccccccacatccatgacttccacgtggaccggcctcttgaggagtcgctgttgaacccagagctgattcggcccttcatcctggaggggtgagaagttggccctggtcccgtctgcctgctcctcaggaccactcagtccacctgttcctctgccacctgcctggcttcaccctccaaggcctccccatggccacagtgggcccacaccacaccctgccccttagcccttgcgagggttggtctcgaggcagaggtcatgttcccagccaagagtatgagaacatccagtcgagcagaggagattcatggcctgtgctcggtgagccttaccttctgtgtgctactgacgtacccatcaggacagtgagctctgctgccagtcaaggcctgcatatgcagaatgacgatgcctgccttggtgctgcttccccgagtgctgcctcctggtcaaggagaagtgcagagagtaaggtgtccttatgttggaaactcaagtggaaggaagatttggtttggttttattctcagagccattaaacactagttcagtatgtgagatatagattctaaaaacctcaggtggctctgccttatgtctgttcctccttcatttctctcaagggaaatggctaaggtggcattgtctcatggctctcgtttttggggtcatggggagggtagcaccaggcatagccacttttgccctgagggactcctgtgtacttcacatcactgagcactcatttagaagtgagggagacagaagtctaggcccagggatggctccagttggggatccagcaggagaccctctgcacatgaggctggtttaccaacatctactccctcaggatgagcgtgagccagaagcagctgtgtatttaaggaaacaagcgttcctggaattaatttataaatttaataaatcccaatataatcccagctagtgctttttccttattataatttgataaggtgattataaaagatacatggaaggaagtggaaccagatgcagaagaggaaatgatggaaggacttacggtatcagataccaatatttaaaagtttgtataataataaagagtatgattgtggttcaa

SEQ ID NO: 123745 - DNA, 2301 bp, Homo sapiens
  Payload ID: 4285
  Gene Symbol: CDK20
  Gene Name: cyclin-dependent kinase 20
  Uniprot ID: Q8IZL9
  ENST ID: ENST00000375883
  CDS Start-End: 308-1285
gctgtcatcgttccgtgggccctgctgcgggcacgctctcggcgcatgcgttttttatgcgggattaagcttgctgctgcgtgacagcggagggctaggaaaaggcgcagtggggcccggagctgtcacccctgactcgacgcagcttccgttctcctggtgacgtcgcctacaggaaccgccccagtggtcagctgccgcgctgttgctaggcaacagcgtgcgagctcagatcagcgtggggtggaggagaagtggagtttggaagttcaggggcacaggggcacaggcccacgactgcagcgggatggaccagtactgcatcctgggccgcatcggggagggcgcccacggcatcgtcttcaaggccaagcacgtggagactggcgagatagttgccctcaagaaggtggccctaaggcggttggaggacggcttccctaaccaggccctgcgggagattaaggctctgcaggagatggaggacaatcagtatgtggtacaactgaaggctgtgttcccacacggtggaggctttgtgctggcctttgagttcatgctgtcggatctggccgaggtggtgcgccatgcccagaggccactagcccaggcacaggtcaagagctacctgcagatgctgctcaagggtgtcgccttctgccatgccaacaacattgtacatcgggacctgaaacctgccaacctgctcatcagcgcctcaggccagctcaagatagcggactttggcctggctcgagtcttttccccagacggcagccgcctctacacacaccaggtggccaccaggtctgtgggctgcatcatgggggagctgttgaatgggtccccccttttcccgggcaagaacgatattgaacagctttgctatgtgcttcgcatcttgggcaccccaaaccctcaagtctggccggagctcactgagctgccggactacaacaagatctcctttaaggagcaggtgcccatgcccctggaggaggtgctgcctgacgtctctccccaggcattggatctgctgggtcaattccttctctaccctcctcaccagcgcatcgcagcttccaaggctctcctccatcagtacttcttcacagctcccctgcctgcccatccatctgagctgccgattcctcagcgtctagggggacctgcccccaaggcccatccagggcccccccacatccatgacttccacgtggaccggcctcttgaggagtcgctgttgaacccagagctgattcggcccttcatcctggaggggtgagaagttggccctggtcccgtctgcctgctcctcaggaccactcagtccacctgttcctctgccacctgcctggcttcaccctccaaggcctccccatggccacagtgggcccacaccacaccctgccccttagcccttgcgagggttggtctcgaggcagaggtcatgttcccagccaagagtatgagaacatccagtcgagcagaggagattcatggcctgtgctcggtgagccttaccttctgtgtgctactgacgtacccatcaggacagtgagctctgctgccagtcaaggcctgcatatgcagaatgacgatgcctgccttggtgctgcttccccgagtgctgcctcctggtcaaggagaagtgcagagagtaaggtgtccttatgttggaaactcaagtggaaggaagatttggtttggttttattctcagagccattaaacactagttcagtatgtgagatatagattctaaaaacctcaggtggctctgccttatgtctgttcctccttcatttctctcaagggaaatggctaaggtggcattgtctcatggctctcgtttttggggtcatggggagggtagcaccaggcatagccacttttgccctgagggactcctgtgtacttcacatcactgagcactcatttagaagtgagggagacagaagtctaggcccagggatggctccagttggggatccagcaggagaccctctgcacatgaggctggtttaccaacatctactccctcaggatgagcgtgagccagaagcagctgtgtatttaaggaaacaagcgttcctggaattaatttataaatttaataaatcccaatataatcccagctagtgctttttccttattataatttgataaggtgattataaaagatacatggaaggaagtggaaccagatgcagaagaggaaatgatggaaggacttacggtatcagataccaatatttaaaagtttgtataataataaagagtatgattgtggttcaaggat

SEQ ID NO: 123746 - DNA, 1860 bp, Homo sapiens
  Payload ID: 4285
  Gene Symbol: CDK20
  Gene Name: cyclin-dependent kinase 20
  Uniprot ID: Q8IZL9
  ENST ID: ENST00000605159
  CDS Start-End: 60-887
ggagaagtggagtttggaagttcaggggcacaggggcacaggcccacgactgcagcgggatggaccagtactgcatcctgggccgcatcggggagggcgcccacggcatcgtcttcaaggccaagcacgtggagactggcgagatagttgccctcaagaaggtggccctaaggcggttggaggacggcttccctaaccaggccctgcgggagattaaggctctgcaggagatggaggacaatcagtatgtggtacaactgaaggctgtgttcccacacggtggaggctttgtgctggcctttgagttcatgctgtcggatctggccgaggtggtgcgccatgcccagaggccactagcccaggcacaggtcaagagctacctgcagatgctgctcaagggtgtcgccttctgccatgccaacaacattgtacatcgggacctgaaacctgccaacctgctcatcagcgcctcaggccagctcaagatagcggactttggcctggctcgagtcttttccccagacggcagccgcctctacacacaccaggtggccaccaggtctgtgggctgcatcatgggggagctgttgaatgggtccccccttttcccgggcaagaacgatattgaacagctttgctatgtgcttcgcatcttgggcaccccaaaccctcaagtctggccggagctcactgagctgccggactacaacaagatctcctttaaggagcaggtgcccatgcccctggaggaggtgctgcctgacgtctctccccaggcattggatctgctgggtcaattccttctctaccctcctcaccagcgcatcgcagcttccaagctcccctgcctgcccatccatctgagctgccgattcctcagcgtctagggggacctgcccccaaggcccatccagggcccccccacatccatgacttccacgtggaccggcctcttgaggagtcgctgttgaacccagagctgattcggcccttcatcctggaggggtgagaagttggccctggtcccgtctgcctgctcctcaggaccactcagtccacctgttcctctgccacctgcctggcttcaccctccaaggcctccccatggccacagtgggcccacaccacaccctgccccttagcccttgcgagggttggtctcgaggcagaggtcatgttcccagccaagagtatgagaacatccagtcgagcagaggagattcatggcctgtgctcggtgagccttaccttctgtgtgctactgacgtacccatcaggacagtgagctctgctgccagtcaaggcctgcatatgcagaatgacgatgcctgccttggtgctgcttccccgagtgctgcctcctggtcaaggagaagtgcagagagtaaggtgtccttatgttggaaactcaagtggaaggaagatttggtttggttttattctcagagccattaaacactagttcagtatgtgagatatagattctaaaaacctcaggtggctctgccttatgtctgttcctccttcatttctctcaagggaaatggctaaggtggcattgtctcatggctctcgtttttggggtcatggggagggtagcaccaggcatagccacttttgccctgagggactcctgtgtacttcacatcactgagcactcatttagaagtgagggagacagaagtctaggcccagggatggctccagttggggatccagcaggagaccctctgcacatgaggctggtttaccaacatctactccctcaggatgagcgtgagccagaagcagctgtgtatttaaggaaacaagcgttcctggaattaatttataaatttaataaatcccaatataatccca

SEQ ID NO: 123747 - DNA, 1582 bp, Homo sapiens
  Payload ID: 4286
  Gene Symbol: CDK3
  Gene Name: cyclin-dependent kinase 3
  Uniprot ID: Q00526
  ENST ID: ENST00000425876
  CDS Start-End: 89-1006
ccacatggaagctggaggagcaacgggagcgctgggcgtggggtgcaaattgcccggtgccttctgtttcccaggcagctctgtggccatggatatgttccagaaggtagagaagatcggagagggcacctatggggtggtgtacaaggccaagaacagggagacagggcagctggtggccctgaagaagatcagactggatttggagatggagggggtcccaagcactgccatcagggagatctcgctgctcaaggaactgaagcaccccaacatcgtccgactgctggacgtggtgcacaacgagaggaagctctatctggtgtttgagttcctcagccaggacctgaagaagtacatggactccaccccaggctcagagctccccctgcacctcatcaagagctacctcttccagctgctgcagggggtgagtttctgccactcacatcgggtcatccaccgagacctgaagccccagaacctgctcatcaatgagttgggtgccatcaagctggctgacttcggcctggctcgcgccttcggggtgcccctgcgcacctacacccatgaggtggtgacactgtggtatcgcgcccccgagattctcttgggcagcaagttctataccacagctgtggatatctggagcattggttgcatctttgcagagatggtgactcgaaaagccctgtttcctggtgactctgagattgaccagctctttcgtatctttcgtatgctggggacacccagcgaagacacatggcccggggtcacccagctgcctgactataagggcagcttccctaagtggaccaggaagggactggaagagattgtgcccaatctggagccagagggcagggacctgctcatgcaactcctgcagtatgaccccagccagcggatcacagccaagactgccctggcccacccgtacttctcatcccctgagccctccccagctgcccgccagtatgtgctgcagcgattccgccattgagaatgtcaaggccacactcagatcctttctcgagcagctgctgccccagctgcctcctacccattgccaagagaggatgcatctggggagagcaaagcactaaggaattcagcatcagcctgcagagggctgagtctgggttagtcctgcccgcaggttagcgagatcctgtgttgttttttgggttggacggtgccgtttcaaaatagaggcacagatgctccatgcacgaggggtccccgggcactggaacaagtgccaagttgaaggcagggggcctgccagagctgggtgtgggtattcaggccctcacctgccctgcctgcagggccagaccctgaggaaagggcgccccctgctggtctttttggatttaaaatgtttgggggaagagttgagttccagttcagtcccaagttaaacaggagggagtgagggagaggagagagggcgttccccggatcccaggagagctgggctatgactgcaataaggagttgttccttcacctgagatgtgcttcttttggttcatttctggcttgacaacaataaataaacgtggtatgttcctgag

SEQ ID NO: 123748 - DNA, 803 bp, Homo sapiens
  Payload ID: 4286
  Gene Symbol: CDK3
  Gene Name: cyclin-dependent kinase 3
  ENST ID: ENST00000586261
  CDS Start-End: 164-803
ctgactgtggagtttggtggatgacgtgccaaggagcacaggtctccattgccggggccctggtcattctgtggggttaaggagaagccgatccccctggctggaagtgcccttcttggcccaagtctctgcccacggctgtgcccttgtttcttgcagggagatggagggggtcccaagcactgccatcagggagatctcgctgctcaaggaactgaagcaccccaacatcgtccgactgctggacgtggtgcacaacgagaggaagctctatctggtgtttgagttcctcagccaggacctgaagaagtacatggactccaccccaggctcagagctccccctgcacctcatcaagagctacctcttccagctgctgcagggggtgagtttctgccactcacatcgggtcatccaccgagacctgaagccccagaacctgctcatcaatgagttgggtgccatcaagctggctgacttcggcctggctcgcgccttcggggtgcccctgcgcacctacacccatgaggtggtgacactgtggtatcgcgcccccgagattctcttgggcagcaagttctataccacagctgtggatatctggagcattggttgcatctttgcagagatggtgactcgaaaagccctgtttcctggtgactctgagattgaccagctctttcgtatctttcgtatgctggggacacccagcgaagacacatggcccggggtcacccagctgcctgactataagggcagcttccctaagtggaccaggaagggactggaagagattgtgccca

SEQ ID NO: 123749 - DNA, 570 bp, Homo sapiens
  Payload ID: 4286
  Gene Symbol: CDK3
  Gene Name: cyclin-dependent kinase 3
  ENST ID: ENST00000588812
  CDS Start-End: 77-570
gcccttcctggccgccatgtgtacccagagcctgggactggctgggctgggcagtgacccaggcagctctgtggccatggatatgttccagaaggtagagaagatcggagagggcacctatggggtggtgtacaaggccaagaacagggagacagggcagctggtggccctgaagaagatcagactggatttggagatggagggggtcccaagcactgccatcagggagatctcgctgctcaaggaactgaagcaccccaacatcgtccgactgctggacgtggtgcacaacgagaggaagctctatctggtgtttgagttcctcagccaggacctgaagaagtacatggactccaccccaggctcagagctccccctgcacctcatcaagagctacctcttccagctgctgcagggggtgagtttctgccactcacatcgggtcatccaccgagacctgaagccccagaacctgctcatcaatgagttgggtgccatcaagctggctgacttcggcctggctcgcgccttcggggtgcccctgcgcacctacacccatgaggtggtgac

SEQ ID NO: 123750 - DNA, 2076 bp, Homo sapiens
  Payload ID: 4287
  Gene Symbol: CDK4
  Gene Name: cyclin-dependent kinase 4
  Uniprot ID: P11802
  ENST ID: ENST00000257904
  CDS Start-End: 367-1278
gtgatagcaacagatcacgtggctgccatcgcccctccgcccccttacactcttcgccctcctcccagtcgaagcacctcctgtccgcccctcagcgcatgggtggcggtcacgtgcccagaacgtccggcgttcgccccgccctcccagtttccgcgcgcctctttggcagctggtcacatggtgagggtgggggtgagggggcctctctagcttgcggcctgtgtctatggtcgggccctctgcgtccagctgctccggaccgagctcgggtgtatggggccgtaggaaccggctccggggccccgataacgggccgcccccacagcaccccgggctggcgtgagggtctcccttgatctgagaatggctacctctcgatatgagccagtggctgaaattggtgtcggtgcctatgggacagtgtacaaggcccgtgatccccacagtggccactttgtggccctcaagagtgtgagagtccccaatggaggaggaggtggaggaggccttcccatcagcacagttcgtgaggtggctttactgaggcgactggaggcttttgagcatcccaatgttgtccggctgatggacgtctgtgccacatcccgaactgaccgggagatcaaggtaaccctggtgtttgagcatgtagaccaggacctaaggacatatctggacaaggcacccccaccaggcttgccagccgaaacgatcaaggatctgatgcgccagtttctaagaggcctagatttccttcatgccaattgcatcgttcaccgagatctgaagccagagaacattctggtgacaagtggtggaacagtcaagctggctgactttggcctggccagaatctacagctaccagatggcacttacacccgtggttgttacactctggtaccgagctcccgaagttcttctgcagtccacatatgcaacacctgtggacatgtggagtgttggctgtatctttgcagagatgtttcgtcgaaagcctctcttctgtggaaactctgaagccgaccagttgggcaaaatctttgacctgattgggctgcctccagaggatgactggcctcgagatgtatccctgccccgtggagcctttccccccagagggccccgcccagtgcagtcggtggtacctgagatggaggagtcgggagcacagctgctgctggaaatgctgacttttaacccacacaagcgaatctctgcctttcgagctctgcagcactcttatctacataaggatgaaggtaatccggagtgagcaatggagtggctgccatggaaggaagaaaagctgccatttcccttctggacactgagagggcaatctttgcctttatctctgaggctatggagggtcctcctccatctttctacagagattactttgctgccttaatgacattcccctcccacctctccttttgaggcttctccttctccttcccatttctctacactaaggggtatgttccctcttgtccctttccctacctttatatttggggtccttttttatacaggaaaaacaaaacaaagaaataatggtcttttttttttttttaatgtttcttcctctgtttggctttgccattgtgcgatttggaaaaaccacttggaagaagggactttcctgcaaaaccttaaagactggttaaattacagggcctaggaagtcagtggagccccttgactgacaaagcttagaaaggaactgaaattgcttctttgaatatggattttaggcggggcgtggtggctcacgcctataatcccagcacgttgggaggccaacgcgggtggatcacctgaggtcaggagttcgagaccagcctgactaacatggtgaaaccctgtctctactaaaaatacaaaattagtcaggcgtggtggtgcacacctgtaatcccagctacttgggagactgaggcaggaggatcgcttgaacccgggaggcagaggttgcggtgagccgagatcatgccattgcactccagcctgggcaacagagcaagactctgtgtcaaaaaaaaaaaaagaatatagatttttaaatggc

SEQ ID NO: 123751 - DNA, 1650 bp, Homo sapiens
  Payload ID: 4287
  Gene Symbol: CDK4
  Gene Name: cyclin-dependent kinase 4
  ENST ID: ENST00000312990
  CDS Start-End: 293-628
cacctcctgtccgcccctcagcgcatgggtggcggtcacgtgcccagaacgtccggcgttcgccccgccctcccagtttccgcgcgcctctttggcagctggtcacatggtgagggtgggggtgagggggcctctctagcttgcggcctgtgtctatggtcgggccctctgcgtccagctgctccggaccgagctcgggtgtatggggccgtaggaaccggctccggggccccgataacgggccgcccccacagcaccccgggctggcgtgagggtctcccttgatctgagaatggctacctctcgatatgagccagtggctgaaattggtgtcggtgcctatgggacagtgtacaaggcccgtgatccccacagtggccactttgtggccctcaagagtgtgagagtccccaatggaggaggaggtggaggaggccttcccatcagcacagttcgtgaggtggctttactgaggcgactggaggcttttgagcatcccaatgttgtccggctgatggacgtctgtgccacatcccgaactgaccgggagatcaagagatgtttcgtcgaaagcctctcttctgtggaaactctgaagccgaccagttgggcaaaatctttgacctgattgggctgcctccagaggatgactggcctcgagatgtatccctgccccgtggagcctttccccccagagggccccgcccagtgcagtcggtggtacctgagatggaggagtcgggagcacagctgctgctggaaatgctgacttttaacccacacaagcgaatctctgcctttcgagctctgcagcactcttatctacataaggatgaaggtaatccggagtgagcaatggagtggctgccatggaaggaagaaaagctgccatttcccttctggacactgagagggcaatctttgcctttatctctgaggctatggagggtcctcctccatctttctacagagattactttgctgccttaatgacattcccctcccacctctccttttgaggcttctccttctccttcccatttctctacactaaggggtatgttccctcttgtccctttccctacctttatatttggggtccttttttatacaggaaaaacaaaacaaagaaataatggtcttttttttttttttaatgtttcttcctctgtttggctttgccattgtgcgatttggaaaaaccacttggaagaagggactttcctgcaaaaccttaaagactggttaaattacagggcctaggaagtcagtggagccccttgactgacaaagcttagaaaggaactgaaattgcttctttgaatatggattttaggcggggcgtggtggctcacgcctataatcccagcacgttgggaggccaacgcgggtggatcacctgaggtcaggagttcgagaccagcctgactaacatggtgaaaccctgtctctactaaaaatacaaaattagtcaggcgtggtggtgcacacctgtaatcccagctacttgggagactgaggcaggaggatcgcttgaacccgggaggcagaggttgcggtgagccgagatcatgccattgcactccagcctgggcaacagagcaagactctgtgtcaaaaaaaaaaaaagaatatagatttttaaatggc

SEQ ID NO: 123752 - DNA, 447 bp, Homo sapiens
  Payload ID: 4287
  Gene Symbol: CDK4
  Gene Name: cyclin-dependent kinase 4
  ENST ID: ENST00000552862
  CDS Start-End: 102-447
accccattcccactccgtgtcctggggcccgcccagcctccttaggcgccgcgcctgctcgcggtctccgctgacaccccagggtctcccttgatctgagaatggctacctctcgatatgagccagtggctgaaattggtgtcggtgcctatgggacagtgtacaaggcccgtgatccccacagtggccactttgtggccctcaagagtgtgagagtccccaatggaggaggaggtggaggaggccttcccatcagcacagttcgtgaggtggctttactgaggcgactggaggcttttgagcatcccaatgttgtccggctgatggacgtctgtgccacatcccgaactgaccgggagatcaaggtaaccctggtgtttgagcatgtagaccaggacctaaggacatatctggacaaggcacccccaccaggcttgccagccgaaa

SEQ ID NO: 123753 - DNA, 558 bp, Homo sapiens
  Payload ID: 4287
  Gene Symbol: CDK4
  Gene Name: cyclin-dependent kinase 4
  ENST ID: ENST00000549606
  CDS Start-End: 337-459
gcagctggtcacatggtgagggtgggggtgagggggcctctctagcttgcggcctgtgtctatggtcgggccctctgcgtccagctgctccggaccgagctcgggtgtatggggccgtaggaaccggctccggggccccgataacgggccgcccccacagcaccccgggctggcgtgaggcctctcttctgtggaaactctgaagccgaccagttgggcaaaatctttgacctgattgggctgcctccagaggatgactggcctcgagatgtatccctgccccgtggagcctttccccccagagggccccgcccagtgcagtcggtggtacctgagatggaggagtcgggagcacagctgctgctggaaatgctgacttttaacccacacaagcgaatctctgcctttcgagctctgcagcactcttatctacataaggatgaaggtaatccggagtgagcaatggagtggctgccatggaaggaagaaaagctgccatttcccttctggacactgagagggcaatctttgcctttatctctgaggctatggagggtc

SEQ ID NO: 123754 - DNA, 825 bp, Homo sapiens
  Payload ID: 4287
  Gene Symbol: CDK4
  Gene Name: cyclin-dependent kinase 4
  ENST ID: ENST00000547281
  CDS Start-End: 267-825
cgtccagctgctccggaccgagctcgggtgtatggggccgtaggaaccggctccggggccccgataacgggccgcccccacagcaccccgggctggcgtgagtgtacaaggcccgtgatccccacagtggccactttgtggccctcaagagtgtgagagtccccaatggaggaggaggtggaggaggccttcccatcagcacagttcgtgaggtggctttactgaggcgactggaggcttttgagcatcccaatgttgtccggctgatggacgtctgtgccacatcccgaactgaccgggagatcaaggtaaccctggtgtttgagcatgtagaccaggacctaaggacatatctggacaaggcacccccaccaggcttgccagccgaaacgatcaaggatctgatgcgccagtttctaagaggcctagatttccttcatgccaattgcatcgttcaccgagatctgaagccagagaacattctggtgacaagtggtggaacagtcaagctggctgactttggcctggccagaatctacagctaccagatggcacttacacccgtggttgttacactctggtaccgagctcccgaagttcttctgcagtccacatatgcaacacctgtggacatgtggagtgttggctgtatctttgcagagatgtttcgtcgaaagcctctcttctgtggaaactctgaagccgaccagttgggcaaaatctttgacctgattgggctgcctccagaggatgactggcctcgagatgtatccctgccccgtggagcctttccccccagagggccccgcccagtgcagtcggtgg

SEQ ID NO: 123755 - DNA, 776 bp, Homo sapiens
  Payload ID: 4287
  Gene Symbol: CDK4
  Gene Name: cyclin-dependent kinase 4
  ENST ID: ENST00000546489
  CDS Start-End: 153-776
gggggcctctctagcttgcggcctgtgtctatggtcgggccctctgcgtccagctgctccggaccgagctcgggtgtatggggccgtaggaaccggctccggggccccgataacgggccgcccccacagcaccccgggctggcgtgaggctgatggacgtctgtgccacatcccgaactgaccgggagatcaaggtaaccctggtgtttgagcatgtagaccaggacctaaggacatatctggacaaggcacccccaccaggcttgccagccgaaacgatcaaggatctgatgcgccagtttctaagaggcctagatttccttcatgccaattgcatcgttcaccgagatctgaagccagagaacattctggtgacaagtggtggaacagtcaagctggctgactttggcctggccagaatctacagctaccagatggcacttacacccgtggttgttacactctggtaccgagctcccgaagttcttctgcagtccacatatgcaacacctgtggacatgtggagtgttggctgtatctttgcagagatgtttcgtcgaaagcctctcttctgtggaaactctgaagccgaccagttgggcaaaatctttgacctgattgggctgcctccagaggatgactggcctcgagatgtatccctgccccgtggagcctttccccccagagggccccgcccagtgcagtcggtggtacctgagatggaggagtcgggagcacagctgctgctggaaatgctgacttttaacccacacaag

SEQ ID NO: 123756 - DNA, 919 bp, Homo sapiens
  Payload ID: 4287
  Gene Symbol: CDK4
  Gene Name: cyclin-dependent kinase 4
  ENST ID: ENST00000550419
  CDS Start-End: 141-746
tctatggtcgggccctctgcgtccagctgctccggaccgagctcgggtgtatggggccgtaggaaccggctccggggccccgataacgggccgcccccacagcaccccgggctggcgtgagggtctcccttgatctgagaatggctacctctcgatatgagccagtggctgaaattggtgtcggtgcctatgggacagtgtacaaggcccgtgatccccacagtggccactttgtggccctcaagagtgtgagagtccccaatggaggaggaggtggaggaggccttcccatcagcacagttcgtgaggtggctttactgaggcgactggaggcttttgagcatcccaatgttgtccggctgatggacgtctgtgccacatcccgaactgaccgggagatcaaggtaaccctggtgtttgagcatgtagaccaggacctaaggacatatctggacaaggcacccccaccaggcttgccagccgaaacgatcaaggatctgatgcgccagtttctaagaggcctagatttccttcatgccaattgcatcgttcaccgagatctgaagccagagaacattctggtgacaagtggtggaacagtcaagctggctgactttggcctggccagaatctacagctaccagatggcacttacacccgtgaccagggcttgctgtgttgcccaggctggattgcaatggcatgatcacagctcactgcagcttcaacctcctgggctcaagtgatcctcccatctcagcttcccaactagctgacactacaggcctctcttctgtggaaactctgaagccgaccagttgggcaaaatctttgacctgattgggctgcctccagaggatgactggcctcgagatgtatccctgccccgtggagcctttccccccagagggccccgccc

SEQ ID NO: 123757 - DNA, 952 bp, Homo sapiens
  Payload ID: 4287
  Gene Symbol: CDK4
  Gene Name: cyclin-dependent kinase 4
  ENST ID: ENST00000553237
  CDS Start-End: 172-396
gtgagggggcctctctagcttgcggcctgtgtctatggtcgggccctctgcgtccagctgctccggaccgagctcgggtgtatggggccgtaggaaccggctccggggccccgataacgggccgcccccacagcaccccgggctggcgtgagggtctcccttgatctgagaatggctacctctcgatatgagccagtggctgaaattggtgtcggtgcctatgggacagtgtacaaggcccgtgatccccacagtggccactttgtggccctcaagagtgtgagagtccccaatggaggaggaggtggaggaggccttcccatcagcacagttcgtgaggtggctttactgaggcgactggaggcttttgagcatcccaatgttgtccggatctgatgcgccagtttctaagaggcctagatttccttcatgccaattgcatcgttcaccgagatctgaagccagagaacattctggtgacaagtggtggaacagtcaagctggctgactttggcctggccagaatctacagctaccagatggcacttacacccgtggttgttacactctggtaccgagctcccgaagttcttctgcagtccacatatgcaacacctgtggacatgtggagtgttggctgtatctttgcagagatgtttcgtcgaaagcctctcttctgtggaaactctgaagccgaccagttgggcaaaatctttgacctgattgggctgcctccagaggatgactggcctcgagatgtatccctgccccgtggagcctttccccccagagggccccgcccagtgcagtcggtggtacctgagatggaggagtcgggagcacagctgctgctggaaatgctgacttttaacccacacaagcgaatctctgcctttcgagctctgcagcactcttatctacataaggatgaaggtaatccggagtgagcaat

SEQ ID NO: 123758 - DNA, 694 bp, Homo sapiens
  Payload ID: 4287
  Gene Symbol: CDK4
  Gene Name: cyclin-dependent kinase 4
  ENST ID: ENST00000552388
  CDS Start-End: 184-694
gggggcctctctagcttgcggcctgtgtctatggtcgggccctctgcgtccagctgctccggaccgagctcgggtgtatggggccgtaggaaccggctccggggccccgataacgggccgcccccacagcaccccgggctggcgtgaggagtctgtgattgtagggtctcccttgatctgagaatggctacctctcgatatgagccagtggctgaaattggtgtcggtgcctatgggacagtgtacaaggcccgtgatccccacagtggccactttgtggccctcaagagtgtgagagtccccaatggaggaggaggtggaggaggccttcccatcagcacagttcgtgaggtggctttactgaggcgactggaggcttttgagcatcccaatgttgtccggctgatggacgtctgtgccacatcccgaactgaccgggagatcaaggtaaccctggtgtttgagcatgtagaccaggacctaaggacatatctggacaaggcacccccaccaggcttgccagccgaaacgatcaaggatctgatgcgccagtttctaagaggcctagatttccttcatgccaattgcatcgttcaccgagatctgaagccagagaacattctggtgacaagtggtggaacagtcaagctggctgactttggcctggccagaatctacagctaccagatggcac

SEQ ID NO: 123759 - DNA, 769 bp, Homo sapiens
  Payload ID: 4287
  Gene Symbol: CDK4
  Gene Name: cyclin-dependent kinase 4
  ENST ID: ENST00000552254
  CDS Start-End: 161-769
gccccaaggaagactgggagcgggggatgggatgctggtggtgttctttgcgctttttttttgggagtccctttgttgctgcaggctcataccatcctaactctgtaagcgacttttggtgataggagtctgtgattgtagggtctcccttgatctgagaatggctacctctcgatatgagccagtggctgaaattggtgtcggtgcctatgggacagtgtacaaggcccgtgatccccacagtggccactttgtggccctcaagagtgtgagagtccccaatggaggaggaggtggaggaggccttcccatcagcacagttcgtgaggtggctttactgaggcgactggaggcttttgagcatcccaatgttgtccggctgatggacgtctgtgccacatcccgaactgaccgggagatcaaggtaaccctggtgtttgagcatgtagaccaggacctaaggacatatctggacaaggcacccccaccaggcttgccagccgaaacgatcaaggatctgatgcgccagtttctaagaggcctagatttccttcatgccaattgcatcgttcaccgagatctgaagccagagaacattctggtgacaagtggtggaacagtcaagctggctgactttggcctggccagaatctacagctaccagatggcacttacacccgtggttgttacactctggtaccgagctcccgaagttcttctgcagtccacatatgcaacacctgtggacatgtggagtgttggctgtatc

SEQ ID NO: 123760 - DNA, 773 bp, Homo sapiens
  Payload ID: 4287
  Gene Symbol: CDK4
  Gene Name: cyclin-dependent kinase 4
  ENST ID: ENST00000551800
  CDS Start-End: 377-773
ctggtcacatggtgagggtgggggtgagggggcctctctagcttgcggcctgtgtctatggtcgggccctctgcgtccagctgctccggaccgagctcgggtgtatggggccgtaggaaccggctccggggccccgataacgggccgcccccacagcaccccgggctggcgtgagccagtggctgaaattggtgtcggtgcctatgggacagtgtacaaggcccgtgatccccacagtggccactttgtggccctcaagagtgtgagagtccccaatggaggaggaggtggaggaggccttcccatcagcacagttcgtgaggtggctttactgaggcgactggaggcttttgagcatcccaatgttgtccggctgatggacgtctgtgccacatcccgaactgaccgggagatcaaggtaaccctggtgtttgagcatgtagaccaggacctaaggacatatctggacaaggcacccccaccaggcttgccagccgaaacgatcaaggatctgatgcgccagtttctaagaggcctagatttccttcatgccaattgcatcgttcaccgagatctgaagccagagaacattctggtgacaagtggtggaacagtcaagctggctgactttggcctggccagaatctacagctaccagatggcacttacacccgtggttgttacactctggtaccgagctcccgaagttcttctgcagtccacatatgcaacacctgtggacatgtggagtgttggctgtatctttgcagaga

SEQ ID NO: 123761 - DNA, 228 bp, Homo sapiens
  Payload ID: 4287
  Gene Symbol: CDK4
  Gene Name: cyclin-dependent kinase 4
  ENST ID: ENST00000547853
  CDS Start-End: 223-228
cgcgttcgtttcgcgagctggttatggaagggtcgctcaagggcgggaagtggggcctttgtggtcatgggaaagtataattttagggactgaggtgtaggatcttcgatgcaaggcatgtgtcatgtgtgatctttgtgcggggcgcgattgtcccaaaggaaaaagcgttttctattgcagggcctcacgtggctggagggggtctcccttgatctgagaatggct

SEQ ID NO: 123762 - DNA, 783 bp, Homo sapiens
  Payload ID: 4288
  Gene Symbol: CDK5
  Gene Name: cyclin-dependent kinase 5
  Uniprot ID: Q00535
  ENST ID: ENST00000297518
  CDS Start-End: 1-783
atgcagaaatacgagaaactggaaaagattggggaaggcacctacggaactgtgttcaaggccaaaaaccgggagactcatgagatcgtggctctgaaacgggtgaggctggatgacgatgatgagggtgtgccgagttccgccctccgggagatctgcctactcaaggagctgaagcacaagaacatcgtcaggcttcatgacgtcctgcacagcgacaagaagctgactttggtttttgaattctgtgaccaggacctgaagaagtattttgacagttgcaatggtgacctcgatcctgagattgtaaagaatggggagctgaaattggctgattttggcctggctcgagcctttgggattcccgtccgctgttactcagctgaggtggtcacactgtggtaccgcccaccggatgtcctctttggggccaagctgtactccacgtccatcgacatgtggtcagccggctgcatctttgcagagctggccaatgctgggcggcctctttttcccggcaatgatgtcgatgaccagttgaagaggatcttccgactgctggggacgcccaccgaggagcagtggccctctatgaccaagctgccagactataagccctatccgatgtacccggccacaacatccctggtgaacgtcgtgcccaaactcaatgccacagggagggatctgctgcagaaccttctgaagtgtaaccctgtccagcgtatctcagcagaagaggccctgcagcacccctacttctccgacttctgtccgccctag

SEQ ID NO: 123763 - DNA, 1758 bp, Homo sapiens
  Payload ID: 4288
  Gene Symbol: CDK5
  Gene Name: cyclin-dependent kinase 5
  Uniprot ID: Q00535
  ENST ID: ENST00000485972
  CDS Start-End: 683-1561
actaaaatccagcctcgaaggggcacagctgttctcccagccctgcggtcagctgttccctgtgaggtcatcatcgctcacaggcattccccagtcaattctggggtcactaggtggcttggggagaggtggaaacccgtgctgaggtcgtcaagaggccgttgggaacacaatgccaccaaccaggtcagcgctgggccgccagtgcccgggatctaggccgccaaaccccaaacccctaaccgagagcgctccgcccccatttccgctgcattctggaacgcgtagtcccggagcggcccttttcaagagggctgggagcacataaaaggaataacaacagcggggcacactgggaaccacggcgccgcggcggggcgcccggaaaacggacacgcgttgcttcctgggacttgaagtccaaggtttgcctccgcggtagaaacggagccctggagtcgagtgctgcagagagcgtgagcgcagacggctgggggttgtagtcttcttgtcctcggtctcgggcattgcggggagacctagtcgttttaggactacaagccccagaaggccctgcgcgggcagacggggcggggctggaggctcaggtgccgcctcctctgcaacgccggggccagagtcttaaaaccgagggcccgcaggggtccccgcggccgccgcgatgcagaaatacgagaaactggaaaagattggggaaggcacctacggaactgtgttcaaggccaaaaaccgggagactcatgagatcgtggctctgaaacgggtgaggctggatgacgatgatgagggtgtgccgagttccgccctccgggagatctgcctactcaaggagctgaagcacaagaacatcgtcaggcttcatgacgtcctgcacagcgacaagaagctgactttggtttttgaattctgtgaccaggacctgaagaagtattttgacagttgcaatggtgacctcgatcctgagattgtaaagtcattcctcttccagctactaaaagggctgggattctgtcatagccgcaatgtgctacacagggacctgaagccccagaacctgctaataaacaggaatggggagctgaaattggctgattttggcctggctcgagcctttgggattcccgtccgctgttactcagctgaggtggtcacactgtggtaccgcccaccggatgtcctctttggggccaagctgtactccacgtccatcgacatgtggtcagccggctgcatctttgcagagctggccaatgctgggcggcctctttttcccggcaatgatgtcgatgaccagttgaagaggatcttccgactgctggggacgcccaccgaggagcagtggccctctatgaccaagctgccagactataagccctatccgatgtacccggccacaacatccctggtgaacgtcgtgcccaaactcaatgccacagggagggatctgctgcagaaccttctgaagtgtaaccctgtccagcgtatctcagcagaagaggccctgcagcacccctacttctccgacttctgtccgccctaggccccgggacccccggcctccaggctggggcctggcctatttaagccccctcttgagaggggtgagacagtgggggtgcctggtgcgctgtgctccagcagtgctgggcccagccggggtggggtgcctgagcccgaatttctcactccctttgtggactttatttaatttcataaattggctcctttcccacagtc

SEQ ID NO: 123764 - DNA, 4325 bp, Homo sapiens
  Payload ID: 4289
  Gene Symbol: CDK5R1
  Gene Name: cyclin-dependent kinase 5, regulatory subunit 1 (p35)
  Uniprot ID: Q15078
  ENST ID: ENST00000313401
  CDS Start-End: 690-1613
ggctgctgttgggcggcggcgcggagcgggcggcgagctgtgcgggaggggcggccccgaggggcggggcgggccgacgccgcgtgtcccgccgcagccgcggagtccggctcctagatggggcccggcgcgtagaggtgcctcccgctcgttgccgcgtcctacccgcaccgtgcgcggctcgagctgaggacaccaacggccgcgactccccggcgagaccaggccggagcgtggacggcgcgcgcgccccgcgagggagggcgctgaggcgcgcgccggaagcgggagcgggagcgggagcgcggcggcggcggcgaaggtgcgggcggccgagcggggggcggggctgcggtgcctgcagaaccttggacagaagctccctagctgccgccgccgccgccgccgccgtcgccgccgccgagcgcgagcccagccgatccccgccgagcgcccccgagcgccgccgagcgccgggaccgcggcggcggggccgcggcgcgcattgcggagggcgcggagcgcaggagctgccgcctgccgggcagatccaagggggcagcacgcttcccgggagcgcccccgcctcctctccggggccgccgcaggctcggtgagcggttttatccctccggccggcaggctgggcgcgcaggggcgcgagcccccgcccggcgcgcagcagcaccatgggcacggtgctgtccctgtctcccagctaccggaaggccacgctgtttgaggatggcgcggccaccgtgggccactatacggccgtacagaacagcaagaacgccaaggacaagaacctgaagcgccactccatcatctccgtgctgccttggaagagaatcgtggccgtgtcggccaagaagaagaactccaagaaggtgcagcccaacagcagctaccagaacaacatcacgcacctcaacaatgagaacctgaagaagtcgctgtcgtgcgccaacctgtccacattcgcccagcccccaccggcccagccgcctgcacccccggccagccagctctcgggttcccagaccgggggctcctcctcagtcaagaaagcccctcaccctgccgtcacctccgcagggacgcccaaacgggtcatcgtccaggcgtccaccagtgagctgcttcgctgcctgggtgagtttctctgccgccggtgctaccgcctgaagcacctgtcccccacggaccccgtgctctggctgcgcagcgtggaccgctcgctgcttctgcagggctggcaggaccagggcttcatcacgccggccaacgtggtcttcctctacatgctctgcagggatgttatctcctccgaggtgggctcggatcacgagctccaggccgtcctgctgacatgcctgtacctctcctactcctacatgggcaacgagatctcctacccgctcaagcccttcctggtggagagctgcaaggaggccttttgggaccgttgcctctctgtcatcaacctcatgagctcaaagatgctgcagataaatgccgacccacactacttcacacaggtcttctccgacctgaagaacgagagcggccaggaggacaagaagcggctcctcctaggcctggatcggtgagcactgtagcctgcgtcatggctcaaggattcaatgcatttttaagaatttattattaaatcagttttgtgtacagtatgtgtctagcaaagccaccaagggcctcacctttcccacagtctctccctggggtttttttcatccctgccaagaactctgggcacttttgaactcacgagccttgcgcaaaacccagaagatgtattcagagccacccaggccactgacctcccactttggggaactcaaaggactgacctgcccctgccgcctgtgcccttgctgggtccagggtaggcaaggctgccggctgcaccctgtatggagctagagaggggcctctggctgcctggcccagggaggaattggggtttctggttggaggcccttttctggctcctgtgtggagttattcactctcccagaggctcctggagccagccaccctaactgagctgccagtggggtcgtgaggcaagatccccgccacccggggacatcttcaatctaggcgaggcgaagctgagcgggtctagtggaaagattgtgtctggtcgtttgaccacacaccgccctgatttgctgttttctttttttagggagaagggcttttctttagtggagaaatggaactcgcccccctacccccttgtctgctgctcccagccacgttggtggtattggccgatgagctggtttgactcattaatttctctcaatttgggtcccagctaaagaggtggggtgaagctggggacagctttcctgggtgagtttttcttttgaataatgtagtgcagtcaccctgtggcaaatgccaggacagctgcaggtgcccattagcaacgcctgccttctgggcaaggtgagggatgccataccttgagaccaagccggtgcccacctaagggctaaggcctcttgctggtgcacatgacatttgtcctgcagagctggggggaaggcgatgtggtgaccccacccccacccgttaatttaaagctgtttctaaacagttgagtttcttctaaagaggaagccttgcccagcaaggaccagtgagacagccggatcttggagacaattacaagacggggagtgagactcctgattgctctggaagcctgctgatttctacaactgatcatttgcagctgctggttttggtttccaccttaccctactggctgtaaaaacacaaatgtgtactttattgattttctttctaattctcccgcattggtggcttgggacttgggagagggagcaagccttcctccatggcccatcactcggctgtggagaacaaagaccaatgtgaagacactacagaggattctgtcttccaggcccagtccactggggagtgctggaatggggacctggggtggggaggcagagggtcactttacataggattaagttcgaggtggctaccgatttcagcacatgcactactgaaatttacacaaaaagaaagctgtgaaattgaagtcccaatttaagagtcctgaggcagaacctggtggctggaggcattcccagaggtggggaagagagcctgcccggccggagaacatctgccttgctgcacctgaggcccagcagagccgttcctgggactgtcagataatcggtgcagcggtggaaggagcctgcggctgctggcacagacttcacacagcacctcctctctgctgggtttccacacagcctgtcttcagatcctgctgccgcgtgcgaccagaggtgggaggcccctggtggcatggaagagggagggtcagtgccaagtctcaggaggagggcgcatgtgtgtatcaccctcagctggcggaacctggctgcgaactgtgcagttacgttgcatccacaggattccagttgcgtgtctgtttccttctctttctccgtatttatttttttattcttcggaggaggtggacatttcggaagtggtggggactaagggaagaactctctagttccctcagtgtgaagcctgtcgtgttctctccccttgcactggtcatcagtattgtgtaaaggaacaactgatatacttgagtgtgcaagcaaagaacccatttgccatgctgctatgaagactacttttagatcaacaataaaaaaaaacctacaaaaaaacctttattctttaattgttgcttttacggtgatattgtgcatgcaaaccaggagcattttgtgtcttaagaaaaataatcttagaacagatggctgtgaaaattacacccatgcacagaacaagccacaggaataatagttcaggatttggtttttctctttttcttgtaaacctggagggttgatatattctttccatgcagttattagaacttagttttgttccaacagttaaacttgcaatgaaaagaaaatgtgccatttttttcactcagaattattcatagctgtatatttgaaactgctaattacacacgtgtgatgtatgttggttttttagtgcaatttcttctgtagctattctttgaccaaactgtgggtattgttaatattaatttatatttgtctcattttgtatgtatgtgtagtgtgtttgtgagtatgtgtggtttataatctgacaaagtcatgaagctcagtttggctgtaatttaattccccttcccttatttttatttatttttgtactgtgctgattcaataaaatgcactgaccatccatta

SEQ ID NO: 123765 - DNA, 962 bp, Homo sapiens
  Payload ID: 4289
  Gene Symbol: CDK5R1
  Gene Name: cyclin-dependent kinase 5, regulatory subunit 1 (p35)
  ENST ID: ENST00000584716
  CDS Start-End: 1-347
cggccaagaagaagaactccaagaaggtgcagcccaacagcagctaccagaacaacatcacgcacctcaacaatgagaacctgaagaagtcgctgtcgtgcgccaacctgtccacattcgcccagcccccaccggcccagccgcctgcacccccggccagccagctctcgggttcccagaccgggggctcctcctcagtcaagaaagcccctcaccctgccgtcacctccgcagggacgcccaaacgggtcatcgtccaggcgtccaccagtgagctgcttcgctgcctggggatgttatctcctccgaggtgggctcggatcacgagctccaggccgtcctgctgacatgcctgtacctctcctactcctacatgggcaacgagatctcctacccgctcaagcccttcctggtggagagctgcaaggaggccttttgggaccgttgcctctctgtcatcaacctcatgagctcaaagatgctgcagataaatgccgacccacactacttcacacaggtcttctccgacctgaagaacgagagcggccaggaggacaagaagcggctcctcctaggcctggatcgggagaagggcttttctttagtggagaaatggaactcgcccccctacccccttgtctgctgctcccagccacgttggtggtattggccgatgagctggtttgactcattaatttctctcaatttgggtcccagctaaagaggtggggtgaagctggggacagctttcctgggtgagtttttcttttgaataatgtagtgcagtcaccctgtggcaaatgccaggacagctgcaggtgcccattagcaacgcctgccttctgggcaaggtgagggatgccataccttgagaccaagccggtgcccacctaagggctaaggcctcttgctggtgcacatgacatttgtcctgcagagctggggggaaggcgatgtggtga

SEQ ID NO: 123766 - DNA, 664 bp, Homo sapiens
  Payload ID: 4289
  Gene Symbol: CDK5R1
  Gene Name: cyclin-dependent kinase 5, regulatory subunit 1 (p35)
  ENST ID: ENST00000584792
  CDS Start-End: 1-347
cggccaagaagaagaactccaagaaggtgcagcccaacagcagctaccagaacaacatcacgcacctcaacaatgagaacctgaagaagtcgctgtcgtgcgccaacctgtccacattcgcccagcccccaccggcccagccgcctgcacccccggccagccagctctcgggttcccagaccgggggctcctcctcagtcaagaaagcccctcaccctgccgtcacctccgcagggacgcccaaacgggtcatcgtccaggcgtccaccagtgagctgcttcgctgcctggggatgttatctcctccgaggtgggctcggatcacgagctccaggccgtcctgctgacatgcctgtacctctcctactcctacatgggcaacgagatctcctacccgctcaagcccttcctggtggagagctgcaaggaggccttttgggaccgttgcctctctgtcatcaacctcatgagctcaaagatgctgcagataaatgccgacccacactacttcacacaggtcttctccgacctgaagaacgagagcggccaggaggacaagaagcggctcctcctaggcctggatcggtgagcactgtagcctgcgtcatggctcaaggattcaatgcatttttaagaatttattattaaatcagttttgtgtaca

SEQ ID NO: 123767 - DNA, 2508 bp, Homo sapiens
  Payload ID: 4290
  Gene Symbol: CDK5R2
  Gene Name: cyclin-dependent kinase 5, regulatory subunit 2 (p39)
  Uniprot ID: Q13319
  ENST ID: ENST00000302625
  CDS Start-End: 167-1270
agctcaggattagagcagcggagccgcctagcagccaccttcccccgccagtccgcgcgcccgggccggggctaggccccccaccgccgggtcccccggggctgcagtagcagcggcgccgcccgcggctcccgctggggcctgggcgccggccccgctctgcaggatgggcacagtgctgtctctttcgcctgcctcctcggccaagggccggaggcccggcgggctgcccgaggagaagaagaaggcgccgcccgcgggggacgaggcgctggggggctacggggcgccgccagtgggcaagggcggcaaaggcgagagccgactcaagcggccgtccgtgctcatctcggcgctcacctggaagcgcctggtggccgcgtccgccaagaagaagaaaggcagcaagaaggtgacacccaagccggcatccacgggccccgaccccctggtccagcaacgcaaccgcgagaaccttctccgcaagggccgggatccccccgacggcggcggcaccgccaagcccctggcggtgccagtgcccaccgtgcccgcggctgccgccacctgcgagccaccgtcggggggcagcgcggccgctcagccgccgggctcgggcgggggaaagcctccgccgccgcctcccccagccccgcaggtggcgccgccggtgcctggcggctcgccgcggcgggtcatcgtgcaggcgtccaccggcgagctgctgcgctgtctgggcgacttcgtgtgccgacgctgctatcgcctcaaggagctgagcccgggcgagctggtgggctggttccgcggtgtggaccgctcgctgctgctgcagggctggcaagaccaggccttcattacgcctgcaaacctggtgttcgtgtacctgctgtgccgcgagtcgctgcgtggggacgagctggcgtcggccgccgagctgcaggccgccttcctcacctgcctctacctcgcctactcctacatgggcaacgagatctcctacccactcaagcccttcctcgtggagcccgacaaggagcgcttctggcagcgctgcctgcgcctcatccagcggctcagcccgcagatgctgcggctcaacgccgacccccacttcttcacgcaggtctttcaagacctcaagaacgagggcgaggccgccgccagcggcgggggcccaccgagcgggggcgcgcccgccgcctcctcggccgccagggacagctgcgcggccggaaccaagcactggactatgaacctggaccgctagggatacccaggggccgcgcccatcccccgccccagcccctgacacacactcggaccccccgggaccacaaagccaccgccgctgttaccgccgctcagcgccccggctgggcggaggaggagacgcccatgcccctcaggggaaagtggagaccgggacaccagaggccgcggtgtttggatttgctgggcgtggagtggggacggaagatgagcgcgggaaaggcactccaacctcactcttcccgtctgtctgcgcccccatttctccatttctgccggggtctcccccttcccttcagcccattccccctcggttttatccatttccttgcctcctttttgtgtcttcatttttcctcctgtctgcattcctctctctctctctccctctctctcctgttcctctctttcttcctccctctccctgcctttccattttccgttccttgggtttgtgtgtctgcatctccatcttaccccttgcctgactgtaccccgtagacccctgtttctcctcctgcacctgtgtccccatctgcccttcttgttgctcctgtcatgtgtcaccatcttccctcctgtctgccttcttcctccacttgtgtcagcttgcatttttttattcctgactgagtcaccacacccctctcccctgatcaaagggaatattagtttttaatttggatcgactgaggtgccaggagaaactgcagtcccaggtatccagacagccaccaggatggtccctcgccccacccccaccgcctctccccaccttttccaacgtgttgcatgctgggagctggggggtgtgggggaaggggctgccggcttctttcaggaggctgaggtttggaggcaaaatcaacctgggagaccaccccggccgcggcgcctcagtggacaggtgggaggaaaagaaaacttcttaccttggaggagggacatcccgcttccttatccttagcttttttgttgctcctccccactgccccttttaatttatttggttgtttgcggagggaggggggaggggggtaggctgggccgggaactgtccgaggtgctgagctggggcgggaccggaatcctcccggtagggtaccagggactgagttgggcctggggccgtgtccaaggtgccaatgatgcgggccgacagagcgggccgcactgtctgtctgtccgtctgtcccggaaagaactataaagcgctggaagcgcctgcagatggtt

SEQ ID NO: 123768 - DNA, 11612 bp, Homo sapiens
  Payload ID: 4291
  Gene Symbol: CDK6
  Gene Name: cyclin-dependent kinase 6
  Uniprot ID: Q00534
  ENST ID: ENST00000265734
  CDS Start-End: 413-1393
aacctctccgcgcgaagacggcttcagccctgcagggaaagaaaagtgcaatgattctggactgagacgcgcttgggcagaggctatgtaatcgtgtctgtgttgaggacttcgcttcgaggagggaagaggagggatcggctcgctcctccggcggcggcggcggcggcgactctgcaggcggagtttcgcggcggcggcaccagggttacgccagccccgcggggaggtctctccatccagcttctgcagcggcgaaagccccagcgcccgagcgcctgagccggcggggagcaagtaaagctagaccgatctccggggagccccggagtaggcgagcggcggccgccagctagttgagcgcaccccccgcccgccccagcggcgccgcggcgggcggcgtccaggcggcatggagaaggacggcctgtgccgcgctgaccagcagtacgaatgcgtggcggagatcggggagggcgcctatgggaaggtgttcaaggcccgcgacttgaagaacggaggccgtttcgtggcgttgaagcgcgtgcgggtgcagaccggcgaggagggcatgccgctctccaccatccgcgaggtggcggtgctgaggcacctggagaccttcgagcaccccaacgtggtcaggttgtttgatgtgtgcacagtgtcacgaacagacagagaaaccaaactaactttagtgtttgaacatgtcgatcaagacttgaccacttacttggataaagttccagagcctggagtgcccactgaaaccataaaggatatgatgtttcagcttctccgaggtctggactttcttcattcacaccgagtagtgcatcgcgatctaaaaccacagaacattctggtgaccagcagcggacaaataaaactcgctgacttcggccttgcccgcatctatagtttccagatggctctaacctcagtggtcgtcacgctgtggtacagagcacccgaagtcttgctccagtccagctacgccacccccgtggatctctggagtgttggctgcatatttgcagaaatgtttcgtagaaagcctctttttcgtggaagttcagatgttgatcaactaggaaaaatcttggacgtgattggactcccaggagaagaagactggcctagagatgttgcccttcccaggcaggcttttcattcaaaatctgcccaaccaattgagaagtttgtaacagatatcgatgaactaggcaaagacctacttctgaagtgtttgacatttaacccagccaaaagaatatctgcctacagtgccctgtctcacccatacttccaggacctggaaaggtgcaaagaaaacctggattcccacctgccgcccagccagaacacctcggagctgaatacagcctgaggcctcagcagccgccttaagctgatcctgcggagaacacccttggtggcttatgggtccccctcagcaagccctacagagctgtggaggattgctatctggaggccttccagctgctgtcttctggacaggctctgcttctccaaggaaaccgcctagtttactgttttgaaatcaatgcaagagtgattgcagctttatgttcatttgtttgtttgtttgtctgtttgtttcaagaacctggaaaaattccagaagaagagaagctgctgaccaattgtgctgccatttgatttttctaaccttgaatgctgccagtgtggagtgggtaatccaggcacagctgagttatgatgtaatctctctgcagctgccgggcctgatttggtacttttgagtgtgtgtgtgcatgtgtgtgtgtgtgtgtgtgtgtgtgtgtgtgtatgtgagagattctgtgatcttttaaagtgttactttttgtaaacgacaagaataattcaattttaaagactcaaggtggtcagtaaataacaggcatttgttcactgaaggtgattcaccaaaatagtcttctcaaattagaaagttaaccccatgtcctcagcatttcttttctggccaaaagcagtaaatttgctagcagtaaaagatgaagttttatacacacagcaaaaaggagaaaaaattctagtatattttaagagatgtgcatgcattctatttagtcttcagaatgctgaatttacttgttgtaagtctattttaaccttctgtatgacatcatgctttatcatttcttttggaaaatagcctgtaagctttttattacttgctataggtttagggagtgtacctcagatagattttaaaaaaaagaatagaaagcctttatttcctggtttgaaattcctttcttccctttttttgttgttgttattgttgtttgttgttgttattttgtttttgtttttaggaatttgtcagaaactctttcctgttttggtttggagagtagttctctctaactagagacaggagtggccttgaaattttcctcatctattacactgtactttctgccacacactgccttgttggcaaagtatccatcttgtctatctcccggcacttctgaaatatattgctaccattgtataactaataacagattgcttaagctgttcccatgcaccacctgtttgcttgctttcaatgaacctttcataaattcgcagtctcagcttatggtttatggcctcgattctgcaaacctaacagggtcacatatgttctctaatgcagtccttctacctggtgtttacttttgttacctaaataatgagtaggatcttgttttgttttatcaccagcacacagattgctataaactgttactttgtgaattacatttttatagaagatattttcagtgtctttacctgagggtatgtctttagctatgttttagggccatacatttactctatcaaatgatcttttctccatcccccaggctgtgcttatttctagtgccttgtgctcactcctgctctctacagagccagcctggcctgggcattgtaaacagcttttcctttttctcttactgttttctctacagtcctttatatttcataccatctctgccttataagtggtttagtgctcagttggctctagtaaccagaggacacagaaagtatcttttggaaagtttagccacctgtgctttctgactcagagtgcatgcaacagttagatcatgcaacagttagattatgtttagggttaggattttcaaagaatggaggttgctgcactcagaaaataattcagatcatgtttatgcattattaagttgtactgaattctttgcagcttaatgtgatatatgactatcttgaacaagagaaaaaactaggagatgtttctcctgaagagcttttggggttgggaactattcttttttaattgctgtactacttaacattgttctaattcagtagcttgaggaacaggaacattgttttctagagcaagataataaaggagatgggccatacaaatgttttctactttcgttgtgacaacattgattaggtgttgtcagtactataaatgcttgagatataatgaatccacagcattcaaggtcaggtctactcaaagtctcacatggaaaagtgagttctgcctttcctttgatcgagggtcaaaatacaaagacatttttgctagggcctacaaattgaatttaaaaactcactgcactgattcatctgagctttttggttagtattcatggctagagtgaacatagctttagtttttgctgttgtaaaagtgttttcataagttcactcaagaaaaatgcagctgttctgaactggaatttttcagcattctttagaattttaaatgagtagagagctcaacttttattcctagcatctgcttttgactcatttctaggcagtgcttatgaagaaaaattaaagcacaaacattctggcattcaatcgttggcagattatcttctgatgacacagaatgaaagggcatctcagcctctctgaactttgtaaaaatctgtccccagttcttccatcggtgtagttgttgcatttgagtgaatactctcttgatttatgtattttatgtccagattcgccatttctgaaatccagatccaacacaagcagtcttgccgttagggcattttgaagcagatagtagagtaagaacttagtgactacagcttattcttctgtaacatatggtttcaaacatctttgccaaaagctaagcagtggtgaactgaaaagggcatattgccccaaggttacactgaagcagctcatagcaagttaaaatattgtgacagatttgaaatcatgtttgaatttcatagtaggaccagtacaagaatgtccctgctagtttctgtttgatgtttggttctggcggctcaggcattttgggaactgttgcacagggtggagtcaaaacaacctacatataaaaagagaaaaagagaaacttgtccatttagctttcataagaaatcccatggcaaagggtaataaaaaggacctaatcttaaaaatacaatttctaagcacttgtaagaacccagtgggttggagcctcccactttgtccctcctttgaagtggatgggaactcaaggtgcaaagaacctgttttggaagaaagcttggggccatttcagccccctgtattctcatgattttctctcaggaagcacacactgtgaatggcagacttttcatttagccccaggtgacttactaaaaatagttgaaaattattcacctaagaatagaatctcagcattgtgttaaataaaaatgaaagctttagaaggcatgagatgttcctatcttaaataaagcatgtttcttttctatagagaaatgtatagtttgactctccagaatgtactatccatcttgatgagaaaactcttaaatagtaccaaacattttgaactttaaattatgtatttaaagtgagtgtttaagaaactgtagctgcttcttttacaagtggtgcctattaaagtcagtaatggccattattgttccattgtggaaattaaattatgtaagcttcctaatatcataaacatattaaaattcttctaaaatattgcttttcttttaagtgacaatttgactattcttatgataagcacatgagagtgtcttacattttccaaaagcaggctttaattgcatagttgagtctaggaaaaaataatgttaaaagtgaatatgccaccataattacttaattatgttagtatagaaactacagaatatttaccctggaaagaaaatattggaatgttattataaactcttagatatttatataattcaaaagaatgcatgtttcacattgtgacagataaagatgtatgatttctaaggctttaaaaattattcataaaacagtgggcaatagataaaggaaattctggagaaaatgaaggtatttaaagggtagtttcaaagctatatatattttgaaggatatattctttatgaacaaatatattgtaaaaatttatactaaggtcatctggtaactgtgggattaatatggtcgaaaacaaatgttatggagaagctgtcccaagcaaactaaattacctgtacttttttcccatttcaagggaagaggcaaccacatgaagcaatacttcttacacatgcctaagaacgttcattgaaaaaataaatttttaaaaggcatgtgtttcctatgccaccaatacttttgaaaaattgtgaaccttacccaaaaccatttatcatgtccattaagtatatttgggtatataattaggaagatatttacatgttccatctccacagtggaaaaacttattgaggctaccaaagtgtgccaagaaatgtaagtccttagagtaattagaaatgctgttttcctcaaaagcatgagaaactagcattttcatttcttatttactccctttctatatcaatgcaattcacaacccaattttaatacatccctatatctcaagcatttctatcttgtactttttcagaaaataaaccaaaaataatcctttggtctctctatcttctgacctttgtaagcaacagaaatgtaaaaacagaaggggtccaatttttacacgtttttttctcaagtagcctttctggggatttttattttcttaatgaagtgccaatcagcttttcaaaatgttttctatttctcagcatttccaggaagtgataacgtttagctaaatgagtagaagtggacttccttcaacatattgttaccttgtctagccttaggaagaaaacaagagccacctgaaaataaatacaggctcttttcgagcatctgctgaaatactgttacagcaatttgaagttgatgtggtaggaaaggaaggtgacttttcttgcaaaagtctttctaaacattcacactgtcctaagagatgagctttcttgttttattccggtatattccacaaggtggcacttttagagaaaaacaaatctgatgaagactaaagaggtacttctaaaagagatttcattctaactttatttttctgcgcatatttaactctttcctagcacttgttttttgggatgattaatagtctctataatgttctgtaacttcaatattttacttgttacctaggttctgaacaattgtctgcaaataaattgttcttaaggatggataatacacccattttgatcatttaagtaaagaaagcctagtcattcattcagtcaagaaaaaatttttgaagtacccagttaccttacttttctagattaaaacaggcttagttactaaaaaggcagtcctcatctgtgaacaggatagtttcgttagaagtataaaactcctttagtggccccagttaaaacacacataccctctctgctgctttcaaattccctagcatggtggcctttcaacattgattaaattttaaaatcctaatttaaagatcaggtgagcaaaatgagtagcacatcagtaattcagtagacaaaacttttgtctgaaaaattgctgtattgaaacagagccctaaaataccaaaagaccaggtaattttaacatttgtggaatcacaaatgtaaattcataagaagctctaattaaaaaaaaaaagtctgaagtatatgagcataacaacttaggagtgtgtctacatacttaacttttgaagttttttggcaactttatatactttttttaaatttacaagtctacttaaagacttcttataccccaaatgattaagttaattttagaggtcacctttctcacagcagtgtcacttgaaatttagtagggaaggatattgcagtatttttcagtttccttagcacagcaccacagaaagcagcttattccttttgagtggcagacactcgacggtgcctgcccaactttcctcctgagtggcaagcagatgagtctcagtaattcatactgaaccaaaatgccacatacactaggggcagtcagaaactggctgagaaatcccccgcctcattcgcccctctgctcccaggaactagagtccagttaaagcccctatgcgaaaggccgaattccaccccagggtttgttataacagtggccagtctgaaccccatttgctcgtgctcaaaacttgattcccacttgaaagccttccgggcgcgctgcctcgttgccccgcccctttggcaggagagaggcagtgggcgaggccgggctggggccccgcctcccactcacctgccggtgcctgaaattatgtgcggccccgcgggctgctttccgaggtcagagtgccctgctgctgtctcagaggcatctgttctgcaaatcttaggaagaaaaatgtccctagtagcaaacgggtgtcttctgtgcataaataagtacaacacaattctccgaaagttcgggtaaaaagagatgcggtagcagctgccctgtgtgaagctgtctaccccgcatctctcaggcgctaagctcagtttttgtttttgtttttgtttttttaaagaaaagatgtataattgcaggaatttttttttatttttttattttccatcattctatatatgtgatggtgaaagatatgcctggaaaagttttgttttgaaaagtttattttctgcttcgtcttcagttggcaaaagctctcaattctttagcttccagtttcttttctctctttttctttgttaggtaattaaaggtatgtaaacaaattatctcatgtagcaggggattttcatgttgagaggaatcttccgtgtgagttgtttggtcacacaaataaccctttctcaattttaggagtttggattgtcaaatgtaggtttttctcaaagggggcatataactacatattgactgccaagaactatgactgtagcactaatcagcacacatagagccacacaattatttaatttctaactctctgtggtccctagaaaaattccgttgatgtgcttaggttaaagttctgaagatacccgttgtacccttacttgaaagtttctaatcttaagttttatgaaatgcaataatatgtatcagctagcaatatttctgtgatcaccaacaactctcagtttgatcttaaagtctgaataataaaacaaatcccagcagtaatacatttcttaaacctcacagtgcatgatatatcttttcattctgatcctgtgtttgcaaaaatatacacatgtatatcatagttcctcactttttattcatttgttttcctattacctgtagtaaatatattagttagtacatggaatttatagcatcagctacccccaggaacagcacctgacaggcgggggattttttttcaagttgttctacatttgcataaattatttctattattattcatgtatgttatttatttctgaatcacactagtcctgtgaaagtacaactgaaggcagaaagtgttaggattttgcatctaatgttcattatcatggtattgatggacctaagaaaataaaaattagactaagcccccaaataagctgcatgcatttgtaacatgattagtagatttgaatatatagatgtagtattttgggtatctaggtgttttatcattatgtaaaggaattaaagtaaaggactttgtagttgtttttattaaatatgcatatagtagagtgcaaaaatatagcaaaaataaaaactaaaggtagaaaagcattttagatatgccttaatttagaaactgtgccaggtggccctcggaatagatgccaggcagagaccagtgcctgggtggtgcctcctcttgtctgccctcatgaagaagcttccctcacgtgatgtagtgccctcgtaggtgtcatgtggagtagtgggaacaggcagtactgttgagaggagagcagtgtgagagtttttctgtagaagcagaactgtcagcttgtgccttgaggcttccagaacgtgtcagatggagaagtccaagtttccatgcttcaggcaacttagctgtgtacagaagcaatccagtgtggtaataaaaagcaaggattgcctgtataatttattataaaataaaagggattttaacaaccaacaattcccaacacctcaaaagcttgttgcattttttggtatttgaggtttttatctgaaggttaaagggcaagtgtttggtatagaagagcagtatgtgttaagaaaagaaaaatattggttcacgtagagtgcaaattagaactagaaagttttatacgattatcattttgagatgtgttaaagtaggttttcactgtaaaatgtattagtgtttctgcattgccatagggcctggttaaaactttctcttaggtttcaggaagactgtcacatacagtaagcttttttccttctgacttataatagaaaatgttttgaaagtaaaaaaaaaaaatctaatttggaaatttgacttgttagtttctgtgtttgaaatcatggttctagaaatgtagaaattgtgtatatcagatactcatctaggctgtgtgaaccagcccaagatgaccaacatccccacacctctacatctctgtcccctgtatctcttcctttctaccactaaagtgttccctgctaccatcctggcttgtccacatggtgctctccatcttcctccacatcatggaccacaggtgtgcctgtctaggcctggccaccactcccaacttgacctagccacattcatctagagatggttcctgatgctgggcacagactgtgctcatggcacccattagaaatgcctctagcatctttgtatgcatcttgatttttaaaccaagtcattgtacagagcattcagttttggctgtggtaccaagagaaaaactaatcaagaatataaaccacattccaggctgctgttttctctccatctacaggccacacttttactgtatttcttcatacttgaaattcattctgctattttcatatcagggtacagacttataagggtgcatgttccttaaaggtgcataattattcttattccgtttgcttatattgctacagaatgctctgttttggtgctttgagttctgcagacccaagaagcagtgtggaaattcactgcctgggacacagtcttataagaatgttggcaggtgactttgtatcagatgttgcttctcttttctctgtacacagattgagagttaccacagtggcctgtcgggtccaccctgtgggtgcagcacagctctctgaaagcaagaaccttcctacctattctaacgtttttgccctctaagaaaaatggcctcaggtatggtatagacatagcaagaggggaagggctgtctcactctagcaaccatccctccattacacacagaaagccctcttgaagcaaaagaagaagaaagaaagaaagcttatctctaaggctactgtcttcagaatgctctgagctgaatgctcttgctcctttcccaagaggcagatgaaaatatagccagtttatctatacccttcctatctgaggaggagaatagaaaagtagggtaaatatgtaacgtaaaatatgtcattcaaggaccaccaaaactttaagtaccctatcattaaaaatctggttttaaaagtagctcaagtaagggatgctttgtgacccagggtttctgaagtcagatagccattcttacctgccccttactctgacttattgggaaagggagaactgcagtggtgtttctgttgcagtggcaaaggtaacatgtcagaaaattcagagggttgcataccaataatcctttggaaactggatgtcttactgggtgctagaatgaaaatgtaggtatttattgtcagatgatgaagttcattgtttttttcaaaattggtgttgaaatatcactgtccaatgtgttcacttatgtgaaagctaaattgaatgaggcaaaaagagcaaatagtttgtatatttgtaataccttttgtatttcttacaataaaaatattggtagcaaataaaaataataaaaacaataactttaaactgctttctggagatgaattactctcctggctattttcttttttactttaatgtaaaatgagtataactgtagtgagtaaaattcattaaattccaagttttagcagaa

SEQ ID NO: 123769 - DNA, 1465 bp, Homo sapiens
  Payload ID: 4291
  Gene Symbol: CDK6
  Gene Name: cyclin-dependent kinase 6
  Uniprot ID: Q00534
  ENST ID: ENST00000424848
  CDS Start-End: 485-1465
gctggtaactccttccccagagtctgattacctgctccgcgaggccgcggacacgtgcggagagccgactgacactcgcagccccctcgggaggcccgacgcgactgggcccctcaggtgcaatgattctggactgagacgcgcttgggcagaggctatgtaatcgtgtctgtgttgaggacttcgcttcgaggagggaagaggagggatcggctcgctcctccggcggcggcggcggcggcgactctgcaggcggagtttcgcggcggcggcaccagggttacgccagccccgcggggaggtctctccatccagcttctgcagcggcgaaagccccagcgcccgagcgcctgagccggcggggagcaagtaaagctagaccgatctccggggagccccggagtaggcgagcggcggccgccagctagttgagcgcaccccccgcccgccccagcggcgccgcggcgggcggcgtccaggcggcatggagaaggacggcctgtgccgcgctgaccagcagtacgaatgcgtggcggagatcggggagggcgcctatgggaaggtgttcaaggcccgcgacttgaagaacggaggccgtttcgtggcgttgaagcgcgtgcgggtgcagaccggcgaggagggcatgccgctctccaccatccgcgaggtggcggtgctgaggcacctggagaccttcgagcaccccaacgtggtcaggttgtttgatgtgtgcacagtgtcacgaacagacagagaaaccaaactaactttagtgtttgaacatgtcgatcaagacttgaccacttacttggataaagttccagagcctggagtgcccactgaaaccataaaggatatgatgtttcagcttctccgaggtctggactttcttcattcacaccgagtagtgcatcgcgatctaaaaccacagaacattctggtgaccagcagcggacaaataaaactcgctgacttcggccttgcccgcatctatagtttccagatggctctaacctcagtggtcgtcacgctgtggtacagagcacccgaagtcttgctccagtccagctacgccacccccgtggatctctggagtgttggctgcatatttgcagaaatgtttcgtagaaagcctctttttcgtggaagttcagatgttgatcaactaggaaaaatcttggacgtgattggactcccaggagaagaagactggcctagagatgttgcccttcccaggcaggcttttcattcaaaatctgcccaaccaattgagaagtttgtaacagatatcgatgaactaggcaaagacctacttctgaagtgtttgacatttaacccagccaaaagaatatctgcctacagtgccctgtctcacccatacttccaggacctggaaaggtgcaaagaaaacctggattcccacctgccgcccagccagaacacctcggagctgaatacagcctga

SEQ ID NO: 123770 - DNA, 1439 bp, Homo sapiens
  Payload ID: 4292
  Gene Symbol: CDK7
  Gene Name: cyclin-dependent kinase 7
  Uniprot ID: P50613
  ENST ID: ENST00000256443
  CDS Start-End: 104-1144
cccggtggacggaagtgggtgttggaggctttaaggtagctttaaattcgtgttgtcctgggagctcgcccttttcggctggagtcgggctttacggcgccggatggctctggacgtgaagtctcgggcaaagcgttatgagaagctggacttccttggggagggacagtttgccaccgtttacaaggccagagataagaacaccaaccaaattgtcgccattaagaaaatcaaacttggacatagatcagaagctaaagatggtataaatagaaccgccttaagagagataaaattattacaggagctaagtcatccaaatataattggtctccttgatgcttttggacataaatctaatattagccttgtctttgattttatggaaactgatctagaggttataataaaggataatagtcttgtgctgacaccatcacacatcaaagcctacatgttgatgactcttcaaggattagaatatttacatcaacattggatcctacatagggatctgaaaccaaacaacttgttgctagatgaaaatggagttctaaaactggcagattttggcctggccaaatcttttgggagccccaatagagcttatacacatcaggttgtaaccaggtggtatcgggcccccgagttactatttggagctaggatgtatggtgtaggtgtggacatgtgggctgttggctgtatattagcagagttacttctaagggttccttttttgccaggagattcagaccttgatcagctaacaagaatatttgaaactttgggcacaccaactgaggaacagtggccggacatgtgtagtcttccagattatgtgacatttaagagtttccctggaatacctttgcatcacatcttcagtgcagcaggagacgacttactagatctcatacaaggcttattcttatttaatccatgtgctcgaattacggccacacaggcactgaaaatgaagtatttcagtaatcggccagggccaacacctggatgtcagctgccaagaccaaactgtccagtggaaaccttaaaggagcaatcaaatccagctttggcaataaaaaggaaaagaacagaggccttagaacaaggaggattgcccaagaaactaattttttaaagagaacactggacaacattttactactgagggaaatagccaaaaaggcaaataatggaaaaatagtaaacattaagtaaatgctgtagaagtgagtttgtaaatattctacacatgtaaaatatgtaaaactatgggttatttttattaaatgtattttaaaataaaaatttaattctggtttttctgattagagtgcaaaagtgagaaaagttcaatactcttgaaatgtagaattgaaaatgcattagggaaaacttaataaaaattattaccagttatttggaagatctga

SEQ ID NO: 123771 - DNA, 531 bp, Homo sapiens
  Payload ID: 4292
  Gene Symbol: CDK7
  Gene Name: cyclin-dependent kinase 7
  ENST ID: ENST00000508726
  CDS Start-End: 8-217
gcgccggatggctctggacgtgaagtctcgggcaaagcgttatgagaagctggacttccttggggagggacagtttgccaccgtttacaaggccagagataagaacaccaaccaaattgtcgccattaagaaaatcaaacttggacatagatcagaagctaaagatggtggtatcgggcccccgagttactatttggagctaggatgtatggtgtaggtgtggacatgtgggctgttggctgtatattagcagagttacttctaagggttccttttttgccaggagattcagaccttgatcagctaacaagaatatttgaaactttgggcacaccaactgaggaacagtggccggacatgtgtagtcttccagattatgtgacatttaagagtttccctggaatacctttgcatcacatcttcagtgcagcaggagacgacttactagatctcatacaaggcttattcttatttaatccatgtgctcgaattacggccacacaggcactgaaaatgaagtatttcagtaat

SEQ ID NO: 123772 - DNA, 722 bp, Homo sapiens
  Payload ID: 4292
  Gene Symbol: CDK7
  Gene Name: cyclin-dependent kinase 7
  ENST ID: ENST00000504147
  CDS Start-End: 19-195
cgggctttacggcgccggatggctctggacgtgaagtctcgggcaaagcgttatgagaagctggacttccttggggagggacagtttgccaccgtttacaaggccagagataagaacaccaaccaaattgtcgccattaagaaagagtctctgctggtagccactacagctgtgaatgtgctgtgtcatacctgaagccaatatgtctcggagtttcacctgaggcccatgatcaaacttggacatagatcagaagctaaagatggtataaatagaaccgccttaagagagataaaattattacaggagctaagtcatccaaatataattggtctccttgatgcttttggacataaatctaatattagccttgtctttgattttatggaaactgatctagaggttataataaaggataatagtcttgtgctgacaccatcacacatcaaagcctacatgttgatgactcttcaaggattagaatatttacatcaacattggatcctacatagggatctgaaaccaaacaacttgttgctagatgaaaatggagttctaaaactggcagattttggcctggccaaatcttttgggagccccaatagagcttatacacatcaggttgtaaccaggtggtatcgggcccccgagttactatttggagctaggatgtatggtgtaggtgtggacatgtgggctgttggctgtatattagcagagtt

SEQ ID NO: 123773 - DNA, 1455 bp, Homo sapiens
  Payload ID: 4292
  Gene Symbol: CDK7
  Gene Name: cyclin-dependent kinase 7
  ENST ID: ENST00000502604
  CDS Start-End: 491-1252
gtggaggccagaggtctggcttggctgctcgttctcgttgggggaaaccgtccagacgcacttgctgcccattctttacatcctgggggtgaatccctgaggggcctctccttgctgaagagtagcctggagctggacggagactgacccgccacgtttccagccgccgcgagtctgctcaggaactctgggctctttgcttcgcgaaatgtaaaaatgcaaaaaggcaaacacaaaaactcccataaacttatgttatttctatttttctttctagtttgccaccgtttacaaggccagagataagaacaccaaccaaattgtcgccattaagaaaatcaaacttggacatagatcagaagctaaagatggtataaatagaaccgccttaagagagataaaattattacaggagctaagtcatccaaatataattggtctccttgatgcttttggacataaatctaatattagccttgtctttgattttatggaaactgatctagaggttataataaaggataatagtcttgtgctgacaccatcacacatcaaagcctacatgttgatgactcttcaaggattagaatatttacatcaacattggatcctacatagggatctgaaaccaaacaacttgttgctagatgaaaatggagttctaaaactggcagattttggcctggccaaatcttttgggagccccaatagagcttatacacatcaggttgtaaccaggtggtatcgggcccccgagttactatttggagctaggatgtatggtgtaggtgtggacatgtgggctgttggctgtatattagcagagttacttctaagggttccttttttgccaggagattcagaccttgatcagctaacaagaatatttgaaactttgggcacaccaactgaggaacagtggccggacatgtgtagtcttccagattatgtgacatttaagagtttccctggaatacctttgcatcacatcttcagtgcagcaggagacgacttactagatctcatacaaggcttattcttatttaatccatgtgctcgaattacggccacacaggcactgaaaatgaagtatttcagtaatcggccagggccaacacctggatgtcagctgccaagaccaaactgtccagtggaaaccttaaaggagcaatcaaatccagctttggcaataaaaaggaaaagaacagaggccttagaacaaggaggattgcccaagaaactaattttttaaagagaacactggacaacattttactactgagggaaatagccaaaaaggcaaataatggaaaaatagtaaacattaagtaaatgctgtagaagtgagtttgtaaatattctacacatgtaaaatatgtaaaactatgggttatttttattaaatgtattttaaaataaaaatttaattctggtttttctgattagagtgcaaaa

SEQ ID NO: 123774 - DNA, 1164 bp, Homo sapiens
  Payload ID: 4292
  Gene Symbol: CDK7
  Gene Name: cyclin-dependent kinase 7
  ENST ID: ENST00000514676
  CDS Start-End: 65-994
ctttaaattcgtgttgtcctgggagctcgcccttttcggctggagtcgggctttacggcgccggatggctctggacgtgaagtctcgggcaaagcgttatgagaagctggacttccttggggagggacagtttgccaccgtttacaaggccagagataagaacaccaaccaaattgtcgccattaagaaaatcaaacttggacatagatcagaagctaaagatggtataaatagaaccgccttaagagagataaaattattacaggagctaagtcatccaaatataattggtctccttgatgcttttggacataaatctaatattagccttgtctttgattttatggaaactgatctagaggatctgaaaccaaacaacttgttgctagatgaaaatggagttctaaaactggcagattttggcctggccaaatcttttgggagccccaatagagcttatacacatcaggttgtaaccaggtggtatcgggcccccgagttactatttggagctaggatgtatggtgtaggtgtggacatgtgggctgttggctgtatattagcagagttacttctaagggttccttttttgccaggagattcagaccttgatcagctaacaagaatatttgaaactttgggcacaccaactgaggaacagtggccggacatgtgtagtcttccagattatgtgacatttaagagtttccctggaatacctttgcatcacatcttcagtgcagcaggagacgacttactagatctcatacaaggcttattcttatttaatccatgtgctcgaattacggccacacaggcactgaaaatgaagtatttcagtaatcggccagggccaacacctggatgtcagctgccaagaccaaactgtccagtggaaaccttaaaggagcaatcaaatccagctttggcaataaaaaggaaaagaacagaggccttagaacaaggaggattgcccaagaaactaattttttaaagagaacactggacaacattttactactgagggaaatagccaaaaaggcaaataatggaaaaatagtaaacattaagtaaatgctgtagaagtgagtttgtaaatattctacacatgtaaaatatgtaaaactatgggttatttttattaaatgtattttaaaataaaaa

SEQ ID NO: 123775 - DNA, 728 bp, Homo sapiens
  Payload ID: 4292
  Gene Symbol: CDK7
  Gene Name: cyclin-dependent kinase 7
  ENST ID: ENST00000506563
  CDS Start-End: 281-728
ggaagtgaggcggggatactaaagcgacggagcccggtggacggaagtgggtgttggaggctttaagtttgccaccgtttacaaggccagagataagaacaccaaccaaattgtcgccattaagaaaatcaaacttggacatagatcagaagctaaagatggtataaatagaaccgccttaagagagataaaattattacaggagctaagtcatccaaatataattggtctccttgatgcttttggacataaatctaatattagccttgtctttgattttatggaaactgatctagaggttataataaaggataatagtcttgtgctgacaccatcacacatcaaagcctacatgttgatgactcttcaaggattagaatatttacatcaacattggatcctacatagggatctgaaaccaaacaacttgttgctagatgaaaatggagttctaaaactggcagattttggcctggccaaatcttttgggagccccaatagagcttatacacatcaggttgtaaccaggtggtatcgggcccccgagttactatttggagctaggatgtatggtgtaggtgtggacatgtgggctgttggctgtatattagcagagttacttctaagggttccttttttgccaggagattcagaccttgatcagctaacaagaatatttgaaactttgggcacaccaactgaggaacagtggccggacatgtgtagtc

SEQ ID NO: 123776 - DNA, 809 bp, Homo sapiens
  Payload ID: 4292
  Gene Symbol: CDK7
  Gene Name: cyclin-dependent kinase 7
  ENST ID: ENST00000515391
  CDS Start-End: 98-331
ggacggaagtgggtgttggaggctttaaggtagctttaaattcgtgttgtcctgggagctcgcccttttcggctggagtcgggctttacggcgccggatggctctggacgtgaagtctcgggcaaagcgttatgagaagctggacttccttggggagggacagtttgccaccgtttacaaggccagagataagaacaccaaccaaattgtcgccattaagaaaatcaaacttggacatagatcagaagctaaagatggtataaatagaaccgccttaagagagataaaattattacaggagctaagtcatccaaatataattgctccttgatgcttttggacataaatctaatattagccttgtctttgattttatggaaactgatctagaggttataataaaggataatagtcttgtgctgacaccatcacacatcaaagcctacatgttgatgactcttcaaggattagaatatttacatcaacattggatcctacatagggatctgaaaccaaacaacttgttgctagatgaaaatggagttctaaaactggcagattttggcctggccaaatcttttgggagccccaatagagcttatacacatcaggttgtaaccaggtggtatcgggcccccgagttactatttggagctaggatgtatggtgtaggtgtggacatgtgggctgttggctgtatattagcagagttacttctaagggttccttttttgccaggagattcagaccttgatcagctaacaagaatatttgaaactttgggcacaccaactgaggaacagtggccg

SEQ ID NO: 123777 - DNA, 477 bp, Homo sapiens
  Payload ID: 4292
  Gene Symbol: CDK7
  Gene Name: cyclin-dependent kinase 7
  ENST ID: ENST00000506789
  CDS Start-End: 85-261
tgttggaggctttaaggtagctttaaattcgtgttgtcctgggagctcgcccttttcggctggagtcgggctttacggcgccggatggctctggacgtgaagtctcgggcaaagcgttatgagaagctggacttccttggggagggacagtttgccaccgtttacaaggccagagataagaacaccaaccaaattgtcgccattaagaaaatcaaacttggacatagatcagaagctaaagatggttataataaaggataatagtcttgtgctgacaccatcacacatcaaagcctacatgttgatgactcttcaaggattagaatatttacatcaacattggatcctacatagggatctgaaaccaaacaacttgttgctagatgaaaatggagttctaaaactggcagattttggcctggccaaatcttttgggagccccaatagagcttatacacatcaggttgtaaccaggtg

SEQ ID NO: 123778 - DNA, 486 bp, Homo sapiens
  Payload ID: 4292
  Gene Symbol: CDK7
  Gene Name: cyclin-dependent kinase 7
  ENST ID: ENST00000515180
  CDS Start-End: 90-257
gtgggtgttggaggctttaaggtagctttaaattcgtgttgtcctgggagctcgcccttttcggctggagtcgggctttacggcgccggatggctctggacgtgaagtctcgggcaaagcgttatgagaagctggacttccttggggagggacagtttgccaccgtttacaaggccagagataagaacaccaaccaaattgtcgccattaagaaaatcaaacttggacatagatcagaagctaaagatgctccttgatgcttttggacataaatctaatattagccttgtctttgattttatggaaactgatctagaggttataataaaggataatagtcttgtgctgacaccatcacacatcaaagcctacatgttgatgactcttcaaggattagaatatttacatcaacattggatcctacatagggatctgaaaccaaacaacttgttgctagatgaaaatggagttctaaaactggcagat

SEQ ID NO: 123779 - DNA, 818 bp, Homo sapiens
  Payload ID: 4292
  Gene Symbol: CDK7
  Gene Name: cyclin-dependent kinase 7
  ENST ID: ENST00000510106
  CDS Start-End: 79-210
aggctttaaggtagctttaaattcgtgttgtcctgggagctcgcccttttcggctggagtcgggctttacggcgccggatggctctggacgtgaagtctcgggcaaagcgttatgagaagctggacttccttggggagggacagtttgccaccgtttacaaggccagagataagaacaccaaccaaattgtcgccattaagaaagtataaatagaaccgccttaagagagataaaattattacaggagctaagtcatccaaatataattggtctccttgatgcttttggacataaatctaatattagccttgtctttgattttatggaaactgatctagaggttataataaaggataatagtcttgtgctgacaccatcacacatcaaagcctacatgttgatgactcttcaaggattagaatatttacatcaacattggatcctacatagggatctgaaaccaaacaacttgttgctagatgaaaatggagttctaaaactggcagattttggcctggccaaatcttttgggagccccaatagagcttatacacatcaggttgtaaccaggtggtatcgggcccccgagttactatttggagctaggatgtatggtgtaggtgtggacatgtgggctgttggctgtatattagcagagttacttctaagggttccttttttgccaggagattcagaccttgatcagctaacaagaatatttgaaactttgggcacaccaactgaggaacagtggccggacatgtgtagtcttccagattatgtgacatttaagagtttccctggaatacctttgcat

SEQ ID NO: 123780 - DNA, 477 bp, Homo sapiens; identical to SEQ ID NO: 123777
  Payload ID: 4292
  Gene Symbol: CDK7
  Gene Name: cyclin-dependent kinase 7
  ENST ID: ENST00000617941
  CDS Start-End: 85-261

SEQ ID NO: 123781 - DNA, 809 bp, Homo sapiens; identical to SEQ ID NO: 123776
  Payload ID: 4292
  Gene Symbol: CDK7
  Gene Name: cyclin-dependent kinase 7
  ENST ID: ENST00000617289
  CDS Start-End: 98-331

SEQ ID NO: 123782 - DNA, 728 bp, Homo sapiens
  Payload ID: 4292
  Gene Symbol: CDK7
  Gene Name: cyclin-dependent kinase 7
  ENST ID: ENST00000613505
  CDS Start-End: 281-728
ggaagtgaggcggggatactaaagcgacggagcccagtggacggaagtgggtgttggaggctttaagtttgccaccgtttacaaggccagagataagaacaccaaccaaattgtcgccattaagaaaatcaaacttggacatagatcagaagctaaagatggtataaatagaaccgccttaagagagataaaattattacaggagctaagtcatccaaatataattggtctccttgatgcttttggacataaatctaatattagccttgtctttgattttatggaaactgatctagaggttataataaaggataatagtcttgtgctgacaccatcacacatcaaagcctacatgttgatgactcttcaaggattagaatatttacatcaacattggatcctacatagggatctgaaaccaaacaacttgttgctagatgaaaatggagttctaaaactggcagattttggcctggccaaatcttttgggagccccaatagagcttatacacatcaggttgtaaccaggtggtatcgggcccccgagttactatttggagctaggatgtatggtgtaggtgtggacatgtgggctgttggctgtatattagcagagttacttctaagggttccttttttgccaggagattcagaccttgatcagctaacaagaatatttgaaactttgggcacaccaactgaggaacagtggccggacatgtgtagtc

SEQ ID NO: 123783 - DNA, 531 bp, Homo sapiens; identical to SEQ ID NO: 123771
  Payload ID: 4292
  Gene Symbol: CDK7
  Gene Name: cyclin-dependent kinase 7
  ENST ID: ENST00000618909
  CDS Start-End: 8-217

SEQ ID NO: 123784 - DNA, 1455 bp, Homo sapiens
  Payload ID: 4292
  Gene Symbol: CDK7
  Gene Name: cyclin-dependent kinase 7
  ENST ID: ENST00000614858
  CDS Start-End: 491-1252
gtggaggccagaggtctggcttggctgctcgttctcgttgggggaaaccgtccagacgcacttgctgcccattctttacatcctgggggtgaatccctgaggggcctctccttgctgaagagtagcctggagctggacggagactgacccgccacgtttccagccgccgcgagtctgctcagaaactctgggctctttgcttcgcgaaatgtaaaaatgcaaaaaggcaaacacaaaaactcccataaacttatgttatttctatttttctttctagtttgccaccgtttacaaggccagagataagaacaccaaccaaattgtcgccattaagaaaatcaaacttggacatagatcagaagctaaagatggtataaatagaaccgccttaagagagataaaattattacaggagctaagtcatccaaatataattggtctccttgatgcttttggacataaatctaatattagccttgtctttgattttatggaaactgatctagaggttataataaaggataatagtcttgtgctgacaccatcacacatcaaagcctacatgttgatgactcttcaaggattagaatatttacatcaacattggatcctacatagggatctgaaaccaaacaacttgttgctagatgaaaatggagttctaaaactggcagattttggcctggccaaatcttttgggagccccaatagagcttatacacatcaggttgtaaccaggtggtatcgggcccccgagttactatttggagctaggatgtatggtgtaggtgtggacatgtgggctgttggctgtatattagcagagttacttctaagggttccttttttgccaggagattcagaccttgatcagctaacaagaatatttgaaactttgggcacaccaactgaggaacagtggccggacatgtgtagtcttccagattatgtgacatttaagagtttccctggaatacctttgcatcacatcttcagtgcagcaggagacgacttactagatctcatacaaggcttattcttatttaatccatgtgctcgaattacggccacacaggcactgaaaatgaagtatttcagtaatcggccagggccaacacctggatgtcagctgccaagaccaaactgtccagtggaaaccttaaaggagcaatcaaatccagctttggcaataaaaaggaaaagaacagaggccttagaacaaggaggattgcccaagaaactaattttttaaagagaacactggacaacattttactactgagggaaatagccaaaaaggcaaataatggaaaaatagtaaacattaagtaaatgctgtagaagtgagtttgtaaatattctacacatgtaaaatatgtaaaactatgggttatttttattaaatgtattttaaaataaaaatttaattctggtttttctgattagagtgcaaaa

SEQ ID NO: 123785 - DNA, 486 bp, Homo sapiens; identical to SEQ ID NO: 123778
  Payload ID: 4292
  Gene Symbol: CDK7
  Gene Name: cyclin-dependent kinase 7
  ENST ID: ENST00000614881
  CDS Start-End: 90-257

SEQ ID NO: 123786 - DNA, 1432 bp, Homo sapiens
  Payload ID: 4292
  Gene Symbol: CDK7
  Gene Name: cyclin-dependent kinase 7
  Uniprot ID: P50613
  ENST ID: ENST00000615305
  CDS Start-End: 104-1144
cccagtggacggaagtgggtgttggaggctttaaggtagctttaaattcgtgttgtcctgggagctcgcccttttcggctggagtcgggctttacggcgccggatggctctggacgtgaagtctcgggcaaagcgttatgagaagctggacttccttggggagggacagtttgccaccgtttacaaggccagagataagaacaccaaccaaattgtcgccattaagaaaatcaaacttggacatagatcagaagctaaagatggtataaatagaaccgccttaagagagataaaattattacaggagctaagtcatccaaatataattggtctccttgatgcttttggacataaatctaatattagccttgtctttgattttatggaaactgatctagaggttataataaaggataatagtcttgtgctgacaccatcacacatcaaagcctacatgttgatgactcttcaaggattagaatatttacatcaacattggatcctacatagggatctgaaaccaaacaacttgttgctagatgaaaatggagttctaaaactggcagattttggcctggccaaatcttttgggagccccaatagagcttatacacatcaggttgtaaccaggtggtatcgggcccccgagttactatttggagctaggatgtatggtgtaggtgtggacatgtgggctgttggctgtatattagcagagttacttctaagggttccttttttgccaggagattcagaccttgatcagctaacaagaatatttgaaactttgggcacaccaactgaggaacagtggccggacatgtgtagtcttccagattatgtgacatttaagagtttccctggaatacctttgcatcacatcttcagtgcagcaggagacgacttactagatctcatacaaggcttattcttatttaatccatgtgctcgaattacggccacacaggcactgaaaatgaagtatttcagtaatcggccagggccaacacctggatgtcagctgccaagaccaaactgtccagtggaaaccttaaaggagcaatcaaatccagctttggcaataaaaaggaaaagaacagaggccttagaacaaggaggattgcccaagaaactaattttttaaagagaacactggacaacattttactactgagggaaatagccaaaaaggcaaataatggaaaaatagtaaacattaagtaaatgctgtagaagtgagtttgtaaatattctacacatgtaaaatatgtaaaactatgggttatttttattaaatgtattttaaaataaaaatttaattctggtttttctgattagagtgcaaaagtgagaaaagttcaatactcttgaaatgtagaattgaaaatgcattagggaaaacttaataaaaattattaccagttatttggaa

SEQ ID NO: 123787 - DNA, 818 bp, Homo sapiens; identical to SEQ ID NO: 123779
  Payload ID: 4292
  Gene Symbol: CDK7
  Gene Name: cyclin-dependent kinase 7
  ENST ID: ENST00000615854
  CDS Start-End: 79-210

SEQ ID NO: 123788 - DNA, 722 bp, Homo sapiens; identical to SEQ ID NO: 123772
  Payload ID: 4292
  Gene Symbol: CDK7
  Gene Name: cyclin-dependent kinase 7
  ENST ID: ENST00000622424
  CDS Start-End: 19-195

SEQ ID NO: 123789 - DNA, 1164 bp, Homo sapiens; identical to SEQ ID NO: 123774
  Payload ID: 4292
  Gene Symbol: CDK7
  Gene Name: cyclin-dependent kinase 7
  ENST ID: ENST00000617026
  CDS Start-End: 65-994

SEQ ID NO: 123790 - DNA, 358 bp, Homo sapiens
  Payload ID: 4292
  Gene Symbol: CDK7
  Gene Name: cyclin-dependent kinase 7
  ENST ID: ENST00000628367
  CDS Start-End: 182-358
ggaacgccaaccgcctgggcctagcgcagcttcctccgcccaccacggaagtgaggcggggatactaaagcgacggagcccagtggacggaagtgggtgttggaggctttaaggtagctttaaattcgtgttgtcctgggagctcgcccttttcggctggagtcgggctttacggcgccggatggctctggacgtgaagtctcgggcaaagcgttatgagaagctggacttccttggggagggacagtttgccaccgtttacaaggccagagataagaacaccaaccaaattgtcgccattaagaaagagtctctgctggtagccactacagctgtgaatgtgctgtgtcatacctga

SEQ ID NO: 123791 - DNA, 358 bp, Homo sapiens
  Payload ID: 4292
  Gene Symbol: CDK7
  Gene Name: cyclin-dependent kinase 7
  ENST ID: ENST00000626796
  CDS Start-End: 182-358
ggaacgccaaccgcctgggcctagcgcagcttcctccgcccaccacggaagtgaggcggggatactaaagcgacggagcccggtggacggaagtgggtgttggaggctttaaggtagctttaaattcgtgttgtcctgggagctcgcccttttcggctggagtcgggctttacggcgccggatggctctggacgtgaagtctcgggcaaagcgttatgagaagctggacttccttggggagggacagtttgccaccgtttacaaggccagagataagaacaccaaccaaattgtcgccattaagaaagagtctctgctggtagccactacagctgtgaatgtgctgtgtcatacctga

SEQ ID NO: 123792 - DNA, 1149 bp, Homo sapiens
  Payload ID: 4292
  Gene Symbol: CDK7
  Gene Name: cyclin-dependent kinase 7
  ENST ID: ENST00000629972
  CDS Start-End: 182-391
ggaacgccaaccgcctgggcctagcgcagcttcctccgcccaccacggaagtgaggcggggatactaaagcgacggagcccagtggacggaagtgggtgttggaggctttaaggtagctttaaattcgtgttgtcctgggagctcgcccttttcggctggagtcgggctttacggcgccggatggctctggacgtgaagtctcgggcaaagcgttatgagaagctggacttccttggggagggacagtttgccaccgtttacaaggccagagataagaacaccaaccaaattgtcgccattaagaaaatcaaacttggacatagatcagaagctaaagatggtggtatcgggcccccgagttactatttggagctaggatgtatggtgtaggtgtggacatgtgggctgttggctgtatattagcagagttacttctaagggttccttttttgccaggagattcagaccttgatcagctaacaagaatatttgaaactttgggcacaccaactgaggaacagtggccggacatgtgtagtcttccagattatgtgacatttaagagtttccctggaatacctttgcatcacatcttcagtgcagcaggagacgacttactagatctcatacaaggcttattcttatttaatccatgtgctcgaattacggccacacaggcactgaaaatgaagtatttcagtaatcggccagggccaacacctggatgtcagctgccaagaccaaactgtccagtggaaaccttaaaggagcaatcaaatccagctttggcaataaaaaggaaaagaacagaggccttagaacaaggaggattgcccaagaaactaattttttaaagagaacactggacaacattttactactgagggaaatagccaaaaaggcaaataatggaaaaatagtaaacattaagtaaatgctgtagaagtgagtttgtaaatattctacacatgtaaaatatgtaaaactatgggttatttttattaaatgtattttaaaataaaaatttaattctggtttttctgattagagtgcaaaagtgagaaaagttcaatactcttgaaatgtagaattgaaaatgcattagggaaaacttaataaaaattattaccagttatttggaagatctg

SEQ ID NO: 123793 - DNA, 1149 bp, Homo sapiens
  Payload ID: 4292
  Gene Symbol: CDK7
  Gene Name: cyclin-dependent kinase 7
  ENST ID: ENST00000629350
  CDS Start-End: 182-391
ggaacgccaaccgcctgggcctagcgcagcttcctccgcccaccacggaagtgaggcggggatactaaagcgacggagcccggtggacggaagtgggtgttggaggctttaaggtagctttaaattcgtgttgtcctgggagctcgcccttttcggctggagtcgggctttacggcgccggatggctctggacgtgaagtctcgggcaaagcgttatgagaagctggacttccttggggagggacagtttgccaccgtttacaaggccagagataagaacaccaaccaaattgtcgccattaagaaaatcaaacttggacatagatcagaagctaaagatggtggtatcgggcccccgagttactatttggagctaggatgtatggtgtaggtgtggacatgtgggctgttggctgtatattagcagagttacttctaagggttccttttttgccaggagattcagaccttgatcagctaacaagaatatttgaaactttgggcacaccaactgaggaacagtggccggacatgtgtagtcttccagattatgtgacatttaagagtttccctggaatacctttgcatcacatcttcagtgcagcaggagacgacttactagatctcatacaaggcttattcttatttaatccatgtgctcgaattacggccacacaggcactgaaaatgaagtatttcagtaatcggccagggccaacacctggatgtcagctgccaagaccaaactgtccagtggaaaccttaaaggagcaatcaaatccagctttggcaataaaaaggaaaagaacagaggccttagaacaaggaggattgcccaagaaactaattttttaaagagaacactggacaacattttactactgagggaaatagccaaaaaggcaaataatggaaaaatagtaaacattaagtaaatgctgtagaagtgagtttgtaaatattctacacatgtaaaatatgtaaaactatgggttatttttattaaatgtattttaaaataaaaatttaattctggtttttctgattagagtgcaaaagtgagaaaagttcaatactcttgaaatgtagaattgaaaatgcattagggaaaacttaataaaaattattaccagttatttggaagatctg

SEQ ID NO: 123794 - DNA, 412 bp, Homo sapiens
  Payload ID: 4292
  Gene Symbol: CDK7
  Gene Name: cyclin-dependent kinase 7
  ENST ID: ENST00000628421
  CDS Start-End: 182-412
ggaacgccaaccgcctgggcctagcgcagcttcctccgcccaccacggaagtgaggcggggatactaaagcgacggagcccggtggacggaagtgggtgttggaggctttaaggtagctttaaattcgtgttgtcctgggagctcgcccttttcggctggagtcgggctttacggcgccggatggctctggacgtgaagtctcgggcaaagcgttatgagaagctggacttccttggggagggacagtttgccaccgtttacaaggccagagataagaacaccaaccaaattgtcgccattaagaaaatcaaacttggacatagatcagaagctaaagatggtataaatagaaccgccttaagagagataaaattattacaggagctaagtcatccaaatataattggtcct

SEQ ID NO: 123795 - DNA, 412 bp, Homo sapiens
  Payload ID: 4292
  Gene Symbol: CDK7
  Gene Name: cyclin-dependent kinase 7
  ENST ID: ENST00000625886
  CDS Start-End: 182-412
ggaacgccaaccgcctgggcctagcgcagcttcctccgcccaccacggaagtgaggcggggatactaaagcgacggagcccagtggacggaagtgggtgttggaggctttaaggtagctttaaattcgtgttgtcctgggagctcgcccttttcggctggagtcgggctttacggcgccggatggctctggacgtgaagtctcgggcaaagcgttatgagaagctggacttccttggggagggacagtttgccaccgtttacaaggccagagataagaacaccaaccaaattgtcgccattaagaaaatcaaacttggacatagatcagaagctaaagatggtataaatagaaccgccttaagagagataaaattattacaggagctaagtcatccaaatataattggtcct

SEQ ID NO: 123796 - DNA, 3055 bp, Homo sapiens
  Payload ID: 4293
  Gene Symbol: CDK8
  Gene Name: cyclin-dependent kinase 8
  Uniprot ID: P49336
  ENST ID: ENST00000381527
  CDS Start-End: 504-1898
cggctgttgtgcggctctgcccttctgtttgagtgtatgggagagtgagtgagtgagtgagtgtgagcgtgtgtgtgagagcgtgaggcgtgagtgcgcgtgtgagaggacgagagcccgcctggccgccccgccgctcccgccgcagcaggagcagaacgcgcggccggagagagcggcggagccggcgcccagggagcccgcggggacaagggcagagacaccgctccccacccccagccctcgtccctcggctctccttcgccgggggatcctccccgttcctccacccccggccggcctctgccccgccgtccccctggatgtccctggcgctttcgcggggcctcctcctgctcttgccgcatcagtcgggctggtgctgcggccggcgggcgtagagcgggcgggttcccgggggctgcggctgcccgtgcttccccggtccccacccctgccccccggccccccgacccagctctccggcctcagaggctgtgacaatggactatgactttaaagtgaagctgagcagcgagcgggagcgggtcgaggacctgtttgaatacgagggctgcaaagttggccgaggcacttatggtcacgtctacaaagccaagaggaaagatgggaaggatgataaagactatgctttaaaacaaatagaaggaactgggatctctatgtcggcatgtagagaaatagcattacttcgagagcttaagcatccaaacgtcatttctcttcaaaaggtgtttctgtctcatgctgataggaaggtgtggcttctgtttgactatgctgaacatgacctctggcatataatcaagtttcacagagcttctaaagcaaacaagaagccagttcagttacctcggggaatggtgaagtcactattatatcagatcctagatggtattcactacctgcatgctaactgggtgttgcacagagatttgaaacctgctaatattttagttatgggtgaaggtcctgagcgaggaagagtaaaaattgctgacatgggctttgcccgattatttaattcacctttgaagcctttagcagatttggatccagtggttgttacattctggtaccgagcccctgaactacttcttggagcaaggcattataccaaagctattgatatttgggctatagggtgtatatttgcagaactactaacgtcagaaccaatatttcactgtcgacaagaggacatcaaaactagtaatccttatcaccatgaccagctggacagaatattcaatgtaatgggatttcctgcagataaagattgggaagatataaaaaagatgcctgaacattcaacattaatgaaagatttcagaagaaatacgtataccaactgcagccttatcaagtatatggaaaaacataaagttaaaccagatagtaaagcattccacttgcttcagaagctgcttaccatggacccaataaagcgaattacctcagaacaggctatgcaggacccctatttcttagaagacccacttcctacatcagacgtttttgccggttgtcaaatcccttacccaaaacgagaatttttaacggaagaagaacctgatgacaaaggagacaaaaagaaccagcagcagcagcagggcaataaccacactaatggaactggccacccagggaatcaagacagcagtcacacacagggacccccgttgaagaaagtgagagttgttcctcctaccactacctcaggtggacttatcatgacctcagactatcagcgttccaatccacatgctgcctatcccaaccctggaccaagcacatcacagccgcagagcagcatgggatactcagctacctcccagcagcctccacagtactcacatcagacacatcggtactgagctgcatcggaatcttgtccatgcactgttgcgaatgctgcagggctgactgtgcagctctctgcgggaacctggtatgggccatgagaatgtactgtacaaccacatcttcaaaatgtccagtagccaagttccaccacttttcacagattggggtagtggcttccaagttgtacctattttggagttagacttgaaaagaaagtgctagcacagtttgtgttgtggatttgctacttccatagtttacttgacatggttcagactgaccaatgcatttttttcagtgacagtctgtagcagttgaagctgtgaatgtgctaggggcaagcatttgtctttgtatgtggtgaattttttcagtgtaacaacattatctgaccaatagtacacacacagacacaaagtttaactggtacttgaaacatacagtatatgttaacgaaataaccaagactcgaaatgagattattttggtacacctttctttttagtgtcttatcagtgggctgattcattttctacattaatcagtgttttctgaccaagaatattgcttggatttttttgaaagtacaaaaagccacatagtttttccagaaaggtttcaaaactcccaaagattaacttccaacttataagtttgtttttattttcaatctatgacttgactggtattaaagctgctatttgatagtaattaaatatgttgtcattgatataaacctgtttggttcagcaaacaaactaaaatgattgtcatagacagtgttttatttttcctgttggtgttgctgatttgtgagcatgctttaagatgaaaaaagcatgaatgataacttccttaaaaaggtgcggcatccaattcaaatattttcgtcctgattttaaagctggttggtgtagtgctattaaaatttcgttcagttaattttccttttgaaaacttgttcgcacgttgtttagggtgcccttacttcagcaaaggagaaggagtaggagagccttagaatttttgaggaaaaaaaaacctataacatacaatgtactgtatcaaactattttacatgaatgacacaagtattctgaataaaaaataattgaacattgttaaaaacaaggtgttatgtaataaatttatttttcataaatcaaaa

SEQ ID NO: 123797 - DNA, 3032 bp, Homo sapiens
  Payload ID: 4293
  Gene Symbol: CDK8
  Gene Name: cyclin-dependent kinase 8
  ENST ID: ENST00000536792
  CDS Start-End: 539-1033
gagtgccctccctcctcctctctttgaggaggtaccggctgttgtgcggctctgcccttctgtttgagtgtatgggagagtgagtgagtgagtgagtgtgagcgtgtgtgtgagagcgtgaggcgtgagtgcgcgtgtgagaggacgagagcccgcctggccgccccgccgctcccgccgcagcaggagcagaacgcgcggccggagagagcggcggagccggcgcccagggagcccgcggggacaagggcagagacaccgctccccacccccagccctcgtccctcggctctccttcgccgggggatcctccccgttcctccacccccggccggcctctgccccgccgtccccctggatgtccctggcgctttcgcggggcctcctcctgctcttgccgcatcagtcgggctggtgctgcggccggcgggcgtagagcgggcgggttcccgggggctgcggctgcccgtgcttccccggtccccacccctgccccccggccccccgacccagctctccggcctcagaggctgtgacaatggactatgactttaaagtgaagctgagcagcgagcgggagcgggtcgaggacctgtttgaatacgagggctgcaaagttggccgaggcacttatggtcacgtctacaaagccaagaggaaagatgggaaggatgataaagactatgctttaaaacaaatagaaggaactgggatctctatgtcggcatgtagagaaatagcattacttcgagagcttaagcatccaaacgtcatttctcttcaaaaggtgtttctgtctcatgctgataggaaggtgtggcttctgtttgactatgctgaacatgacctctggcatataatcaagtttcacagagcttctaaagcaaacaagaagccagttcagttacctcggggaatggtgaagtcactattatatcagatcctagatggtattcactacctgcatgctaactgggtgttgcacagagatttgctgacatgggctttgcccgattatttaattcacctttgaagcctttagcagatttggatccagtggttgttacattctggtaccgagcccctgaactacttcttggagcaaggcattataccaaagctattgatatttgggctatagggtgtatatttgcagaactactaacgtcagaaccaatatttcactgtcgacaagaggacatcaaaactagtaatccttatcaccatgaccagctggacagaatattcaatgtaatgggatttcctgcagataaagattgggaagatataaaaaagatgcctgaacattcaacattaatgaaagatttcagaagaaatacgtataccaactgcagccttatcaagtatatggaaaaacataaagttaaaccagatagtaaagcattccacttgcttcagaagctgcttaccatggacccaataaagcgaattacctcagaacaggctatgcaggacccctatttcttagaagacccacttcctacatcagacgtttttgccggttgtcaaatcccttacccaaaacgagaatttttaacggaagaagaacctgatgacaaaggagacaaaaagaaccagcagcagcagcagggcaataaccacactaatggaactggccacccagggaatcaagacagcagtcacacacagggacccccgttgaagaaagtgagagttgttcctcctaccactacctcaggtggacttatcatgacctcagactatcagcgttccaatccacatgctgcctatcccaaccctggaccaagcacatcacagccgcagagcagcatgggatactcagctacctcccagcagcctccacagtactcacatcagacacatcggtactgagctgcatcggaatcttgtccatgcactgttgcgaatgctgcagggctgactgtgcagctctctgcgggaacctggtatgggccatgagaatgtactgtacaaccacatcttcaaaatgtccagtagccaagttccaccacttttcacagattggggtagtggcttccaagttgtacctattttggagttagacttgaaaagaaagtgctagcacagtttgtgttgtggatttgctacttccatagtttacttgacatggttcagactgaccaatgcatttttttcagtgacagtctgtagcagttgaagctgtgaatgtgctaggggcaagcatttgtctttgtatgtggtgaattttttcagtgtaacaacattatctgaccaatagtacacacacagacacaaagtttaactggtacttgaaacatacagtatatgttaacgaaataaccaagactcgaaatgagattattttggtacacctttctttttagtgtcttatcagtgggctgattcattttctacattaatcagtgttttctgaccaagaatattgcttggatttttttgaaagtacaaaaagccacatagtttttccagaaaggtttcaaaactcccaaagattaacttccaacttataagtttgtttttattttcaatctatgacttgactggtattaaagctgctatttgatagtaattaaatatgttgtcattgatataaacctgtttggttcagcaaacaaactaaaatgattgtcatagacagtgttttatttttcctgttggtgttgctgatttgtgagcatgctttaagatgaaaaaagcatgaatgataacttccttaaaaaggtgcggcatccaattcaaatattttcgtcctgattttaaagctggttggtgtagtgctattaaaatttcgttcagttaattttccttttgaaaacttgttcgcacgttgtttagggtgcccttacttcagcaaaggagaaggagtaggagagccttagaatttttgaggaaaaaaaaacctataacatacaatgtactgtatcaaactattttacatgaatgacacaagtattctgaataaaaaataattgaacattgttaaaaacaaggtgttatgtaataaatttatttttcataaatcaaaa

SEQ ID NO: 123798 - DNA, 795 bp, Homo sapiens
  Payload ID: 4293
  Gene Symbol: CDK8
  Gene Name: cyclin-dependent kinase 8
  ENST ID: ENST00000625988
  CDS Start-End: 1-446
ataaagattgggaagatataaaaaagatgcctgaacattcaacattaatgaaagatttcagaagaaatacgtataccaactgcagccttatcaagtatatggaaaaacataaagttaaaccagatagtaaagcattccacttgcttcagaagctgcttaccatggacccaataaagcgaattacctcagaacaggctatgcaggacccctatttcttagaagacccacttcctacatcagacgtttttgccggttgtcaaatcccttacccaaaacgagaatttttaacggaagaagaacctgatgacaaaggagacaaacgttccaatccacatgctgcctatcccaaccctggaccaagcacatcacagccgcagagcagcatgggatactcagctacctcccagcagcctccacagtactcacatcagacacatcggtactgagctgcatcggaatcttgtccatgcactgttgcgaatgctgcagggctgactgtgcagctctctgcgggaacctggtatgggccatgagaatgtactgtacaaccacatcttcaaaatgtccagtagccaagttccaccacttttcacagattggggtagtggcttccaagttgtacctattttggagttagacttgaaaagaaagtgctagcacagtttgtgttgtggatttgctacttccatagtttacttgacatggttcagactgaccaatgcatttttttcagtgacagtctgtagcagttgaagctgtgaatgtgctaggggcaagcatttgtctttgtatgtg

SEQ ID NO: 123799 - DNA, 586 bp, Homo sapiens
  Payload ID: 4293
  Gene Symbol: CDK8
  Gene Name: cyclin-dependent kinase 8
  ENST ID: ENST00000465820
  CDS Start-End: 1-586
ctgacatgggctttgcccgattatttaattcacctttgaagcctttagcagatttggatccagtggttgttacattctggtaccgagcccctgaactacttcttggagcaaggcattataccaaagctattgataaagattgggaagatataaaaaagatgcctgaacattcaacattaatgaaagatttcagaagaaatacgtataccaactgcagccttatcaagtatatggaaaaacataaagttaaaccagatagtaaagcattccacttgcttcagaagctgcttaccatggacccaataaagcgaattacctcagaacaggctatgcaggacccctatttcttagaagacccacttcctacatcagacgtttttgccggttgtcaaatcccttacccaaaacgagaatttttaacggaagaagaacctgatgacaaaggagacaaaaagaaccagcagcagcagcagggcaataaccacactaatggaactggccacccagggaatcaagacagcagtcacacacagggacccccgttgaagaaagtgagagttgttcctcctaccactacctcaggtgg

SEQ ID NO: 123800 - DNA, 2463 bp, Homo sapiens
  Payload ID: 4294
  Gene Symbol: CDK9
  Gene Name: cyclin-dependent kinase 9
  Uniprot ID: P50750
  ENST ID: ENST00000373264
  CDS Start-End: 101-1219
gcgcggccgcggaggggcctggagtgcggcggcggcgggacccggagcaggagcggcggcagcagcgactgggggcggcggcggcgcgttggaggcggccatggcaaagcagtacgactcggtggagtgccctttttgtgatgaagtttccaaatacgagaagctcgccaagatcggccaaggcaccttcggggaggtgttcaaggccaggcaccgcaagaccggccagaaggtggctctgaagaaggtgctgatggaaaacgagaaggaggggttccccattacagccttgcgggagatcaagatccttcagcttctaaaacacgagaatgtggtcaacttgattgagatttgtcgaaccaaagcttccccctataaccgctgcaagggtagtatatacctggtgttcgacttctgcgagcatgaccttgctgggctgttgagcaatgttttggtcaagttcacgctgtctgagatcaagagggtgatgcagatgctgcttaacggcctctactacatccacagaaacaagatcctgcatagggacatgaaggctgctaatgtgcttatcactcgtgatggggtcctgaagctggcagactttgggctggcccgggccttcagcctggccaagaacagccagcccaaccgctacaccaaccgtgtggtgacactctggtaccggcccccggagctgttgctcggggagcgggactacggcccccccattgacctgtggggtgctgggtgcatcatggcagagatgtggacccgcagccccatcatgcagggcaacacggagcagcaccaactcgccctcatcagtcagctctgcggctccatcacccctgaggtgtggccaaacgtggacaactatgagctgtacgaaaagctggagctggtcaagggccagaagcggaaggtgaaggacaggctgaaggcctatgtgcgtgacccatacgcactggacctcatcgacaagctgctggtgctggaccctgcccagcgcatcgacagcgatgacgccctcaaccacgacttcttctggtccgaccccatgccctccgacctcaagggcatgctctccacccacctgacgtccatgttcgagtacttggcaccaccgcgccggaagggcagccagatcacccagcagtccaccaaccagagtcgcaatcccgccaccaccaaccagacggagtttgagcgcgtcttctgagggccggcgcttgccactagggctcttgtgttttttttcttctgctatgtgacttgcatcgtggagacagggcatttgagtttatatctctcatgcatattttatttaatccccaccctgggctctgggagcagcccgctgagtggactggagtggagcattggctgagagaccaggagggcactggagctgtcttgtccttgctggttttctggatggttcccagagggtttccatggggtaggaggatgggctcgcccaccagtgactttttctaagagctcccggcgtggtggaagaggggacaggtccctcacccacccacaatcctattctcgggctgagaaccctgcgtggggacagggctcgcctcaggaatgggctgtttttggcctaaccctcagaaacactggggctggcacaaactcttggtttcttcaacaggagaattttactgtgtttcttttggttccattgtttggagacattcctgggcacagtttggtccgttagaattaaaagttgaattttttttttttttaaatttttttttttcctccaggacttgtgtgttttgttctgcgcacacaccgccaactgttcccccacagtcagcagcaggttgggcctgaccattgggacttgattgtcaagtcactggaggtcttgacttttttatctcagttcatgttctcttccataattggaaaggacctttgtctgtttttcctcttgggtgccttccagaacgcatctcatgtccctggtgagggaattggtgagggcctgctgtgagctgctgtggctgcgatggtcacccagctgggcaaatcactggagtgacaatttgacctgtcacctgagaaggatggtccctcagactgctgggtagagggcctggggcaggctggagagagaaagtgggcagagggtgaagggatcacaggggtcttggaaggtggcagtagtttggacgggggtggggagtatgtgggagaaaaaaacagactgaaggtagaatccttgggaacctttgaggagcggcacattctggcaggcacgttttctgtgagcctgaagttaggaagagacattctggaggtcaatttcctacatcctcttacaggcggagaccttgaagtggggccaggaaggaaggttggcaaaacctttgaccagaactgtccttcatttacagaaactgacccagaccacaacacaaaaggccagtaaaagtaagaaaa

SEQ ID NO: 123801 - DNA, 702 bp, Homo sapiens
  Payload ID: 4294
  Gene Symbol: CDK9
  Gene Name: cyclin-dependent kinase 9
  ENST ID: ENST00000421939
  CDS Start-End: 120-702
cgccccgcgcagcccggcggaggcggcgccgtcggaggaggaggagcagggcactgcggctggccccggatcgggcgccagagcggcagcagcttcggcagcagcggcggcccgggcccatgcagcgggacgcgccaccccgagccccagctccggcgccccggctccccgcgcccccgatcggggccgccgctagtagtggcggcggcggaggcgggggcagcggcggcggcggcggaggcgcctctgcagctccggctccccctggcctctcgggaactacaagtcccagggggcctggcggtgggcggcgggcggaagaggcggggtcggcgccgcgaggccggaagtggccgtggaggcggaagtggcgcggccgcggaggggcctggagtgcggcggcggcgggacccggagcaggagcggcggcagcagcgactgggggcggcggcggcgcgttggaggcggccatggcaaagcagtacgactcggtggagtgccctttttgtgatgaagtttccaaatacgagaagctcgccaagatcggccaaggcaccttcggggaggtgttcaaggccaggcaccgcaagaccggccagaaggtggctctgaagaaggtgctgatggaaaacgagaaggaggggttccccattacagccttgcgggagatcaagatccttcagcttctaaaacacgagaatg

SEQ ID NO: 123802 - DNA, 2180 bp, Homo sapiens
  Payload ID: 4295
  Gene Symbol: CDKN1A
  Gene Name: cyclin-dependent kinase inhibitor 1A (p21, Cip1)
  Uniprot ID: P38936
  ENST ID: ENST00000244741
  CDS Start-End: 147-641
gaggcgggcccgggcggggcggttgtatatcagggccgcgctgagctgcgccagctgaggtgtgagcagctgccgaagtcagttccttgtggagccggagctgggcgcggattcgccgaggcaccgaggcactcagaggaggcgccatgtcagaaccggctggggatgtccgtcagaacccatgcggcagcaaggcctgccgccgcctcttcggcccagtggacagcgagcagctgagccgcgactgtgatgcgctaatggcgggctgcatccaggaggcccgtgagcgatggaacttcgactttgtcaccgagacaccactggagggtgacttcgcctgggagcgtgtgcggggccttggcctgcccaagctctaccttcccacggggccccggcgaggccgggatgagttgggaggaggcaggcggcctggcacctcacctgctctgctgcaggggacagcagaggaagaccatgtggacctgtcactgtcttgtacccttgtgcctcgctcaggggagcaggctgaagggtccccaggtggacctggagactctcagggtcgaaaacggcggcagaccagcatgacagatttctaccactccaaacgccggctgatcttctccaagaggaagccctaatccgcccacaggaagcctgcagtcctggaagcgcgagggcctcaaaggcccgctctacatcttctgccttagtctcagtttgtgtgtcttaattattatttgtgttttaatttaaacacctcctcatgtacataccctggccgccccctgccccccagcctctggcattagaattatttaaacaaaaactaggcggttgaatgagaggttcctaagagtgctgggcatttttattttatgaaatactatttaaagcctcctcatcccgtgttctccttttcctctctcccggaggttgggtgggccggcttcatgccagctacttcctcctccccacttgtccgctgggtggtaccctctggaggggtgtggctccttcccatcgctgtcacaggcggttatgaaattcaccccctttcctggacactcagacctgaattctttttcatttgagaagtaaacagatggcactttgaaggggcctcaccgagtgggggcatcatcaaaaactttggagtcccctcacctcctctaaggttgggcagggtgaccctgaagtgagcacagcctagggctgagctggggacctggtaccctcctggctcttgatacccccctctgtcttgtgaaggcagggggaaggtggggtcctggagcagaccaccccgcctgccctcatggcccctctgacctgcactggggagcccgtctcagtgttgagccttttccctctttggctcccctgtaccttttgaggagccccagctaccctttttctccagctgggctctgcaattcccctctgctgctgtccctcccccttgtcctttcccttcagtaccctctcagctccaggtggctctgaggtgcctgtcccacccccacccccagctcaatggactggaaggggaagggacacacaagaagaagggcaccctagttctacctcaggcagctcaagcagcgaccgccccctcctctagctgtgggggtgagggtcccatgtggtggcacaggcccccttgagtggggttatctctgtgttaggggtatatgatgggggagtagatctttctaggagggagacactggcccctcaaatcgtccagcgaccttcctcatccaccccatccctccccagttcattgcactttgattagcagcggaacaaggagtcagacattttaagatggtggcagtagaggctatggacagggcatgccacgtgggctcatatggggctgggagtagttgtctttcctggcactaacgttgagcccctggaggcactgaagtgcttagtgtacttggagtattggggtctgaccccaaacaccttccagctcctgtaacatactggcctggactgttttctctcggctccccatgtgtcctggttcccgtttctccacctagactgtaaacctctcgagggcagggaccacaccctgtactgttctgtgtctttcacagctcctcccacaatgctgaatatacagcaggtgctcaataaatgattcttagtgactttacttgtaa

SEQ ID NO: 123803 - DNA, 793 bp, Homo sapiens
  Payload ID: 4295
  Gene Symbol: CDKN1A
  Gene Name: cyclin-dependent kinase inhibitor 1A (p21, Cip1)
  Uniprot ID: P38936
  ENST ID: ENST00000373711
  CDS Start-End: 175-669
gagcagctgccgaagtcagttccttgtggagccggagctgggcgcggattcgccgaggcaccgaggcactcagaggagaaactgcaagttgggacttgtccctaggaaaatccagttgctgccaaggtcgtgcagtcactcagccctggagtcaagccagagcaggcaggcgccatgtcagaaccggctggggatgtccgtcagaacccatgcggcagcaaggcctgccgccgcctcttcggcccagtggacagcgagcagctgagccgcgactgtgatgcgctaatggcgggctgcatccaggaggcccgtgagcgatggaacttcgactttgtcaccgagacaccactggagggtgacttcgcctgggagcgtgtgcggggccttggcctgcccaagctctaccttcccacggggccccggcgaggccgggatgagttgggaggaggcaggcggcctggcacctcacctgctctgctgcaggggacagcagaggaagaccatgtggacctgtcactgtcttgtacccttgtgcctcgctcaggggagcaggctgaagggtccccaggtggacctggagactctcagggtcgaaaacggcggcagaccagcatgacagatttctaccactccaaacgccggctgatcttctccaagaggaagccctaatccgcccacaggaagcctgcagtcctggaagcgcgagggcctcaaaggcccgctctacatcttctgccttagtctcagtttgtgtgtcttaattattatttgtgttttaatttaaacacctcct

SEQ ID NO: 123804 - DNA, 2267 bp, Homo sapiens
  Payload ID: 4295
  Gene Symbol: CDKN1A
  Gene Name: cyclin-dependent kinase inhibitor 1A (p21, Cip1)
  Uniprot ID: P38936
  ENST ID: ENST00000405375
  CDS Start-End: 236-730
agctgaggtgtgagcagctgccgaagtcagttccttgtggagccggagctgggcgcggattcgccgaggcaccgaggcactcagaggaggtgagagagcggcggcagacaacaggggaccccgggccggcggcccagagccgagccaagcgtgcccgcgtgtgtccctgcgtgtccgcgaggatgcgtgttcgcgggtgtgtgctgcgttcacaggtgtttctgcggcaggcgccatgtcagaaccggctggggatgtccgtcagaacccatgcggcagcaaggcctgccgccgcctcttcggcccagtggacagcgagcagctgagccgcgactgtgatgcgctaatggcgggctgcatccaggaggcccgtgagcgatggaacttcgactttgtcaccgagacaccactggagggtgacttcgcctgggagcgtgtgcggggccttggcctgcccaagctctaccttcccacggggccccggcgaggccgggatgagttgggaggaggcaggcggcctggcacctcacctgctctgctgcaggggacagcagaggaagaccatgtggacctgtcactgtcttgtacccttgtgcctcgctcaggggagcaggctgaagggtccccaggtggacctggagactctcagggtcgaaaacggcggcagaccagcatgacagatttctaccactccaaacgccggctgatcttctccaagaggaagccctaatccgcccacaggaagcctgcagtcctggaagcgcgagggcctcaaaggcccgctctacatcttctgccttagtctcagtttgtgtgtcttaattattatttgtgttttaatttaaacacctcctcatgtacataccctggccgccccctgccccccagcctctggcattagaattatttaaacaaaaactaggcggttgaatgagaggttcctaagagtgctgggcatttttattttatgaaatactatttaaagcctcctcatcccgtgttctccttttcctctctcccggaggttgggtgggccggcttcatgccagctacttcctcctccccacttgtccgctgggtggtaccctctggaggggtgtggctccttcccatcgctgtcacaggcggttatgaaattcaccccctttcctggacactcagacctgaattctttttcatttgagaagtaaacagatggcactttgaaggggcctcaccgagtgggggcatcatcaaaaactttggagtcccctcacctcctctaaggttgggcagggtgaccctgaagtgagcacagcctagggctgagctggggacctggtaccctcctggctcttgatacccccctctgtcttgtgaaggcagggggaaggtggggtcctggagcagaccaccccgcctgccctcatggcccctctgacctgcactggggagcccgtctcagtgttgagccttttccctctttggctcccctgtaccttttgaggagccccagctaccctttttctccagctgggctctgcaattcccctctgctgctgtccctcccccttgtcctttcccttcagtaccctctcagctccaggtggctctgaggtgcctgtcccacccccacccccagctcaatggactggaaggggaagggacacacaagaagaagggcaccctagttctacctcaggcagctcaagcagcgaccgccccctcctctagctgtgggggtgagggtcccatgtggtggcacaggcccccttgagtggggttatctctgtgttaggggtatatgatgggggagtagatctttctaggagggagacactggcccctcaaatcgtccagcgaccttcctcatccaccccatccctccccagttcattgcactttgattagcagcggaacaaggagtcagacattttaagatggtggcagtagaggctatggacagggcatgccacgtgggctcatatggggctgggagtagttgtctttcctggcactaacgttgagcccctggaggcactgaagtgcttagtgtacttggagtattggggtctgaccccaaacaccttccagctcctgtaacatactggcctggactgttttctctcggctccccatgtgtcctggttcccgtttctccacctagactgtaaacctctcgagggcagggaccacaccctgtactgttctgtgtctttcacagctcctcccacaatgctgaatatacagcaggtgctcaataaatgattcttagtgactttacttgt

SEQ ID NO: 123805 - DNA, 2104 bp, Homo sapiens
  Payload ID: 4295
  Gene Symbol: CDKN1A
  Gene Name: cyclin-dependent kinase inhibitor 1A (p21, Cip1)
  Uniprot ID: P38936
  ENST ID: ENST00000448526
  CDS Start-End: 73-567
ggtggctattttgtccttgggctgcctgttttcagctgctgcaaccacagggatttcttctgttcaggcgccatgtcagaaccggctggggatgtccgtcagaacccatgcggcagcaaggcctgccgccgcctcttcggcccagtggacagcgagcagctgagccgcgactgtgatgcgctaatggcgggctgcatccaggaggcccgtgagcgatggaacttcgactttgtcaccgagacaccactggagggtgacttcgcctgggagcgtgtgcggggccttggcctgcccaagctctaccttcccacggggccccggcgaggccgggatgagttgggaggaggcaggcggcctggcacctcacctgctctgctgcaggggacagcagaggaagaccatgtggacctgtcactgtcttgtacccttgtgcctcgctcaggggagcaggctgaagggtccccaggtggacctggagactctcagggtcgaaaacggcggcagaccagcatgacagatttctaccactccaaacgccggctgatcttctccaagaggaagccctaatccgcccacaggaagcctgcagtcctggaagcgcgagggcctcaaaggcccgctctacatcttctgccttagtctcagtttgtgtgtcttaattattatttgtgttttaatttaaacacctcctcatgtacataccctggccgccccctgccccccagcctctggcattagaattatttaaacaaaaactaggcggttgaatgagaggttcctaagagtgctgggcatttttattttatgaaatactatttaaagcctcctcatcccgtgttctccttttcctctctcccggaggttgggtgggccggcttcatgccagctacttcctcctccccacttgtccgctgggtggtaccctctggaggggtgtggctccttcccatcgctgtcacaggcggttatgaaattcaccccctttcctggacactcagacctgaattctttttcatttgagaagtaaacagatggcactttgaaggggcctcaccgagtgggggcatcatcaaaaactttggagtcccctcacctcctctaaggttgggcagggtgaccctgaagtgagcacagcctagggctgagctggggacctggtaccctcctggctcttgatacccccctctgtcttgtgaaggcagggggaaggtggggtcctggagcagaccaccccgcctgccctcatggcccctctgacctgcactggggagcccgtctcagtgttgagccttttccctctttggctcccctgtaccttttgaggagccccagctaccctttttctccagctgggctctgcaattcccctctgctgctgtccctcccccttgtcctttcccttcagtaccctctcagctccaggtggctctgaggtgcctgtcccacccccacccccagctcaatggactggaaggggaagggacacacaagaagaagggcaccctagttctacctcaggcagctcaagcagcgaccgccccctcctctagctgtgggggtgagggtcccatgtggtggcacaggcccccttgagtggggttatctctgtgttaggggtatatgatgggggagtagatctttctaggagggagacactggcccctcaaatcgtccagcgaccttcctcatccaccccatccctccccagttcattgcactttgattagcagcggaacaaggagtcagacattttaagatggtggcagtagaggctatggacagggcatgccacgtgggctcatatggggctgggagtagttgtctttcctggcactaacgttgagcccctggaggcactgaagtgcttagtgtacttggagtattggggtctgaccccaaacaccttccagctcctgtaacatactggcctggactgttttctctcggctccccatgtgtcctggttcccgtttctccacctagactgtaaacctctcgagggcagggaccacaccctgtactgttctgtgtctttcacagctcctcccacaatgctgaatatacagcaggtgctcaataaatgattcttagtgactttacttgt

SEQ ID NO: 123806 - DNA, 2102 bp, Homo sapiens
  Payload ID: 4295
  Gene Symbol: CDKN1A
  Gene Name: cyclin-dependent kinase inhibitor 1A (p21, Cip1)
  Uniprot ID: P38936
  ENST ID: ENST00000615513
  CDS Start-End: 71-565
aacatgttgagctctggcatagaagaggctggtggctattttgtccttgggctgcctgttttcaggcgccatgtcagaaccggctggggatgtccgtcagaacccatgcggcagcaaggcctgccgccgcctcttcggcccagtggacagcgagcagctgagccgcgactgtgatgcgctaatggcgggctgcatccaggaggcccgtgagcgatggaacttcgactttgtcaccgagacaccactggagggtgacttcgcctgggagcgtgtgcggggccttggcctgcccaagctctaccttcccacggggccccggcgaggccgggatgagttgggaggaggcaggcggcctggcacctcacctgctctgctgcaggggacagcagaggaagaccatgtggacctgtcactgtcttgtacccttgtgcctcgctcaggggagcaggctgaagggtccccaggtggacctggagactctcagggtcgaaaacggcggcagaccagcatgacagatttctaccactccaaacgccggctgatcttctccaagaggaagccctaatccgcccacaggaagcctgcagtcctggaagcgcgagggcctcaaaggcccgctctacatcttctgccttagtctcagtttgtgtgtcttaattattatttgtgttttaatttaaacacctcctcatgtacataccctggccgccccctgccccccagcctctggcattagaattatttaaacaaaaactaggcggttgaatgagaggttcctaagagtgctgggcatttttattttatgaaatactatttaaagcctcctcatcccgtgttctccttttcctctctcccggaggttgggtgggccggcttcatgccagctacttcctcctccccacttgtccgctgggtggtaccctctggaggggtgtggctccttcccatcgctgtcacaggcggttatgaaattcaccccctttcctggacactcagacctgaattctttttcatttgagaagtaaacagatggcactttgaaggggcctcaccgagtgggggcatcatcaaaaactttggagtcccctcacctcctctaaggttgggcagggtgaccctgaagtgagcacagcctagggctgagctggggacctggtaccctcctggctcttgatacccccctctgtcttgtgaaggcagggggaaggtggggtcctggagcagaccaccccgcctgccctcatggcccctctgacctgcactggggagcccgtctcagtgttgagccttttccctctttggctcccctgtaccttttgaggagccccagctaccctttttctccagctgggctctgcaattcccctctgctgctgtccctcccccttgtcctttcccttcagtaccctctcagctccaggtggctctgaggtgcctgtcccacccccacccccagctcaatggactggaaggggaagggacacacaagaagaagggcaccctagttctacctcaggcagctcaagcagcgaccgccccctcctctagctgtgggggtgagggtcccatgtggtggcacaggcccccttgagtggggttatctctgtgttaggggtatatgatgggggagtagatctttctaggagggagacactggcccctcaaatcgtccagcgaccttcctcatccaccccatccctccccagttcattgcactttgattagcagcggaacaaggagtcagacattttaagatggtggcagtagaggctatggacagggcatgccacgtgggctcatatggggctgggagtagttgtctttcctggcactaacgttgagcccctggaggcactgaagtgcttagtgtacttggagtattggggtctgaccccaaacaccttccagctcctgtaacatactggcctggactgttttctctcggctccccatgtgtcctggttcccgtttctccacctagactgtaaacctctcgagggcagggaccacaccctgtactgttctgtgtctttcacagctcctcccacaatgctgaatatacagcaggtgctcaataaatgattcttagtgactttacttgt

SEQ ID NO: 123807 - DNA, 2657 bp, Homo sapiens
  Payload ID: 4296
  Gene Symbol: CDKN1B
  Gene Name: cyclin-dependent kinase inhibitor 1B (p27, Kip1)
  Uniprot ID: P46527
  ENST ID: ENST00000228872
  CDS Start-End: 717-1313
tttaatttctccgaggccagccagagcaggtttgttggcagcagtacccctccagcagtcacgcgaccagccaatctcccggcggcgctcggggaggcggcgcgctcgggaacgaggggaggtggcggaaccgcgccggggccaccttaaggccgcgctcgccagcctcggcggggcggctcccgccgccgcaaccaatggatctcctcctctgtttaaatagactcgccgtgtcaatcattttcttcttcgtcagcctcccttccaccgccatattgggccactaaaaaaagggggctcgtcttttcggggtgtttttctccccctcccctgtccccgcttgctcacggctctgcgactccgacgccggcaaggtttggagagcggctgggttcgcgggacccgcgggcttgcacccgcccagactcggacgggctttgccaccctctccgcttgcctggtcccctctcctctccgccctcccgctcgccagtccatttgatcagcggagactcggcggccgggccggggcttccccgcagcccctgcgcgctcctagagctcgggccgtggctcgtcggggtctgtgtcttttggctccgagggcagtcgctgggcttccgagaggggttcgggctgcgtaggggcgctttgttttgttcggttttgtttttttgagagtgcgagagaggcggtcgtgcagacccgggagaaagatgtcaaacgtgcgagtgtctaacgggagccctagcctggagcggatggacgccaggcaggcggagcaccccaagccctcggcctgcaggaacctcttcggcccggtggaccacgaagagttaacccgggacttggagaagcactgcagagacatggaagaggcgagccagcgcaagtggaatttcgattttcagaatcacaaacccctagagggcaagtacgagtggcaagaggtggagaagggcagcttgcccgagttctactacagacccccgcggccccccaaaggtgcctgcaaggtgccggcgcaggagagccaggatgtcagcgggagccgcccggcggcgcctttaattggggctccggctaactctgaggacacgcatttggtggacccaaagactgatccgtcggacagccagacggggttagcggagcaatgcgcaggaataaggaagcgacctgcaaccgacgattcttctactcaaaacaaaagagccaacagaacagaagaaaatgtttcagacggttccccaaatgccggttctgtggagcagacgcccaagaagcctggcctcagaagacgtcaaacgtaaacagctcgaattaagaatatgtttccttgtttatcagatacatcactgcttgatgaagcaaggaagatatacatgaaaattttaaaaatacatatcgctgacttcatggaatggacatcctgtataagcactgaaaaacaacaacacaataacactaaaattttaggcactcttaaatgatctgcctctaaaagcgttggatgtagcattatgcaattaggtttttccttatttgcttcattgtactacctgtgtatatagtttttaccttttatgtagcacataaactttggggaagggagggcagggtggggctgaggaactgacgtggagcggggtatgaagagcttgctttgatttacagcaagtagataaatatttgacttgcatgaagagaagcaattttggggaagggtttgaattgttttctttaaagatgtaatgtccctttcagagacagctgatacttcatttaaaaaaatcacaaaaatttgaacactggctaaagataattgctatttatttttacaagaagtttattctcatttgggagatctggtgatctcccaagctatctaaagtttgttagatagctgcatgtggcttttttaaaaaagcaacagaaacctatcctcactgccctccccagtctctcttaaagttggaatttaccagttaattactcagcagaatggtgatcactccaggtagtttggggcaaaaatccgaggtgcttgggagttttgaatgttaagaattgaccatctgcttttattaaatttgttgacaaaattttctcattttcttttcacttcgggctgtgtaaacacagtcaaaataattctaaatccctcgatatttttaaagatctgtaagtaacttcacattaaaaaatgaaatattttttaatttaaagcttactctgtccatttatccacaggaaagtgttatttttcaaggaaggttcatgtagagaaaagcacacttgtaggataagtgaaatggatactacatctttaaacagtatttcattgcctgtgtatggaaaaaccatttgaagtgtacctgtgtacataactctgtaaaaacactgaaaaattatactaacttatttatgttaaaagattttttttaatctagacaatatacaagccaaagtggcatgttttgtgcatttgtaaatgctgtgttgggtagaataggttttcccctcttttgttaaataatatggctatgcttaaaaggttgcatactgagccaagtataattttttgtaatgtgtgaaaaagatgccaattattgttacacattaagtaatcaataaagaaaacttccatagctatt

SEQ ID NO: 123808 - DNA, 897 bp, Homo sapiens
  Payload ID: 4296
  Gene Symbol: CDKN1B
  Gene Name: cyclin-dependent kinase inhibitor 1B (p27, Kip1)
  ENST ID: ENST00000396340
  CDS Start-End: 19-636
tgcagacccgggagaaagatgtcaaacgtgcgagtgtctaacgggagccctagcctggagcggatggacgccaggcaggcggagcaccccaagccctcggcctgcaggaacctcttcggcccggtggaccacgaagagttaacccgggacttggagaagcactgcagagacatggaagaggcgagccagcgcaagtggaatttcgattttcagaatcacaaacccctagagggcaagtacgagtggcaagaggtggagaagggcagcttgcccgagttctactacagacccccgcggccccccaaaggtgcctgcaaggtgccggcgcaggagagccaggatgtcagcgggagccgcccggcggcgcctttaattggggctccggctaactctgaggacacgcatttggtggacccaaagactgatccgtcggacagccagacggggttagcggagcaatgcgcaggaataaggaagcgacctgcaaccgacgatacatcactgcttgatgaagcaaggaagatatacatgaaaattttaaaaatacatatcgctgacttcatggaatggacatcctgtataagcactgaaaaacaacaacacaataacactaaaattttaggcactcttaaatgatctgcctctaaaagcgttggatgtagcattatgcaattaggtttttccttatttgcttcattgtactacctgtgtatatagtttttaccttttatgtagcacataaactttggggaagggagggcagggtggggctgaggaactgacgtggagcggggtatgaagagcttgctttgatttacagcaagtagataaatatttgacttgcatgaagagaagcaattttggggaagggtttgaattgttttctttaaagatgta

SEQ ID NO: 123809 - DNA, 577 bp, Homo sapiens
  Payload ID: 4296
  Gene Symbol: CDKN1B
  Gene Name: cyclin-dependent kinase inhibitor 1B (p27, Kip1)
  ENST ID: ENST00000442489
  CDS Start-End: 1-315
aacgggagccctagcctggagcggatggacgccaggcaggcggagcaccccaagccctcggcctgcaggaacctcttcggcccggtggaccacgaagagttaacccgggacttggagaagcactgcagagacatggaagaggcgagccagcgcaagtggaatttcgattttcagaatcacaaacccctagaggattcttctactcaaaacaaaagagccaacagaacagaagaaaatgtttcagacggttccccaaatgccggttctgtggagcagacgcccaagaagcctggcctcagaagacgtcaaacgtaaacagctcgaattaagaatatgtttccttgtttatcagatacatcactgcttgatgaagcaaggaagatatacatgaaaattttaaaaatacatatcgctgacttcatggaatggacatcctgtataagcactgaaaaacaacaacacaataacactaaaattttaggcactcttaaatgatctgcctctaaaagcgttggatgtagcattatgcaattaggtttttccttatttgcttcattgtactacctgtgtatatagt

SEQ ID NO: 123810 - DNA, 1811 bp, Homo sapiens
  Payload ID: 4297
  Gene Symbol: CDKN1C
  Gene Name: cyclin-dependent kinase inhibitor 1C (p57, Kip2)
  ENST ID: ENST00000313407
  CDS Start-End: 191-1108
cccgcgcgtataaagggggcgcaggcgggctgggcgttccacaggccaagtgcgctgtgctcgaggggtgccggccaggcctgagcgagcgagctagccagcaggcatcgagggggcgcggctgccgtccggacgagacaggcgaacccgacgcagaagagtccaccaccggacagccagcacatccacgatggagcgtcttgtcgcccgtgggaccttcccagtactagtgcgcaccagcgcctgccgcagcctcttcgggccggtggaccacgaggagctgagccgcgagctgcaggcccgcctggccgagctgaacgccgaggaccagaaccgctgggattacgacttccagcaggacatgccgctgcggggccctggacgcctgcagtggaccgaagtggacagcgactcggtgcccgcgttctaccgcgagacggtgcaggtggggcgctgccgcctgctgctggcgccgcggcccgtcgcggtcgcggtggctgtcagcccgcccctcgagccggccgctgagtccctcgacggcctcgaggaggcgccggagcagctgcctagtgtcccggtcccggccccggcgtccaccccgcccccagtcccggtcctggctccagccccggccccggctccggctccggtcgcggctccggtcgcggctccggtcgcggtcgcggtcctggccccggccccggccccggctccggctccggctccggccccggctccagtcgcggcccgggccccagccccggcccgggcccgggccccggcccccgccccggccccggccccggacgcggcgcctcaagagagcgccgagcagggcgcgaaccaggggcagcgcggccaggagcctctcgctgaccagctgcactcggggatttcgggacgtcccgcggccggcaccgcggccgccagcgccaacggcgcggcgatcaagaagctgtccgggcctctgatctccgatttcttcgccaagcgcaagagatcagcgcctgagaagtcgtcgggcgatgtccccgcgccgtgtccctctccaagcgccgcccctggcgtgggctcggtggagcagaccccgcgcaagaggctgcggtgagccaatttagagcccaaagagccccgagggaacctgccggggcagcggacgttggaagggcgctgggcctcggctgggaccgttcatgtagcagcaaccggcggcggctgccgcagagcagcgttcggttttgtttttaaattttgaaaactgtgcaatgtattaataacgtctttttatatctaaatgtattctgcacgagaaggtacactggtcccaaggtgtaaagctttaagagtcatttatataaaatgtttaatctctgctgaaactcagtgcaaaaaaaagaaaaaagaaaaaaaaaaggaaaaaataaaaaaaccatgtatatttgtacaaaaagtttttaaagttatactaacttatattttctatttatgtccaggcgtggaccgctctgccacgcactagctcggttattggttatgccaaaggcactctccatctcccacatctggttattgacaagtgtaactttattttcatcgcggactctggggaagggggtcactcacaagctgtagctgccatacatgcccatctagcttgcagtctcttcgcgctttcgctgtctctcttattatgactgtgtttatctgaaacttgaagacaagtctgttaaaatggttcctgagccgtctgtaccactgccccggcccctcgtccgccgggttctaaataaagaggccgaaaaatgctgcaa

SEQ ID NO: 123811 - DNA, 1220 bp, Homo sapiens
  Payload ID: 4297
  Gene Symbol: CDKN1C
  Gene Name: cyclin-dependent kinase inhibitor 1C (p57, Kip2)
  ENST ID: ENST00000380725
  CDS Start-End: 127-522
ggggtgccggccaggcctgagcgagcgagctagccagcaggcatcgagggggcgcggctgccgtccggacgagacaggcgaacccgacgcagaagagtccaccaccggacagccagcacatccacgatggagcgtcttgtcgcccgtgggaccttcccagtactagtgcgcaccagcgcctgccgcagcctcttcgggccggtggaccacgaggagctgagccgcgagctgcaggcccgcctggccgagctgaacgccgaggaccagaaccgctgggattacgacttccagcaggacatgccgctgcggggccctggacgcctgcagtggaccgaagtggacagcgactcggtgcccgcgttctaccgcgagacggtgcagatttcttcgccaagcgcaagagatcagcgcctgagaagtcgtcgggcgatgtccccgcgccgtgtccctctccaagcgccgcccctggcgtgggctcggtggagcagaccccgcgcaagaggctgcggtgagccaatttagagcccaaagagccccgagggaacctgccggggcagcggacgttggaagggcgctgggcctcggctgggaccgttcatgtagcagcaaccggcggcggctgccgcagagcagcgttcggttttgtttttaaattttgaaaactgtgcaatgtattaataacgtctttttatatctaaatgtattctgcacgagaaggtacactggtcccaaggtgtaaagctttaagagtcatttatataaaatgtttaatctctgctgaaactcagtgcaaaaaaaagaaaaaagaaaaaaaaaaggaaaaaataaaaaaaccatgtatatttgtacaaaaagtttttaaagttatactaacttatattttctatttatgtccaggcgtggaccgctctgccacgcactagctcggttattggttatgccaaaggcactctccatctcccacatctggttattgacaagtgtaactttattttcatcgcggactctggggaagggggtcactcacaagctgtagctgccatacatgcccatctagcttgcagtctcttcgcgctttcgctgtctctcttattatgactgtgtttatctgaaacttgaagacaagtctgttaaaatggttcctgagccgtctgtaccactgccccggcccctcgtccgccgggttctaaataaagaggccgaaaaatgctgcaactcca

SEQ ID NO: 123812 - DNA, 1811 bp, Homo sapiens
  Payload ID: 4297
  Gene Symbol: CDKN1C
  Gene Name: cyclin-dependent kinase inhibitor 1C (p57, Kip2)
  Uniprot ID: P49918
  ENST ID: ENST00000440480
  CDS Start-End: 191-1108
cccgcgcgtataaagggggcgcaggcgggctgggcgttccacaggccaagtgcgctgtgctcgaggggtgccggccaggcctgagcgagcgagctagccagcaggcatcgagggggcgcggctgccgtccggacgagacaggcgaacccgacgcagaagagtccaccaccggacagccagcacatccacgatggagcgtcttgtcgcccgtgggaccttcccagtactagtgcgcaccagcgcctgccgcagcctcttcgggccggtggaccacgaggagctgagccgcgagctgcaggcccgcctggccgagctgaacgccgaggaccagaaccgctgggattacgacttccagcaggacatgccgctgcggggccctggacgcctgcagtggaccgaagtggacagcgactcggtgcccgcgttctaccgcgagacggtgcaggtggggcgctgccgcctgctgctggcgccgcggcccgtcgcggtcgcggtggctgtcagcccgcccctcgagccggccgctgagtccctcgacggcctcgaggaggcgccggagcagctgcctagtgtcccggtcccggccccggcgtccaccccgcccccagtcccggtcctggctccagccccggccccggctccggctccggtcgcggctccggtcgcggctccggtcgcggtcgcggtcctggccccggccccggccccggctccggctccggctccggccccggctccagtcgcggccccggccccagccccggccccggccccggccccggcccccgccccggccccggccccggacgcggcgcctcaagagagcgccgagcagggcgcgaaccaggggcagcgcggccaggagcctctcgctgaccagctgcactcggggatttcgggacgtcccgcggccggcaccgcggccgccagcgccaacggcgcggcgatcaagaagctgtccgggcctctgatctccgatttcttcgccaagcgcaagagatcagcgcctgagaagtcgtcgggcgatgtccccgcgccgtgtccctctccaagcgccgcccctggcgtgggctcggtggagcagaccccgcgcaagaggctgcggtgagccaatttagagcccaaagagccccgagggaacctgccggggcagcggacgttggaagggcgctgggcctcggctgggaccgttcatgtagcagcaaccggcggcggctgccgcagagcagcgttcggttttgtttttaaattttgaaaactgtgcaatgtattaataacgtctttttatatctaaatgtattctgcacgagaaggtacactggtcccaaggtgtaaagctttaagagtcatttatataaaatgtttaatctctgctgaaactcagtgcaaaaaaaagaaaaaagaaaaaaaaaaggaaaaaataaaaaaaccatgtatatttgtacaaaaagtttttaaagttatactaacttatattttctatttatgtccaggcgtggaccgctctgccacgcactagctcggttattggttatgccaaaggcactctccatctcccacatctggttattgacaagtgtaactttattttcatcgcggactctggggaagggggtcactcacaagctgtagctgccatacatgcccatctagcttgcagtctcttcgcgctttcgctgtctctcttattatgactgtgtttatctgaaacttgaagacaagtctgttaaaatggttcctgagccgtctgtaccactgccccggcccctcgtccgccgggttctaaataaagaggccgaaaaatgctgcaa

SEQ ID NO: 123813 - DNA, 1570 bp, Homo sapiens
  Payload ID: 4297
  Gene Symbol: CDKN1C
  Gene Name: cyclin-dependent kinase inhibitor 1C (p57, Kip2)
  Uniprot ID: P49918
  ENST ID: ENST00000430149
  CDS Start-End: 283-1233
aggccaagtgcgctgtgctcgaggggtgccggccaggcctgagcgagcgagctagccagcaggcatcgagggggcgcggctgccgtccggacgagacaggcgaacccgacgcagaagagtccaccaccggacagccaggtagccgccgcgtccctcgcacacgcagagtcgggcggcgcggggtctcccttgcgcccggcctccgccctctcctcctctcctttccccttcttctcgctgtcctctcctctctcgctgcccgcgtttgcgcagccccgggccatgtccgacgcgtccctccgcagcacatccacgatggagcgtcttgtcgcccgtgggaccttcccagtactagtgcgcaccagcgcctgccgcagcctcttcgggccggtggaccacgaggagctgagccgcgagctgcaggcccgcctggccgagctgaacgccgaggaccagaaccgctgggattacgacttccagcaggacatgccgctgcggggccctggacgcctgcagtggaccgaagtggacagcgactcggtgcccgcgttctaccgcgagacggtgcaggtggggcgctgccgcctgctgctggcgccgcggcccgtcgcggtcgcggtggctgtcagcccgcccctcgagccggccgctgagtccctcgacggcctcgaggaggcgccggagcagctgcctagtgtcccggtcccggccccggcgtccaccccgcccccagtcccggtcctggctccagccccggccccggctccggctccggtcgcggctccggtcgcggctccggtcgcggtcgcggtcctggccccggccccggccccggctccggctccggctccggccccggctccagtcgcggccccggccccagccccggccccggccccggccccggcccccgccccggccccggccccggacgcggcgcctcaagagagcgccgagcagggcgcgaaccaggggcagcgcggccaggagcctctcgctgaccagctgcactcggggatttcgggacgtcccgcggccggcaccgcggccgccagcgccaacggcgcggcgatcaagaagctgtccgggcctctgatctccgatttcttcgccaagcgcaagagatcagcgcctgagaagtcgtcgggcgatgtccccgcgccgtgtccctctccaagcgccgcccctggcgtgggctcggtggagcagaccccgcgcaagaggctgcggtgagccaaagcccaaagagccccgagggaacctgccggggcagcggacgttggaagggcgctgggcctcggctgggaccgttcatgtagcagcaaccggcggcggctgccgcagagcagcgttcggttttgtttttaaattttgaaaactgtgcaatgtattaataacgtctttttatatctaaatgtattctgcacgagaaggtacactggtcccaaggtgtaaagctttaagagtcatttatataaaatgtttaatctctgctgaaactcagtgcaaaaaaaagaaaaaagaaaaaaaaaaggaaaaaataaaaaaaccatgtatatttgtacaaaaa

SEQ ID NO: 123814 - DNA, 2051 bp, Homo sapiens
  Payload ID: 4297
  Gene Symbol: CDKN1C
  Gene Name: cyclin-dependent kinase inhibitor 1C (p57, Kip2)
  Uniprot ID: P49918
  ENST ID: ENST00000414822
  CDS Start-End: 393-1343
ggtgttgttgaaactgaaaatactacattatgctaatcgcggccgggcccgcgcgcacgggggtggggcccgcgcgtataaagggggcgcaggcgggctgggcgttccacaggccaagtgcgctgtgctcgaggggtgccggccaggcctgagcgagcgagctagccagcaggcatcgagggggcgcggctgccgtccggacgagacaggcgaacccgacgcagaagagtccaccaccggacagccaggtagccgccgcgtccctcgcacacgcagagtcgggcggcgcggggtctcccttgcgcccggcctccgccctctcctcctctcctttccccttcttctcgctgtcctctcctctctcgctgcccgcgtttgcgcagccccgggccatgtccgacgcgtccctccgcagcacatccacgatggagcgtcttgtcgcccgtgggaccttcccagtactagtgcgcaccagcgcctgccgcagcctcttcgggccggtggaccacgaggagctgagccgcgagctgcaggcccgcctggccgagctgaacgccgaggaccagaaccgctgggattacgacttccagcaggacatgccgctgcggggccctggacgcctgcagtggaccgaagtggacagcgactcggtgcccgcgttctaccgcgagacggtgcaggtggggcgctgccgcctgctgctggcgccgcggcccgtcgcggtcgcggtggctgtcagcccgcccctcgagccggccgctgagtccctcgacggcctcgaggaggcgccggagcagctgcctagtgtcccggtcccggccccggcgtccaccccgcccccagtcccggtcctggctccagccccggccccggctccggctccggtcgcggctccggtcgcggctccggtcgcggtcgcggtcctggccccggccccggccccggctccggctccggctccggccccggctccagtcgcggccccggccccagccccggccccggccccggccccggcccccgccccggccccggccccggacgcggcgcctcaagagagcgccgagcagggcgcgaaccaggggcagcgcggccaggagcctctcgctgaccagctgcactcggggatttcgggacgtcccgcggccggcaccgcggccgccagcgccaacggcgcggcgatcaagaagctgtccgggcctctgatctccgatttcttcgccaagcgcaagagatcagcgcctgagaagtcgtcgggcgatgtccccgcgccgtgtccctctccaagcgccgcccctggcgtgggctcggtggagcagaccccgcgcaagaggctgcggtgagccaatttagagcccaaagagccccgagggaacctgccggggcagcggacgttggaagggcgctgggcctcggctgggaccgttcatgtagcagcaaccggcggcggctgccgcagagcagcgttcggttttgtttttaaattttgaaaactgtgcaatgtattaataacgtctttttatatctaaatgtattctgcacgagaaggtacactggtcccaaggtgtaaagctttaagagtcatttatataaaatgtttaatctctgctgaaactcagtgcaaaaaaaagaaaaaagaaaaaaaaaaggaaaaaataaaaaaaccatgtatatttgtacaaaaagtttttaaagttatactaacttatattttctatttatgtccaggcgtggaccgctctgccacgcactagctcggttattggttatgccaaaggcactctccatctcccacatctggttattgacaagtgtaactttattttcatcgcggactctggggaagggggtcactcacaagctgtagctgccatacatgcccatctagcttgcagtctcttcgcgctttcgctgtctctcttattatgactgtgtttatctgaaacttgaagacaagtctgttaaaatggttcctgagccgtctgtaccactgccccggcccctcgtccgccgggttctaaataaagaggccgaaaaatgctgcaactcca

SEQ ID NO: 123815 - DNA, 2051 bp, Homo sapiens
  Payload ID: 4297
  Gene Symbol: CDKN1C
  Gene Name: cyclin-dependent kinase inhibitor 1C (p57, Kip2)
  ENST ID: ENST00000616138
  CDS Start-End: 393-1343
ggtgttgttgaaactgaaaatactacattatgctaatcgcggccgggcccgcgcgcacgggggtggggcccgcgcgtataaagggggcgcaggcgggctgggcgttccacaggccaagtgcgctgtgctcgaggggtgccggccaggcctgagcgagcgagctagccagcaggcatcgagggggcgcggctgccgtccggacgagacaggcgaacccgacgcagaagagtccaccaccggacagccaggtagccgccgcgtccctcgcacacgcagagtcgggcggcgcggggtctcccttgcgcccggcctccgccctctcctcctctcctttccccttcttctcgctgtcctctcctctctcgctgcccgcgtttgcgcagccccgggccatgtccgacgcgtccctccgcagcacatccacgatggagcgtcttgtcgcccgtgggaccttcccagtactagtgcgcaccagcgcctgccgcagcctcttcgggccggtggaccacgaggagctgagccgcgagctgcaggcccgcctggccgagctgaacgccgaggaccagaaccgctgggattacgacttccagcaggacatgccgctgcggggccctggacgcctgcagtggaccgaagtggacagcgactcggtgcccgcgttctaccgcgagacggtgcaggtggggcgctgccgcctgctgctggcgccgcggcccgtcgcggtcgcggtggctgtcagcccgcccctcgagccggccgctgagtccctcgacggcctcgaggaggcgccggagcagctgcctagtgtcccggtcccggccccggcgtccaccccgcccccagtcccggtcctggctccagccccggccccggctccggctccggtcgcggctccggtcgcggctccggtcgcggtcgcggtcctggccccggccccggccccggctccggctccggctccggccccggctccagtcgcggcccgggccccagccccggcccgggcccgggccccggcccccgccccggccccggccccggacgcggcgcctcaagagagcgccgagcagggcgcgaaccaggggcagcgcggccaggagcctctcgctgaccagctgcactcggggatttcgggacgtcccgcggccggcaccgcggccgccagcgccaacggcgcggcgatcaagaagctgtccgggcctctgatctccgatttcttcgccaagcgcaagagatcagcgcctgagaagtcgtcgggcgatgtccccgcgccgtgtccctctccaagcgccgcccctggcgtgggctcggtggagcagaccccgcgcaagaggctgcggtgagccaatttagagcccaaagagccccgagggaacctgccggggcagcggacgttggaagggcgctgggcctcggctgggaccgttcatgtagcagcaaccggcggcggctgccgcagagcagcgttcggttttgtttttaaattttgaaaactgtgcaatgtattaataacgtctttttatatctaaatgtattctgcacgagaaggtacactggtcccaaggtgtaaagctttaagagtcatttatataaaatgtttaatctctgctgaaactcagtgcaaaaaaaagaaaaaagaaaaaaaaaaggaaaaaataaaaaaaccatgtatatttgtacaaaaagtttttaaagttatactaacttatattttctatttatgtccaggcgtggaccgctctgccacgcactagctcggttattggttatgccaaaggcactctccatctcccacatctggttattgacaagtgtaactttattttcatcgcggactctggggaagggggtcactcacaagctgtagctgccatacatgcccatctagcttgcagtctcttcgcgctttcgctgtctctcttattatgactgtgtttatctgaaacttgaagacaagtctgttaaaatggttcctgagccgtctgtaccactgccccggcccctcgtccgccgggttctaaataaagaggccgaaaaatgctgcaactcca

SEQ ID NO: 123816 - DNA, 1220 bp, Homo sapiens; identical to SEQ ID NO: 123811
  Payload ID: 4297
  Gene Symbol: CDKN1C
  Gene Name: cyclin-dependent kinase inhibitor 1C (p57, Kip2)
  ENST ID: ENST00000631604
  CDS Start-End: 127-522

SEQ ID NO: 123817 - DNA, 1570 bp, Homo sapiens
  Payload ID: 4297
  Gene Symbol: CDKN1C
  Gene Name: cyclin-dependent kinase inhibitor 1C (p57, Kip2)
  ENST ID: ENST00000633020
  CDS Start-End: 283-1233
aggccaagtgcgctgtgctcgaggggtgccggccaggcctgagcgagcgagctagccagcaggcatcgagggggcgcggctgccgtccggacgagacaggcgaacccgacgcagaagagtccaccaccggacagccaggtagccgccgcgtccctcgcacacgcagagtcgggcggcgcggggtctcccttgcgcccggcctccgccctctcctcctctcctttccccttcttctcgctgtcctctcctctctcgctgcccgcgtttgcgcagccccgggccatgtccgacgcgtccctccgcagcacatccacgatggagcgtcttgtcgcccgtgggaccttcccagtactagtgcgcaccagcgcctgccgcagcctcttcgggccggtggaccacgaggagctgagccgcgagctgcaggcccgcctggccgagctgaacgccgaggaccagaaccgctgggattacgacttccagcaggacatgccgctgcggggccctggacgcctgcagtggaccgaagtggacagcgactcggtgcccgcgttctaccgcgagacggtgcaggtggggcgctgccgcctgctgctggcgccgcggcccgtcgcggtcgcggtggctgtcagcccgcccctcgagccggccgctgagtccctcgacggcctcgaggaggcgccggagcagctgcctagtgtcccggtcccggccccggcgtccaccccgcccccagtcccggtcctggctccagccccggccccggctccggctccggtcgcggctccggtcgcggctccggtcgcggtcgcggtcctggccccggccccggccccggctccggctccggctccggccccggctccagtcgcggcccgggccccagccccggcccgggcccgggccccggcccccgccccggccccggccccggacgcggcgcctcaagagagcgccgagcagggcgcgaaccaggggcagcgcggccaggagcctctcgctgaccagctgcactcggggatttcgggacgtcccgcggccggcaccgcggccgccagcgccaacggcgcggcgatcaagaagctgtccgggcctctgatctccgatttcttcgccaagcgcaagagatcagcgcctgagaagtcgtcgggcgatgtccccgcgccgtgtccctctccaagcgccgcccctggcgtgggctcggtggagcagaccccgcgcaagaggctgcggtgagccaaagcccaaagagccccgagggaacctgccggggcagcggacgttggaagggcgctgggcctcggctgggaccgttcatgtagcagcaaccggcggcggctgccgcagagcagcgttcggttttgtttttaaattttgaaaactgtgcaatgtattaataacgtctttttatatctaaatgtattctgcacgagaaggtacactggtcccaaggtgtaaagctttaagagtcatttatataaaatgtttaatctctgctgaaactcagtgcaaaaaaaagaaaaaagaaaaaaaaaaggaaaaaataaaaaaaccatgtatatttgtacaaaaa

SEQ ID NO: 123818 - DNA, 1218 bp, Homo sapiens
  Payload ID: 4298
  Gene Symbol: CDKN2A
  Gene Name: cyclin-dependent kinase inhibitor 2A
  Uniprot ID: P42771
  ENST ID: ENST00000304494
  CDS Start-End: 272-742
cccaacctggggcgacttcaggggtgccacattcgctaagtgctcggagttaatagcacctcctccgagcactcgctcacggcgtccccttgcctggaaagataccgcggtccctccagaggatttgagggacagggtcggagggggctcttccgccagcaccggaggaagaaagaggaggggctggctggtcaccagagggtggggcggaccgcgtgcgctcggcggctgcggagagggggagagcaggcagcgggcggcggggagcagcatggagccggcggcggggagcagcatggagccttcggctgactggctggccacggccgcggcccggggtcgggtagaggaggtgcgggcgctgctggaggcgggggcgctgcccaacgcaccgaatagttacggtcggaggccgatccaggtcatgatgatgggcagcgcccgagtggcggagctgctgctgctccacggcgcggagcccaactgcgccgaccccgccactctcacccgacccgtgcacgacgctgcccgggagggcttcctggacacgctggtggtgctgcaccgggccggggcgcggctggacgtgcgcgatgcctggggccgtctgcccgtggacctggctgaggagctgggccatcgcgatgtcgcacggtacctgcgcgcggctgcggggggcaccagaggcagtaaccatgcccgcatagatgccgcggaaggtccctcagacatccccgattgaaagaaccagagaggctctgagaaacctcgggaaacttagatcatcagtcaccgaaggtcctacagggccacaactgcccccgccacaacccaccccgctttcgtagttttcatttagaaaatagagcttttaaaaatgtcctgccttttaacgtagatatatgccttcccccactaccgtaaatgtccatttatatcattttttatatattcttataaaaatgtaaaaaagaaaaacaccgcttctgccttttcactgtgttggagttttctggagtgagcactcacgccctaagcgcacattcatgtgggcatttcttgcgagcctcgcagcctccggaagctgtcgacttcatgacaagcattttgtgaactagggaagctcaggggggttactggcttctcttgagtcacactgctagcaaatggcagaaccaaagctcaaataaaaataaaataattttcattcattcactc

SEQ ID NO: 123819 - DNA, 1149 bp, Homo sapiens
  Payload ID: 4298
  Gene Symbol: CDKN2A
  Gene Name: cyclin-dependent kinase inhibitor 2A
  ENST ID: ENST00000361570
  CDS Start-End: 161-673
cgctcagggaaggcgggtgcgcgcctgcggggcggagatgggcagggggcggtgcgtgggtcccagtctgcagttaagggggcaggagtggcgctgctcacctctggtgccaaagggcggcgcagcggctgccgagctcggccctggaggcggcgagaacatggtgcgcaggttcttggtgaccctccggattcggcgcgcgtgcggcccgccgcgagtgagggttttcgtggttcacatcccgcggctcacgggggagtgggcagcgccaggggcgcccgccgctgtggccctcgtgctgatgctactgaggagccagcgtctagggcagcagccgcttcctagaagaccaggtcatgatgatgggcagcgcccgagtggcggagctgctgctgctccacggcgcggagcccaactgcgccgaccccgccactctcacccgaccgtgcacgacgctgcccgggagggcttcctggacacgctggtggtgctgcaccgggccggggcgcggctggacgtgcgcgatgcctggggccgtctgcccgtggacctggctgaggagctgggccatcgcgatgtcgcacggtacctgcgcgcggctgcggggggcaccagaggcagtaaccatgcccgcatagatgccgcggaaggtccctcagacatccccgattgaaagaaccagagaggctctgagaaacctcgggaaacttagatcatcagtcaccgaaggtcctacagggccacaactgcccccgccacaacccaccccgctttcgtagttttcatttagaaaatagagcttttaaaaatgtcctgccttttaacgtagatatatgccttcccccactaccgtaaatgtccatttatatcattttttatatattcttataaaaatgtaaaaaagaaaaacaccgcttctgccttttcactgtgttggagttttctggagtgagcactcacgccctaagcgcacattcatgtgggcatttcttgcgagcctcgcagcctccggaagctgtcgacttcatgacaagcattttgtgaactagggaagctcaggggggttactggcttctcttgagtcacactgctagcaaatggcagaaccaaagctcaaataaaaataaaataattttcattcattcactc

SEQ ID NO: 123820 - DNA, 794 bp, Homo sapiens
  Payload ID: 4298
  Gene Symbol: CDKN2A
  Gene Name: cyclin-dependent kinase inhibitor 2A
  ENST ID: ENST00000380151
  CDS Start-End: 1-351
atggagccggcggcggggagcagcatggagccttcggctgactggctggccacggccgcggcccggggtcgggtagaggaggtgcgggcgctgctggaggcgggggcgctgcccaacgcaccgaatagttacggtcggaggccgatccaggtgggtagagggtctgcagcgggagcaggggatggcgggcgactctggaggacgaagtttgcaggggaattggaatcaggtagcgcttcgattctccggaaaaaggggaggcttcctggggagttttcagaaggggtttgtaatcacagacctcctcctggcgacgccctgggggcttgggaagccaaggaagaggaatgaggagccacgcgcgtacagatctctcgaatgctgagaagatctgaaggggggaacatatttgtattagatggaagtcatgatgatgggcagcgcccgagtggcggagctgctgctgctccacggcgcggagcccaactgcgccgaccccgccactctcacccgacccgtgcacgacgctgcccgggagggcttcctggacacgctggtggtgctgcaccgggccggggcgcggctggacgtgcgcgatgcctggggccgtctgcccgtggacctggctgaggagctgggccatcgcgatgtcgcacggtacctgcgcgcggctgcggggggcaccagaggcagtaaccatgcccgcatagatgccgcggaaggtccctcagacatccccgattgaaagaaccagagaggctctgagaaacctcgggaaacttagatcatcagtc

SEQ ID NO: 123821 - DNA, 880 bp, Homo sapiens
  Payload ID: 4298
  Gene Symbol: CDKN2A
  Gene Name: cyclin-dependent kinase inhibitor 2A
  Uniprot ID: P42771
  ENST ID: ENST00000498124
  CDS Start-End: 40-543
ggagagggggagagcaggcagcgggcggcggggagcagcatggagccggcggcggggagcagcatggagccttcggctgactggctggccacggccgcggcccggggtcgggtagaggaggtgcgggcgctgctggaggcgggggcgctgcccaacgcaccgaatagttacggtcggaggccgatccaggtcatgatgatgggcagcgcccgagtggcggagctgctgctgctccacggcgcggagcccaactgcgccgaccccgccactctcacccgacccgtgcacgacgctgcccgggagggcttcctggacacgctggtggtgctgcaccgggccggggcgcggctggacgtgcgcgatgcctggggccgtctgcccgtggacctggctgaggagctgggccatcgcgatgtcgcacggtacctgcgcgcggctgcggggggcaccagaggcagtaaccatgcccgcatagatgccgcggaaggtccctcagaaatgatcggaaaccatttgtgggtttgtagaagcaggcatgcgtagggaagctacgggattccgccgaggagcgccagagcctgaggcgccctttggttatcgcaagctggctggctcactccgcaccaggtgcaaaagatgcctggggatgcgggaagggaaaggccacatcttcacgccttcgcgcctggcattacatccccgattgaaagaaccagagaggctctgagaaacctcgggaaacttagatcatcagtcaccgaaggtcctacagggccacaactgcccccgccacaacccaccccgctttcgtagttttcatttagaaaatagagcttttaaaaatgtcctgccttttaacgtagatatatgccttccccca

SEQ ID NO: 123822 - DNA, 748 bp, Homo sapiens
  Payload ID: 4298
  Gene Symbol: CDKN2A
  Gene Name: cyclin-dependent kinase inhibitor 2A
  Uniprot ID: Q8N726
  ENST ID: ENST00000530628
  CDS Start-End: 81-479
ggcaggagtggcgctgctcacctctggtgccaaagggcggcgcagcggctgccgagctcggccctggaggcggcgagaacatggtgcgcaggttcttggtgaccctccggattcggcgcgcgtgcggcccgccgcgagtgagggttttcgtggttcacatcccgcggctcacgggggagtgggcagcgccaggggcgcccgccgctgtggccctcgtgctgatgctactgaggagccagcgtctagggcagcagccgcttcctagaagaccaggtcatgatgatgggcagcgcccgagtggcggagctgctgctgctccacggcgcggagcccaactgcgccgaccccgccactctcacccgacccgtgcacgacgctgcccgggagggcttcctggacacgctggtggtgctgcaccgggccggggcgcggctggacgtgcgcgatgcctggggccgtctgcccgtggacctggctgaggagctgggccatcgcgatgtcgcacgacatccccgattgaaagaaccagagaggctctgagaaacctcgggaaacttagatcatcagtcaccgaaggtcctacagggccacaactgcccccgccacaacccaccccgctttcgtagttttcatttagaaaatagagcttttaaaaatgtcctgccttttaacgtagatatatgccttcccccactaccgtaaatgtccatttatatcattttttatatattcttataaaaatgtaaaa

SEQ ID NO: 123823 - DNA, 1283 bp, Homo sapiens
  Payload ID: 4298
  Gene Symbol: CDKN2A
  Gene Name: cyclin-dependent kinase inhibitor 2A
  Uniprot ID: Q8N726
  ENST ID: ENST00000579755
  CDS Start-End: 294-692
cgcgcgcgcctccctacgggcgcctccggcagcccttcccgcgtgcgcagggctcagagccgttccgagatcttggaggtccgggtgggagtgggggtggggtgggggtgggggtgaaggtggggggcgggcgcgctcagggaaggcgggtgcgcgcctgcggggcggagatgggcagggggcggtgcgtgggtcccagtctgcagttaagggggcaggagtggcgctgctcacctctggtgccaaagggcggcgcagcggctgccgagctcggccctggaggcggcgagaacatggtgcgcaggttcttggtgaccctccggattcggcgcgcgtgcggcccgccgcgagtgagggttttcgtggttcacatcccgcggctcacgggggagtgggcagcgccaggggcgcccgccgctgtggccctcgtgctgatgctactgaggagccagcgtctagggcagcagccgcttcctagaagaccaggtcatgatgatgggcagcgcccgagtggcggagctgctgctgctccacggcgcggagcccaactgcgccgaccccgccactctcacccgacccgtgcacgacgctgcccgggagggcttcctggacacgctggtggtgctgcaccgggccggggcgcggctggacgtgcgcgatgcctggggccgtctgcccgtggacctggctgaggagctgggccatcgcgatgtcgcacggtacctgcgcgcggctgcggggggcaccagaggcagtaaccatgcccgcatagatgccgcggaaggtccctcagacatccccgattgaaagaaccagagaggctctgagaaacctcgggaaacttagatcatcagtcaccgaaggtcctacagggccacaactgcccccgccacaacccaccccgctttcgtagttttcatttagaaaatagagcttttaaaaatgtcctgccttttaacgtagatatatgccttcccccactaccgtaaatgtccatttatatcattttttatatattcttataaaaatgtaaaaaagaaaaacaccgcttctgccttttcactgtgttggagttttctggagtgagcactcacgccctaagcgcacattcatgtgggcatttcttgcgagcctcgcagcctccggaagctgtcgacttcatgacaagcattttgtgaactagggaagctcaggggggttactggcttctcttgagtcacactgctagcaaatggcagaaccaaagctcaaataaaaataaaataattttcattcattcactc

SEQ ID NO: 123824 - DNA, 666 bp, Homo sapiens
  Payload ID: 4298
  Gene Symbol: CDKN2A
  Gene Name: cyclin-dependent kinase inhibitor 2A
  ENST ID: ENST00000579122
  CDS Start-End: 32-448
ggagagcaggcagcgggcggcggggagcagcatggagccggcggcggggagcagcatggagccttcggctgactggctggccacggccgcggcccggggtcgggtagaggaggtgcgggcgctgctggaggcgggggcgctgcccaacgcaccgaatagttacggtcggaggccgatccaggtcatgatgatgggcagcgcccgagtggcggagctgctgctgctccacggcgcggagcccaactgcgccgaccccgccactctcacccgacccgtgcacgacgctgcccgggagggcttcctggacacgctggtggtgctgcaccgggccggggcgcggctggacgtgcgcgatgcctggggccgtctgcccgtggacctggctgaggagctgggccatcgcgatgtcgcacgacatccccgattgaaagaaccagagaggctctgagaaacctcgggaaacttagatcatcagtcaccgaaggtcctacagggccacaactgcccccgccacaacccaccccgctttcgtagttttcatttagaaaatagagcttttaaaaatgtcctgccttttaacgtagatatatgccttcccccactaccgtaaatgtccatttatatcattttttatatattcttataaaaatgtaaaaaagaaaaaca

SEQ ID NO: 123825 - DNA, 989 bp, Homo sapiens
  Payload ID: 4298
  Gene Symbol: CDKN2A
  Gene Name: cyclin-dependent kinase inhibitor 2A
  Uniprot ID: P42771
  ENST ID: ENST00000494262
  CDS Start-End: 625-942
caaaggactcggtgcttgtcccagccaggcgccctcggcgacgcgggcagctgggaggggaatgggcgcccggacccagctgggacccccgggtgcgactccacctacctagtccggcgccaggccgggtcgacagctccggcagcgccagcgccgcgccgtgtccagatgtcgcgtcagaggcgtgcagcggtttagtttaatttcgcttgttttccaaatctagaagaggagcggagcggcttttagttcaaaactgacattcagcctcctgattggcggatagagcaatgagatgacctcgctttcctttcttcctttttcatttttaaataatctagtttgaagaatggaagactttcgacgaggggagccaggaataaaataaggggaataggggagcggggacgcgagcagcaccagaatccgcgggagcgcggctgttcctgcccaggctaggaggaggaggagataaccgccggtggaggcttccccattcgggttacaacgacttagacatgtggttctcgcagtaccattgaacctggacctcccttcacacagcccctcaatcgtgggaaactgaggcgaacagagcttctaaacccacctcagaagtcagtcatgatgatgggcagcgcccgagtggcggagctgctgctgctccacggcgcggagcccaactgcgccgaccccgccactctcacccgacccgtgcacgacgctgcccgggagggcttcctggacacgctggtggtgctgcaccgggccggggcgcggctggacgtgcgcgatgcctggggccgtctgcccgtggacctggctgaggagctgggccatcgcgatgtcgcacggtacctgcgcgcggctgcggggggcaccagaggcagtaaccatgcccgcatagatgccgcggaaggtccctcagacatccccgattgaaagaaccagagaggctctgagaaacctcgggaaacttagatcatcag

SEQ ID NO: 123826 - DNA, 544 bp, Homo sapiens
  Payload ID: 4298
  Gene Symbol: CDKN2A
  Gene Name: cyclin-dependent kinase inhibitor 2A
  ENST ID: ENST00000479692
  CDS Start-End: 16-381
ctggaagcaaatgtcatgatgatgggcagcgcccgagtggcggagctgctgctgctccacggcgcggagcccaactgcgccgaccccgccactctcacccgacccgtgcacgacgctgcccgggagggcttcctggacacgctggtggtgctgcaccgggccggggcgcggctggacgtgcgcgatgcctggggccgtctgcccgtggacctggctgaggagctgggccatcgcgatgtcgcacggtacctgcgcgcggctgcggggggcaccagaggcagtaaccatgcccgcatagatgccgcggaaggtccctcagttacagctagcatccaggtcccgggaggtgaagaaggagacttcggctccagttacagctagcatccgggtcccgatttagaaggagctgccaattacagcgcggttccagggctgagcaaaaagcctgaggagccaagtgggagagggagtaaaactactgaattgggccacaagcaaatgaataaactgaacgactcttaaccaaacctaatatatttaatcc

SEQ ID NO: 123827 - DNA, 678 bp, Homo sapiens
  Payload ID: 4298
  Gene Symbol: CDKN2A
  Gene Name: cyclin-dependent kinase inhibitor 2A
  Uniprot ID: P42771
  ENST ID: ENST00000578845
  CDS Start-End: 128-445
aggggtaattagacacctggggcttgtgtgggggtctgcttggcggtgagggggctctacacaagcttcctttccgtcatgccggcccccaccctggctctgaccattctgttctctctggcaggtcatgatgatgggcagcgcccgagtggcggagctgctgctgctccacggcgcggagcccaactgcgccgaccccgccactctcacccgacccgtgcacgacgctgcccgggagggcttcctggacacgctggtggtgctgcaccgggccggggcgcggctggacgtgcgcgatgcctggggccgtctgcccgtggacctggctgaggagctgggccatcgcgatgtcgcacggtacctgcgcgcggctgcggggggcaccagaggcagtaaccatgcccgcatagatgccgcggaaggtccctcagacatccccgattgaaagaaccagagaggctctgagaaacctcgggaaacttagatcatcagtcaccgaaggtcctacagggccacaactgcccccgccacaacccaccccgctttcgtagttttcatttagaaaatagagcttttaaaaatgtcctgccttttaacgtagatatatgccttcccccactaccgtaaatgtccatttatatcattttttatatattcttataaaaatgtaaaaaagaa

SEQ ID NO: 123828 - DNA, 926 bp, Homo sapiens
  Payload ID: 4298
  Gene Symbol: CDKN2A
  Gene Name: cyclin-dependent kinase inhibitor 2A
  Uniprot ID: P42771
  ENST ID: ENST00000498628
  CDS Start-End: 485-802
ggttaaaaccgaaaataaaaatgggctagacacaaaggactcggtgcttgtcccagccaggcgccctcggcgacgcgggcagctgggaggggaatgggcgcccggacccagctgggacccccgggtgcgactccacctacctagtccggcgccaggccgggtcgacagctccggcagcgccagcgccgcgccgtgtccagatgtcgcgtcagaggcgtgcagcggtttagtttaatttcgcttgttttccaaatctagaagaggagcggagcggcttttagttcaaaactgacattcagcctcctgattggcggatagagcaatgagatgacctcgctttcctttcttcctttttcatttttaaataatctagtttgaagaatggaagactttcgacgaggggagccaggaataaaataaggggaataggggagcggggacgcgagcagcaccagaatccgcgggagcgcggctgttcctggtcatgatgatgggcagcgcccgagtggcggagctgctgctgctccacggcgcggagcccaactgcgccgaccccgccactctcacccgacccgtgcacgacgctgcccgggagggcttcctggacacgctggtggtgctgcaccgggccggggcgcggctggacgtgcgcgatgcctggggccgtctgcccgtggacctggctgaggagctgggccatcgcgatgtcgcacggtacctgcgcgcggctgcggggggcaccagaggcagtaaccatgcccgcatagatgccgcggaaggtccctcagacatccccgattgaaagaaccagagaggctctgagaaacctcgggaaacttagatcatcagtcaccgaaggtcctacagggccacaactgcccccgccacaacccaccccgctttcgtagttttcatttagaaaatag

SEQ ID NO: 123829 - DNA, 565 bp, Homo sapiens
  Payload ID: 4298
  Gene Symbol: CDKN2A
  Gene Name: cyclin-dependent kinase inhibitor 2A
  ENST ID: ENST00000497750
  CDS Start-End: 76-390
ggaattcattgtgtactgaagaatggatagagaactcaagaaggaaattggaaactggaagcaaatgtaggggtcatgatgatgggcagcgcccgagtggcggagctgctgctgctccacggcgcggagcccaactgcgccgaccccgccactctcacccgacccgtgcacgacgctgcccgggagggcttcctggacacgctggtggtgctgcaccgggccggggcgcggctggacgtgcgcgatgcctggggccgtctgcccgtggacctggctgaggagctgggccatcgcgatgtcgcacggtacctgcgcgcggctgcggggggcaccagaggcagtaaccatgcccgcatagatgccgcggaaggtccctcaggtgaggactgatgatctgagaatttgtaccctgagagcttccaaagctcagagcattcattttccagcacagaaagttcagcccgggagaccagtctccggtcttgcctcagctcacgcgccaatcggtgggacggcctgagtctccctatcgccctgccccgccagggcggcaaatgggaaataa

SEQ ID NO: 123830 - DNA, 3911 bp, Homo sapiens
  Payload ID: 4299
  Gene Symbol: CDKN2B
  Gene Name: cyclin-dependent kinase inhibitor 2B (p15, inhibits CDK4)
  Uniprot ID: P42772
  ENST ID: ENST00000276925
  CDS Start-End: 411-827
gggagacgccggccccttggcccagctgaaaacggaattctttgccggctggctccccactctgccagagcgaggcggggcagtgaggactccgcgacgcgtccgcaccctgcggccagagcggctttgagctcggctgcgtccgcgctaggcgctttttcccagaagcaatccaggcgcgcccgctggttcttgagcgccaggaaaagcccggagctaacgaccggccgctcggccactgcacggggccccaagccgcagaaggacgacgggagggtaatgaagctgagcccaggtctcctaggaaggagagagtgcgccggagcagcgtgggaaagaagggaagagtgtcgttaagtttacggccaacggtggattatccgggccgctgcgcgtctgggggctgcggaatgcgcgaggagaacaagggcatgcccagtgggggcggcagcgatgagggtctggccagcgccgcggcgcggggactagtggagaaggtgcgacagctcctggaagccggcgcggatcccaacggagtcaaccgtttcgggaggcgcgcgatccaggtcatgatgatgggcagcgcccgcgtggcggagctgctgctgctccacggcgcggagcccaactgcgcagaccctgccactctcacccgaccggtgcatgatgctgcccgggagggcttcctggacacgctggtggtgctgcaccgggccggggcgcggctggacgtgcgcgatgcctggggtcgtctgcccgtggacttggccgaggagcggggccaccgcgacgttgcagggtacctgcgcacagccacgggggactgacgccaggttccccagccgcccacaacgactttattttcttacccaatttcccacccccacccacctaattcgatgaaggctgccaacggggagcggcggaaagcctgtaagcctgcaagcctgtctgagactcacaggaaggaggagccgaccgggaataaccttccatacatttttttctttgtcttatctggccctcgacactcaccatgaagcgaaacacagagaagcggatttccagggatatttaggagtgtgtgacattccaggggtcgtttgcttttcagggttttctgagggaaagtgcatatgaaatccttgactggacctggtggctacgaatcttccgatggatgaatctcccactccagcgctgagtgggagaaggcagtgattagcacttgggtgacggcagtcgatgcgttcactccaatgtctgctgaggagttatggtgaacccacaacttaggccctagcggcagaaaggaaaacctgaagactgaggacaaagtggaggagggccgaggtgggcttcagtaagtccccggcggcgctttagtttgagcgcatggcaagtcacatgcgtaaacgacactctctggaagccctggagaccctcgcccaactccaccagatagcagaggggtaagagaggatgtgcaagcgacgacagatgctaaaatccctggatcacgacgctgcagagcacctttgcacaggatgctggcctttgctcttactacactgaggagagattcccgcgggttccgcaggcagactacacaggatgaggtggtggagtggagtgagagcaattgtaacggttaactgtaacgttttctttcacacacacacacacacacacacacacacatgctaggatgcggaaatccccttatgacttgctactttttgattttgtgatattttgtactttttagttgttcagcaactgtcttatttaatggggagattttaagtaacataactagtggctctcagttaaaatgtgaggaagaactacagctcttaaatgtagcaatggcactgttgcaaactcagtgcaaacgcctagattgctttcttcttaacctatttatttctttgttaaatttttctgattgtttcctttatagagtgtctcagggtgcagaggtcagactaagaaatattccaaatgtcttttagaagatagatgcacttatgcagtaaattatcttgggatagttcccaaaagattgctgaaaaagtagattgagtataaaaacttgaaaatatatgatggctcgtgggatgtcctactatcactgaacaaactaaaggtgcactgctttgggatttaatttccagggttgcttgatcattatatcattggaacaactgatacttcactactttaataaagaattaacagagattgaactccaagaggtgggtaatttggtttaaaaatacatgttcatgggtttaccactaactcctgagaaatgttaaaggttcacaggggttcccttctctcaatgtttgtaataattgctcataagcaataccagcaattcataaaaactgcttacttatgccatagaaaattaaacacaaagtgtatacatgtattatgcttctaaatgctcattctaccagatacacatttaaaagagaaaaaaggaacagaaacaagtcatttgagagtggagacttataagaaggagtacatttgagttgaatacacaaatctttacttctctaccaattcctattcccaaaatgaacatattactggggaaagttagttgagaatcagagcatatgttattggggaaaggatatgtttattgacacataatctgtaccaggtatgcattaaaatatatttgttaatttaatatttaaacctgagagataggtattgtttcccagatgaggacaatgaggcaaagaaatatcaagtaacttgccaaaggttacaagatattcattccatggatgcacaaagaagtgcatctagttccacagctgattatggttgtcttgcttttcttcccattgcaccagcttgtcctccaaaatcatgaatgatacacatgaagataactttttttaaaaaaaagcagaaatacacaatgatctcccttgtaagctcctaaggtggcttttctttctctaacttctagtaaatataaacggtttgtttgaaaactattttaaaatgtcaacaatatggagaataaccccccccaacacacctataaaaacccaaatttttggaacaaagataatggaacctccattttcaaactgaagcacagggacagaaaatatatttctagttatcacttaagcactcaatcattagaggctacaagaataatatttttaaagttacagtattttacaattattagaaaacattctatataaaagaagtcagttgatactttaaaatctcccatttggtttataaaatcccttaatttgacctctatatcttaaattccaagatgtttaaatttgctagttgcattatactgggtcatgaaaaattatcccttgaaatagatatgaaacatgttacttcatttctggtttaaataacttgtggaatctttcctaatgacaacctgatattaagggaaactaaagaaaatgttattgtggatcccacagtactatattacactgttttttttgtttgttttgttagttttttttatttaaagcaaacctcaaacattattgggtatcaattaccacctggttgtattgaaatagtaacttatcaatgccatgtaaaaattaattccattttcgaagccacctggcagacaggtttagctgtttcatcagcagcctaatatatactgttaaatttgttaaggatttcactttgaaggatacatgcaaaacatatagttactattttcatgagtcctgcttctagctccattgtggaatacagaaaattaaatatacctgttaagttcgtatctaaacctaagacattaccaaggtttgtacaaattctactacctgacatttattccaagaagatctggaaagttaaataaatttataaatttaataaca

SEQ ID NO: 123831 - DNA, 859 bp, Homo sapiens
  Payload ID: 4299
  Gene Symbol: CDKN2B
  Gene Name: cyclin-dependent kinase inhibitor 2B (p15, inhibits CDK4)
  Uniprot ID: P42772
  ENST ID: ENST00000380142
  CDS Start-End: 320-556
ccgcgacgcgtccgcaccctgcggccagagcggctttgagctcggctgcgtccgcgctaggcgctttttcccagaagcaatccaggcgcgcccgctggttcttgagcgccaggaaaagcccggagctaacgaccggccgctcggccactgcacggggccccaagccgcagaaggacgacgggagggtaatgaagctgagcccaggtctcctaggaaggagagagtgcgccggagcagcgtgggaaagaagggaagagtgtcgttaagtttacggccaacggtggattatccgggccgctgcgcgtctgggggctgcggaatgcgcgaggagaacaagggcatgcccagtgggggcggcagcgatgagggtctggccagcgccgcggcgcggggactagtggagaaggtgcgacagctcctggaagccggcgcggatcccaacggagtcaaccgtttcgggaggcgcgcgatccaggtagctggggccccagggcctcgccggcagggggcgcgcgaacgcggggcgcggcctcggcggatcggggctggaacctagatcgccgatgtagatttgtacaggagtctccgttggccggaggtcatgatgatgggcagcgcccgcgtggcggagctgctgctgctccacggcgcggagcccaactgcgcagaccctgccactctcacccgaccggtgcatgatgctgcccgggagggcttcctggacacgctggtggtgctgcaccgggccggggcgcggctggacgtgcgcgatgcctggggtcgtctgcccgtggacttggccgaggagcggggccaccgcgacgttgcagggtacctgcgcacagccacgggggactga

SEQ ID NO: 123832 - DNA, 2904 bp, Homo sapiens
  Payload ID: 4300
  Gene Symbol: CDKN2C
  Gene Name: cyclin-dependent kinase inhibitor 2C (p18, inhibits CDK4)
  Uniprot ID: P42773
  ENST ID: ENST00000262662
  CDS Start-End: 2035-2541
aacacagaagtaaccagactgccatggtagacatgggagagacgaggaagctgagaaaggactatttcgcagtttccagtccttgattaattaaggcttcagagttcgttcttacatatgccatgtcttaagttttcataaaattcagtctacacaagacttgctttttgtgagcactgtgcttagtggcagtccggatttttccctccacccccgcggccacccctgcccaccgcgccgtcgggcatggatctggcaggtgcgaggccgaggccagggctcagcgaaggacgccgagtttacagagcgcgcgcgcctagaggaggcagcagcagccgcagcctggccgcccgaactttgcgagcctggcgggggagcacagaggcgggccgacctgccccgctagcgctgaggaacgactccctttatgccagctcgctgtccgccttcccgcagcgtacgctgcggagcctcaaagaccctgcggccctccacaaccgtcttaaataacaaacccctgtcctcgcccccgtaggaattggggcagctgggggttcgcgtcacagactcaagcccgccagcagaagggcaggccggacttcgcggggccgaaccccgctccagctggggacaggccgcctagccggcaggagggagccggcgcgagagacttgacgggaggaggtggagagcgggaggcgggaatgagggcgcgggaccgggcgggcggagcgtgcgagactgcgagcgcgagcgccagcagggcggagggcggggcgtgggcggcgcccggccttcccgctcccgcggcgctgcaactctgccgagcctccttaaaactctgccgttaaaatgggggcgggtttttcaactcaaaaagcgctcaatttttttcttttcaaaaaaagctgatgaggtcggaaaaaagggagaagaaaccggcaccctctctgagaggcaacagaagcagcaattgtttcagcgaaaaaagcagcaagggagggagtgaaggaaaaaagcaaaaaagggggcgacacgcaagtgcctgtaggggtgaaaggagcagggaccggcgatctagggggggatcagctacaaaagaaactgtcactgggagcggtgcggccaaggaggaagcagtgctgccaggctctgctccagggcacagctggctggcggctgccctgtccgcagcaaaggggcacaggccggggaccgcgagaggtggcaaagtggcaccgggcgccgaggctgctgagcgctcgccgagacggcgaccggactggctgccccggaactgcggcgactctccctactcagaacttggcctacgtttcccaggactctccccatctccagaggcccccacaaaaccgggaaaggaaggaaaggacagcggcggcagcagctcaatgagtgcctacagcagaaagcctgaacgagctcggtcgtaggcgggaagttcccgggggggctgcccagtgcagccgcaatgctgccgcgagctgccccagcagtccgggctccgtagacgctttccgcatcactctccttcctcgggctgccgggagtcccgggacctggcggggccggcatgacgggcttctcgggggcccgccgcacgcccggcagcctccggagacgcgcgccgagcccggctcccacggcctctgaggctcggcggggctgcggctgcctggcgggcgggctccggagctttcctgagcggcattagcccacggcttggcccggacgcgaccaaaggctcttctggagaagcccagagcactgggcaatcgttacgacctgtaacttgagggccaccgaactgctactcccgttcgcctttggcgatcatcttttaaccctccggagcacgtcagcatccagccaccgcggcgctctcccagcagcggaggacccaggactatcccttcggcgagacggatggaaaccgagccccctggaggacctgcccctgcagttctgcctcacacggctcaagtcaccaccgtgaacaagggaccctaaagaatggccgagccttgggggaacgagttggcgtccgcagctgccaggggggacctagagcaacttactagtttgttgcaaaataatgtaaacgtcaatgcacaaaatggatttggaaggactgcgctgcaggttatgaaacttggaaatcccgagattgccaggagactgctacttagaggtgctaatcccgatttgaaagaccgaactggtttcgctgtcattcatgatgcggccagagcaggtttcctggacactttacagactttgctggagtttcaagctgatgttaacatcgaggataatgaagggaacctgcccttgcacttggctgccaaagaaggccacctccgggtggtggagttcctggtgaagcacacggccagcaatgtggggcatcggaaccataagggggacaccgcctgtgatttggccaggctctatgggaggaatgaggttgttagcctgatgcaggcaaacggggctgggggagccacaaatcttcaataaacgtggggagggctcccccacgttgcctctactttatcaattaactgagtagctctcctgacttttaatgtcatttgttaaaatacagttctgtcatatgttaagcagctaaattttctgaaactgcataagtgaaaatcttacaacaggcttatgaatatatttaagcaacatctttttaacctgcaaaatctgttctaacatgtaattgcagataactttgactttcttctgaatattttatctttccttggcttttcccttgcttccccttttgccaatctcaacacccaagttgaagactttgtttttaaaatggtttgtcctgatgcttttgtctaattaaaacactttcaaaacagg

SEQ ID NO: 123833 - DNA, 1220 bp, Homo sapiens
  Payload ID: 4300
  Gene Symbol: CDKN2C
  Gene Name: cyclin-dependent kinase inhibitor 2C (p18, inhibits CDK4)
  Uniprot ID: P42773
  ENST ID: ENST00000371761
  CDS Start-End: 426-932
ggtattttctgccccgatctatagtcccttgagtctccacacacactcctcacagagatctgtagcgtaggtacgtgacagctctgcctacatctgacgtccggagtcattaaccaggaatgtatgtgtgtctgtgtgtctctctgtggagtcgtcagaattcttcataggggttaagctaaaaaagcgaggcgaggagcccctctccaatggctcagttttgctgaataatcacgtgtgaatcgaggggcgggcttttggcaggcagatcttactagtatttactaccaagctctactccagattaaccatcccagtccttctgtcagtctccgatgccatcatgcagcctggttaggagcaaaggaaaggggaaaaagaaaaacgactaattcatcttttcctgatcgtcaggaccctaaagaatggccgagccttgggggaacgagttggcgtccgcagctgccaggggggacctagagcaacttactagtttgttgcaaaataatgtaaacgtcaatgcacaaaatggatttggaaggactgcgctgcaggttatgaaacttggaaatcccgagattgccaggagactgctacttagaggtgctaatcccgatttgaaagaccgaactggtttcgctgtcattcatgatgcggccagagcaggtttcctggacactttacagactttgctggagtttcaagctgatgttaacatcgaggataatgaagggaacctgcccttgcacttggctgccaaagaaggccacctccgggtggtggagttcctggtgaagcacacggccagcaatgtggggcatcggaaccataagggggacaccgcctgtgatttggccaggctctatgggaggaatgaggttgttagcctgatgcaggcaaacggggctgggggagccacaaatcttcaataaacgtggggagggctcccccacgttgcctctactttatcaattaactgagtagctctcctgacttttaatgtcatttgttaaaatacagttctgtcatatgttaagcagctaaattttctgaaactgcataagtgaaaatcttacaacaggcttatgaatatatttaagcaacatctttttaacctgcaaaatctgttctaacatgtaattgcagataactttgactttcttctgaatattttatctttccttggcttttcccttgcttccccttttgccaatctcaac

SEQ ID NO: 123834 - DNA, 2086 bp, Homo sapiens
  Payload ID: 4300
  Gene Symbol: CDKN2C
  Gene Name: cyclin-dependent kinase inhibitor 2C (p18, inhibits CDK4)
  Uniprot ID: P42773
  ENST ID: ENST00000396148
  CDS Start-End: 1217-1723
ctctgccgagcctccttaaaactctgccgttaaaatgggggcgggtttttcaactcaaaaagcgctcaatttttttcttttcaaaaaaagctgatgaggtcggaaaaaagggagaagaaaccggcaccctctctgagaggcaacagaagcagcaattgtttcagcgaaaaaagcagcaagggagggagtgaaggaaaaaagcaaaaaagggggcgacacgcaagtgcctgtaggggtgaaaggagcagggaccggcgatctagggggggatcagctacaaaagaaactgtcactgggagcggtgcggccaaggaggaagcagtgctgccaggctctgctccagggcacagctggctggcggctgccctgtccgcagcaaaggggcacaggccggggaccgcgagaggtggcaaagtggcaccgggcgccgaggctgctgagcgctcgccgagacggcgaccggactggctgccccggaactgcggcgactctccctactcagaacttggcctacgtttcccaggactctccccatctccagaggcccccacaaaaccgggaaaggaaggaaaggacagcggcggcagcagctcaatgagtgcctacagcagaaagcctgaacgagctcggtcgtaggcgggaagttcccgggggggctgcccagtgcagccgcaatgctgccgcgagctgccccagcagtccgggctccgtagacgctttccgcatcactctccttcctcgggctgccgggagtcccgggacctggcggggccggcatgacgggcttctcgggggcccgccgcacgcccggcagcctccggagacgcgcgccgagcccggctcccacggcctctgaggctcggcggggctgcggctgcctggcgggcgggctccggagctttcctgagcggcattagcccacggcttggcccggacgcgaccaaaggctcttctggagaagcccagagcactgggcaatcgttacgacctgtaacttgagggccaccgaactgctactcccgttcgcctttggcgatcatcttttaaccctccggagcacgtcagcatccagccaccgcggcgctctcccagcagcggaggacccaggactatcccttcggcgagacggatggaaaccgagccccctggaggacctgcccctgcagttctgcctcacacggctcaagtcaccaccgtgaacaagggaccctaaagaatggccgagccttgggggaacgagttggcgtccgcagctgccaggggggacctagagcaacttactagtttgttgcaaaataatgtaaacgtcaatgcacaaaatggatttggaaggactgcgctgcaggttatgaaacttggaaatcccgagattgccaggagactgctacttagaggtgctaatcccgatttgaaagaccgaactggtttcgctgtcattcatgatgcggccagagcaggtttcctggacactttacagactttgctggagtttcaagctgatgttaacatcgaggataatgaagggaacctgcccttgcacttggctgccaaagaaggccacctccgggtggtggagttcctggtgaagcacacggccagcaatgtggggcatcggaaccataagggggacaccgcctgtgatttggccaggctctatgggaggaatgaggttgttagcctgatgcaggcaaacggggctgggggagccacaaatcttcaataaacgtggggagggctcccccacgttgcctctactttatcaattaactgagtagctctcctgacttttaatgtcatttgttaaaatacagttctgtcatatgttaagcagctaaattttctgaaactgcataagtgaaaatcttacaacaggcttatgaatatatttaagcaacatctttttaacctgcaaaatctgttctaacatgtaattgcagataactttgactttcttctgaatattttatctttccttggcttttcccttgcttccccttttgccaatctcaacacccaagttgaagactttgtttttaaaatggtttgtcctgatgcttttgtctaattaaaacactttcaaaacagg

SEQ ID NO: 123835 - DNA, 1086 bp, Homo sapiens
  Payload ID: 4301
  Gene Symbol: CDKN2D
  Gene Name: cyclin-dependent kinase inhibitor 2D (p19, inhibits CDK4)
  Uniprot ID: P55273
  ENST ID: ENST00000335766
  CDS Start-End: 129-629
agttgcgttcggggcgtggccgggagcacgttggctccgccccctggcggctgcctcagcggcggcggcggcgcaggctcagagcagaccccgcccggcgaggaggagggagggccgccagtgtcgacatgctgctggaggaggttcgcgccggcgaccggctgagtggggcggcggcccggggcgacgtgcaggaggtgcgccgccttctgcaccgggagctggtgcatcccgacgccctcaaccgcttcggcaagacggcgctgcaggtcatgatgtttggcagcaccgccatcgccctggagctgctgaagcaaggtgccagccccaatgtccaggacacctccggtaccagtccagtccatgacgcagcccgcactggattcctggacaccctgaaggtcctagtggagcacggggctgatgtcaacgtgcctgatggcaccggggcacttccaatccatctggcagttcaagagggtcacactgctgtggtcagctttctggcagctgaatctgatctccatcgcagggacgccaggggtctcacacccttggagctggcactgcagagaggggctcaggacctcgtggacatcctgcagggccacatggtggccccgctgtgatctggggtcaccctctccagcaagagaaccccgtggggttatgtatcagaagagaggggaagaaacactttctcttcttgtttctcctgcccactgctgcagtaggggaggagcacagtttgtggcttataggtgttggttttgggggtgtgagtgtttgggggacgtttctcatttgtttttctcactccttttggtgtgttggacagagaagggctcctgcaggccacagccacctaaacggttcagtttcttctgcgcctcaggctgctggggcctcagacgagacccaagggcagagcatttaagagtgaagtcatgacctccagggagcctagaagctggtggccttggccggctgtgctcagagacctgaagtgtgcacgttgcttcaggcatggggggtggggggagcgtcccaaatcaataagaaggtagaatgagttatgagttattc

SEQ ID NO: 123836 - DNA, 1422 bp, Homo sapiens
  Payload ID: 4301
  Gene Symbol: CDKN2D
  Gene Name: cyclin-dependent kinase inhibitor 2D (p19, inhibits CDK4)
  Uniprot ID: P55273
  ENST ID: ENST00000393599
  CDS Start-End: 326-826
gagcagaccccgcccggcgaggaggagggagggtgagttagggggagacccggcccccaaggggcgggcgccgggcagggccccgcgggcggccgagggttgggcccggctcccagcccctcgccgtcctccggctgacagggggaggagcccgccgggagggccggggtctcgggctggggagccgggacgggagagcagcgcagccgggtgcaccgcggccgcgccccgggagggctgttcgggccagcgcccgccggctgctccgcgctgacagcgccgggctggggcggggcggggggctttgcaggccgccagtgtcgacatgctgctggaggaggttcgcgccggcgaccggctgagtggggcggcggcccggggcgacgtgcaggaggtgcgccgccttctgcaccgggagctggtgcatcccgacgccctcaaccgcttcggcaagacggcgctgcaggtcatgatgtttggcagcaccgccatcgccctggagctgctgaagcaaggtgccagccccaatgtccaggacacctccggtaccagtccagtccatgacgcagcccgcactggattcctggacaccctgaaggtcctagtggagcacggggctgatgtcaacgtgcctgatggcaccggggcacttccaatccatctggcagttcaagagggtcacactgctgtggtcagctttctggcagctgaatctgatctccatcgcagggacgccaggggtctcacacccttggagctggcactgcagagaggggctcaggacctcgtggacatcctgcagggccacatggtggccccgctgtgatctggggtcaccctctccagcaagagaaccccgtggggttatgtatcagaagagaggggaagaaacactttctcttcttgtttctcctgcccactgctgcagtaggggaggagcacagtttgtggcttataggtgttggttttgggggtgtgagtgtttgggggacgtttctcatttgtttttctcactccttttggtgtgttggacagagaagggctcctgcaggccacagccacctaaacggttcagtttcttctgcgcctcaggctgctggggcctcagacgagacccaagggcagagcatttaagagtgaagtcatgacctccagggagcctagaagctggtggccttggccggctgtgctcagagacctgaagtgtgcacgttgcttcaggcatggggggtggggggagcgtcccaaatcaataagaaggtagaatgagttatgagttattcatattctgttggaagcttgttttccagtctcttgtacagcgttttaaaagaaatggattctatttattatgctttattggaaaaaatgttgtaataatttaatgtttttacccattaaattaagacttgtgcatgatca

SEQ ID NO: 123837 - DNA, 893 bp, Homo sapiens
  Payload ID: 4302
  Gene Symbol: CDKN3
  Gene Name: cyclin-dependent kinase inhibitor 3
  Uniprot ID: Q16667
  ENST ID: ENST00000335183
  CDS Start-End: 115-753
acagaaggacgaaccagtgagctaagctgcggggcgcgggctcggccggggcaccggtgagtcgccggcgctgcagagggaggcggcactggtctcgacgtggggcggccagcgatgaagccgcccagttcaatacaaacaagtgagtttgactcatcagatgaagagcctattgaagatgaacagactccaattcatatatcatggctatctttgtcacgagtgaattgttctcagtttctcggtttatgtgctcttccaggttgtaaatttaaagatgttagaagaaatgtccaaaaagatacagaagaactaaagagctgtggtatacaagacatatttgttttctgcaccagaggggaactgtcaaaatatagagtcccaaaccttctggatctctaccagcaatgtggaattatcacccatcatcatccaatcgcagatggagggactcctgacatagccagctgctgtgaaataatggaagagcttacaacctgccttaaaaattaccgaaaaaccttaatacactgctatggaggacttgggagatcttgtcttgtagctgcttgtctcctactatacctgtctgacacaatatcaccagagcaagccatagacagcctgcgagacctaagaggatccggggcaatacagaccatcaagcaatacaattatcttcatgagtttcgggacaaattagctgcacatctatcatcaagagattcacaatcaagatctgtatcaagataaaggaattcaaatagcatatatatgaccatgtctgaaatgtcagttctctagcataatttgtattgaaatgaaaccaccagtgttatcaacttgaatgtaaatgtacatgtgcagatattcctaaagttttattgacaaaa

SEQ ID NO: 123838 - DNA, 637 bp, Homo sapiens
  Payload ID: 4302
  Gene Symbol: CDKN3
  Gene Name: cyclin-dependent kinase inhibitor 3
  ENST ID: ENST00000395577
  CDS Start-End: 1-501
atgaatccctgttgtaaatttaaagatgttagaagaaatgtccaaaaagatacagaagaactaaagagctgtggtatacaagacatatttgttttctgcaccagaggggaactgtcaaaatatagagtcccaaaccttctggatctctaccagcaatgtggaattatcacccatcatcatccaatcgcagatggagggactcctgacatagccagctgctgtgaaataatggaagagcttacaacctgccttaaaaattaccgaaaaaccttaatacactgctatggaggacttgggagatcttgtcttgtagctgcttgtctcctactatacctgtctgacacaatatcaccagagcaagccatagacagcctgcgagacctaagaggatccggggcaatacagaccatcaagcaatacaattatcttcatgagtttcgggacaaattagctgcacatctatcatcaagagattcacaatcaagatctgtatcaagataaaggaattcaaatagcatatatatgaccatgtctgaaatgtcagttctctagcataatttgtattgaaatgaaaccaccagtgttatcaacttgaatgtaaatgtacatgtgcagatattcctaaagttttattgac

SEQ ID NO: 123839 - DNA, 845 bp, Homo sapiens
  Payload ID: 4302
  Gene Symbol: CDKN3
  Gene Name: cyclin-dependent kinase inhibitor 3
  ENST ID: ENST00000458126
  CDS Start-End: 70-705
ccggggcaccggtgagtcgccggcgctgcagagggaggcggcactggtctcgacgtggggcggccagcgatgaagccgcccagttcaatacaaacaagtgagtttgactcatcagatgaagagcctattgaagatgaacagactccaattcatatatcatggctatctttgtcacgagtgaattgttctcagtttctcggtttatgtgctcttccaggttgtaaatttaaagatgttagaagaaatgtccaaaaagatacagaagaactaaagagctgtggtatacaagacatatttgttttctgcaccagaggggaactgtcaaaatatagagtcccaaaccttctggatctctaccagcaatgtggaattatcacccatcatcatccaatcgcagatggagggactcctgacatagccagctgctgtgaaataatggaagagcttacaacctgccttaaaaattaccgaaaaaccttaatacactgctatggaggacttgggagatcttgtcttgctgcttgtctcctactatacctgtctgacacaatatcaccagagcaagccatagacagcctgcgagacctaagaggatccggggcaatacagaccatcaagcaatacaattatcttcatgagtttcgggacaaattagctgcacatctatcatcaagagattcacaatcaagatctgtatcaagataaaggaattcaaatagcatatatatgaccatgtctgaaatgtcagttctctagcataatttgtattgaaatgaaaccaccagtgttatcaacttgaatgtaaatgtacatgtgcagatattcctaaagttttattgacaaaa

SEQ ID NO: 123840 - DNA, 727 bp, Homo sapiens
  Payload ID: 4302
  Gene Symbol: CDKN3
  Gene Name: cyclin-dependent kinase inhibitor 3
  Uniprot ID: Q16667
  ENST ID: ENST00000442975
  CDS Start-End: 75-593
ctcggccggggcaccggtgagtcgccggcgctgcagagggaggcggcactggtctcgacgtggggcggccagcgatgaagccgcccagttcaatacaaacaagttgtaaatttaaagatgttagaagaaatgtccaaaaagatacagaagaactaaagagctgtggtatacaagacatatttgttttctgcaccagaggggaactgtcaaaatatagagtcccaaaccttctggatctctaccagcaatgtggaattatcacccatcatcatccaatcgcagatggagggactcctgacatagccagctgctgtgaaataatggaagagcttacaacctgccttaaaaattaccgaaaaaccttaatacactgctatggaggacttgggagatcttgtcttgtagctgcttgtctcctactatacctgtctgacacaatatcaccagagcaagccatagacagcctgcgagacctaagaggatccggggcaatacagaccatcaagcaatacaattatcttcatgagtttcgggacaaattagctgcacatctatcatcaagagattcacaatcaagatctgtatcaagataaaggaattcaaatagcatatatatgaccatgtctgaaatgtcagttctctagcataatttgtattgaaatgaaaccaccagtgttatcaacttgaatgtaaatgtacatgtgcagatattcctaaagttttattg

SEQ ID NO: 123841 - DNA, 610 bp, Homo sapiens
  Payload ID: 4302
  Gene Symbol: CDKN3
  Gene Name: cyclin-dependent kinase inhibitor 3
  ENST ID: ENST00000543789
  CDS Start-End: 91-537
agctgcggggcgcgggctcggccggggcaccggtgagtcgccggcgctgcagagggaggcggcactggtctcgacgtggggcggccagcgatgaagccgcccagttcaatacaaacaagtgagtttgactcatcagatgaagagcctattgaagatgaacagactccaattcatatatcatggctatctttgtcacgagtgaattgttctcagtttctcggtttatgtgctcttccaggttgtaaatttaaagatgttagaagaaatgtccaaaaagatacagaagaactaaagagctgtggtatacaagacatatttgttttctgcaccagaggggaactgtcaaaatatagagtcccaaaccttctggatctctaccagcaatgtggaattatcacccatcatcatccaatcgcagatggagggactcctgacatagccagctgctgtgaaataatggaagagcttacaacctgccttaaaaattaccgaaaaaccttaatacatagctgcttgtctcctactatacctgtctgacacaatatcaccagagcaagccatagacagcctgcgagacctaagaggatccggggcaatacagaccatcaag

SEQ ID NO: 123842 - DNA, 1070 bp, Homo sapiens
  Payload ID: 4302
  Gene Symbol: CDKN3
  Gene Name: cyclin-dependent kinase inhibitor 3
  ENST ID: ENST00000541304
  CDS Start-End: 41-481
agagggaggcggcactggtctcgacgtggggcggccagcgatgaagccgcccagttcaatacaaacaagtgagtttgactcatcagatgaagagcctattgaagatgaacagactccaattcatatatcatggctatctttgtcacgagtgaattgttctcagtttctcggtttatgtgctcttccaggttgtaaatttaaagatgttagaagaaatgtccaaaaagatacagaagaactaaagagctgtggtatacaagacatatttgttttctgcaccagaggggaactgtcaaaatatagagtcccaaaccttctggatctctaccagcaatgtggaattatcacccatcatcatccaatcgcagatggagggactcctgacatagccagctgctgtgaaataatggaagagcttacaacctgccttaaaaattaccgaaaaaccttaatacaagctttcgaaggtgtcctacggtgactagtttattttctatccattctgccatctttgaggacccacacttctagacagctatagagcttatccttcagcaacaggatctggtaaacctttttcactgacctgttgtctaccagtgctgtctcactggttctgcctggacatttgcagccctttataaaattagtgaacaacactgcttgcctactgtattttgtagtttcttggggctattgtaacaaagtaccacaaaccaggtagctgaaaacaacagaaatttcttctttcccatttctagaggatgtaagtccaaaattaagatgagagcagagccatgccctctgagactgaggagagtccttccatgcctcttcctagcttctggtggtggccatcaatccatggcaggccttggcttgcagctgaatccctccagtctgcctctgtcatcacacacttcctcggatgtctgtgtctttgcatggtgttgtccttgtgtaaggacactagtcatctaggatgagggcctgctctaattcgtcttaacttgaatatacctgcaaagactcaaattctgaataaggtcccactcacaggtacaggataa

SEQ ID NO: 123843 - DNA, 938 bp, Homo sapiens
  Payload ID: 4302
  Gene Symbol: CDKN3
  Gene Name: cyclin-dependent kinase inhibitor 3
  ENST ID: ENST00000556102
  CDS Start-End: 67-678
gggcaccggtgagtcgccggcgctgcagagggaggcggcactggtctcgacgtggggcggccagcgatgaagccgcccagttcaatacaaacaagtgagtttgactcatcagatgaagagcctattgaagatgaacagactccaattcatatatcatggctatctttgtcacgagtgaattgttctcagtttctcggtttatgtgctcttccaggttgtaaatttaaagatgttagaagaaatgtccaaaaagatacagaagaactaaagagctgtggtatacaagacatatttgttttctgcaccagaggggaactgtcaaaatatagagtcccaaaccttctggatctctaccagcaatgtggaattatcacccatcatcatccaatcgcagatggagggactcctgacatagccagctgctgtgaaataatggaagagcttacaacctgccttaaaaattaccgaaaaaccttaatacactgctatggaggacttgggagatcttgtcttgtagctgcttgtctcctactatacctgtctgacacaatatcaccagagcaagccatagacagcctgcgagacctaagaggatccggggcaatacagaccatcaaggatctacctacttctcagtttttgccccagtccgttttgggaatggatcctctcacctaggacaatgagatggttattgttaatacaaacttgcaatacaattatcttcatgagtttcgggacaaattagctgcacatctatcatcaagagattcacaatcaagatctgtatcaagataaaggaattcaaatagcatatatatgaccatgtctgaaatgtcagttctctagcataatttgtattgaaatgaaaccaccagtgttatcaacttgaatgtaaatgtacatgtgcagatattcctaaagttttattgacaaaa

SEQ ID NO: 123844 - DNA, 196 bp, Homo sapiens
  Payload ID: 4302
  Gene Symbol: CDKN3
  Gene Name: cyclin-dependent kinase inhibitor 3
  ENST ID: ENST00000620759
  CDS Start-End: 1-108
ttgaagcccagttcaatacaaacaagtgagtttgactcatcagatgaagagcctattgaagatgaacagactccaattcatatatcatggctatctttgacaaattagctgcacatctatcatcaagagattcacaatcaagatctgtatcaagataaaggaattcaaatagcatatatatgaccatgtctgaaat

SEQ ID NO: 123845 - DNA, 874 bp, Homo sapiens
  Payload ID: 4302
  Gene Symbol: CDKN3
  Gene Name: cyclin-dependent kinase inhibitor 3
  ENST ID: ENST00000611205
  CDS Start-End: 115-738
acagaaggacgaaccagtgagctaagctgcggggcgcgggctcggccggggcaccggtgagtcgccggcgctgcagagggaggcggcactggtctcgacgtggggcggccagcgatgaagccgcccagttcaatacaaacaagtgagtttgactcatcagatgaagagcctattgaagatgaacagactccaattcatatatcatggctatctttgtcacgagtgaattgttctcagtttctcggtttatgtgctcttccaggttgtaaatttaaagatgttagaagaaatgtccaaaaagatacagaagaactaaagagctgtggtatacaagacatatttgttttctgcaccagaggggaactgtcaaaatatagagtcccaaaccttctggatctctaccagcaatgtggaattatcacccatcatcatccaatcgcagatggagggactcctgacatagccagctgctgtgaaataatggaagagcttacaacctgccttaaaaaaataagctgctatggaggacttgggagatcttgtcttgtagctgcttgtctcctactatacctgtctgacacaatatcaccagagcaagccatagacagcctgcgagacctaagaggatccggggcaatacagaccatcaagcaatacaattatcttcatgagtttcgggacaaattagctgcacatctatcatcaagagattcacaatcaagatctgtatcaagataaaggaattcaaatagcatatatatgaccatgtctgaaatgtcagttctctagcataatttgtattgaaatgaaaccaccagtgttatcaacttgaatgtaaatgtacatgtgcagatattcctaaagttttattgac

SEQ ID NO: 123846 - DNA, 2209 bp, Homo sapiens
  Payload ID: 4303
  Gene Symbol: CDKL1
  Gene Name: cyclin-dependent kinase-like 1 (CDC2-related kinase)
  ENST ID: ENST00000216378
  CDS Start-End: 646-1476
acagcagaagactgccgtggaaccttccctactgtagaggaaagtgctgactttaagcaatttctgcagtcacgccttcctcttctttcctttctccctctcattcattcactgacgccgcagcactgatcagcacagacacagaagatgcctccaagggaccaaagggaataaccgcggttctgaggaccgtgacaaacactcatcgttgggtggggctctagtgcagtccgttggtgccaatattttataagcgacgttttcaaactatgtgaagatcctttcttttcttttctttctttcttttttttttttttttttttttttttttgagacggaatctcgctctgtcgcccgggctggagtgcagtggcgcgatctcggctcactgcaacctgcgcctcccaggttcacgcgattctcctgcctcagtctcctgagttgctgggactacgggcgcccatcaccacacccggctaattttttgtatctttagtagagacggagtttcagtatgttggccagactggtctcgaactcctgacctcaggtgatctgcccgcctcagcctcccaaagtgctgggattacaggcgtgagccaccattctcggctgaagatccattttaagaagatttattcctctatgatggagaagtatgaaaaaattgggaaaattggagaaggatcctatggagttgttttcaaatgtagaaacagggacacgggtcagattgtggccatcaagaagtttctggaatcagaagatgaccctgtcataaagaaaattgcccttcgggaaatccgaatgctcaagcaactcaagcatcccaaccttgttaacctcctggaagtcttcaggaggaaacggaggcttcacctggtgtttgaatattgtgaccacacagttctccatgagttggacagataccaaagaggggtaccagaacatctcgtgaagagcataacttggcagacactgcaagctgtaaatttttgccataaacacaattgcatacatagagacgtgaagccagaaaatatcctcatcacgaaacattccgtgattaagctttgtgactttggatttgctcggcttttgactggaccgagtgactactatacagactacgtggctaccaggtggtaccgctcccctgagctgctggtgggggacacgcagtacggccccccggtggatgtttgggcaattggctgtgtctttgctgagctgctgtcaggagtgcctctgtggccaggaaaatcggatgtggatcagctgtatctgattaggaagaccttgggggatctcattcctaggcaccagcaagtgtttagcacgaatcagtacttcagtggagtgaaaattccagaccctgaagatatggaaccacttgaattaaaattcccaaacatctcttatcctgccctggggctcctaaagggcagagtaccaattgcttcaagaacagaataaggtggagaaaatgatttttcattactacttctagaaactatttatttaatatgtgagtgccatttaggaatgactggaaggaactaaaatcatgactggtgtgttttcctgccttttcccccttcttattgcaactgaagtttcatctttcaaagaagaaaaaaatgacattaataagttaatacaattttgaagaagtaagaagaaggaattttctgttcttttagggctgtctccacatggaccctactcaaaggctgacatgtgaacagctgttgcatcacccatattttgaaaacatcagagaaatagaggatttggcaaaagaacacaacaaaccaacaaggaagaccctaagaaagagccgaaagcaccactgctttacagaaacatccaaggttataatttgaaatgatctcctacctgccacctggtacagagagttggaatctagacttgaggatggcagttgtggctttcagctccagcatcctcattccagcactaggagacaggtcataggatctatcaaccagggccccagggacatctgtctcctgaagccccctctccctgaatcctaaaggtgcccttgtcctgctgcttcctgatgccacacaggggccagggtttccagcctgcatgagcacaggtctcaacaaggtacatgagtatgagtccagctaaggagactttttgggctttggaaaatgaaatcagattttccccatgc

SEQ ID NO: 123847 - DNA, 1775 bp, Homo sapiens
  Payload ID: 4303
  Gene Symbol: CDKL1
  Gene Name: cyclin-dependent kinase-like 1 (CDC2-related kinase)
  Uniprot ID: Q00532
  ENST ID: ENST00000395834
  CDS Start-End: 29-1105
gatccattttaagaagatttattcctctatgatggagaagtatgaaaaaattgggaaaattggagaaggatcctatggagttgttttcaaatgtagaaacagggacacgggtcagattgtggccatcaagaagtttctggaatcagaagatgaccctgtcataaagaaaattgcccttcgggaaatccgaatgctcaagcaactcaagcatcccaaccttgttaacctcctggaagtcttcaggaggaaacggaggcttcacctggtgtttgaatattgtgaccacacagttctccatgagttggacagataccaaagaggggtaccagaacatctcgtgaagagcataacttggcagacactgcaagctgtaaatttttgccataaacacaattgcatacatagagacgtgaagccagaaaatatcctcatcacgaaacattccgtgattaagctttgtgactttggatttgctcggcttttgactggaccgagtgactactatacagactacgtggctaccaggtggtaccgctcccctgagctgctggtgggggacacgcagtacggccccccggtggatgtttgggcaattggctgtgtctttgctgagctgctgtcaggagtgcctctgtggccaggaaaatcggatgtggatcagctgtatctgattaggaagaccttgggggatctcattcctaggcaccagcaagtgtttagcacgaatcagtacttcagtggagtgaaaattccagaccctgaagatatggaaccacttgaattaaaattcccaaacatctcttatcctgccctggggctcctaaagggctgtctccacatggaccctactcaaaggctgacatgtgaacagctgttgcatcacccatattttgaaaacatcagagaaatagaggatttggcaaaagaacacaacaaaccaacaaggaagaccctaagaaagagccgaaagcaccactgctttacagaaacatccaagttgcagtacctaccccagctaactggcagcagcatccttccagctttggataataagaagtactactgtgataccaagaaacttaactaccgttttccaaacatttaaaggagctaggagacatgattttaaaaaaggaatcaatagatgctttgaagaaaataaaacttatacagttgattgaaaacaattacaatgttgaaaacacaccaggagaaaacataagcaagaaactgggaggccaactggcaagatatgaagggaaattccagatccagtcttccatgcttgatgatggtgtccagaaaagaaaaaacctgtttggagttgcacttgtatttcagtttatgtaagtagccgaacttatggacagaatatgaactgtcccatacctctggcaaaactagatgatatcaaaaagatttatgcttcagttgtaccacatgccacacaagaaaaatgaaccacaaaatgcccatatatatttcctcggatctctgttgcctgagtcctatctcctgcctctcagattgtttcagcatcatatttaagatagttctatttcttgaaatcaaaatgtttaaaatcccatttcctgcttgctctatttcttgatttttatattttaaaacattttgagggtaacacttaggttcaaaatatttaaaagcatatgaattatcacaaaagcttggtaatttataatttaattatatgtttccacatttcatccttactttatcagtaaaggatacaccttagtcacttttgcaggcaa

SEQ ID NO: 123848 - DNA, 210 bp, Homo sapiens
  Payload ID: 4303
  Gene Symbol: CDKL1
  Gene Name: cyclin-dependent kinase-like 1 (CDC2-related kinase)
  ENST ID: ENST00000525911
  CDS Start-End: 1-210
gggatctcattcctaggcaccagcaagtgtttagcacgaatcagtacttcagtggagtgaaaattccagaccctgaagatatggaaccacttgaattaaaattcccaaacatctcttatcctgccctggggctcctaaagttgcagtacctaccccagctaactggcagcagcatccttccagctttggataataagaagtactactgtg

SEQ ID NO: 123849 - DNA, 745 bp, Homo sapiens
  Payload ID: 4303
  Gene Symbol: CDKL1
  Gene Name: cyclin-dependent kinase-like 1 (CDC2-related kinase)
  ENST ID: ENST00000534267
  CDS Start-End: 1-421
ggcaattggctgtgtctttgctgagctgctgtcaggagtgcctctgtggccaggaaaatcggatgtggatcagctgtatctgattaggaagaccttgggggatctcattcctaggcaccagcaagtgtttagcacgaatcagtacttcagtggagtgaaaattccagaccctgaagatatggaaccacttgaattaaaattcccaaacatctcttatcctgccctggggctcctaaagggctgtctccacatggaccctactcaaaggctgacatgtgaacagctgttgcatcacccatattttgaaaacatcagagaaatagaggatttggcaaaagaacacaacaaaccaacaaggaagaccctaagaaagagccgaaagcaccactgctttacagaaacatccaaggttataatttgaaatgatctcctacctgccacctggtacagagagttggaatctagacttgaggatggcagttgtggctttcagctccagcatcctcattccagcactaggagacaggtcataggatctatcaaccagggccccagggacatctgtctcctgaagccccctctccctgaatcctaaaggtgcccttgtcctgctgcttcctgatgccacacaggggccagggtttccagcctgcatgagcacaggtctcaacaaggtacatgagtatgagtccagctaaggagactttttgggctttggaaaatgaaatcagattttccccatgca

SEQ ID NO: 123850 - DNA, 2565 bp, Homo sapiens
  Payload ID: 4304
  Gene Symbol: CDKL2
  Gene Name: cyclin-dependent kinase-like 2 (CDC2-related kinase)
  ENST ID: ENST00000307465
  CDS Start-End: 515-2227
cttgcagctccgcggccaacgccttcgcccaggggtagttggagcggtgcaggttcccaggctccaggtactgggcgccttacgagctgggaggtggtgcctctcacccagctaattgctctctagcccttggccttcacaggtgttggtgcctgccgtgaacgcattctgacctgggccgtatctgtctcccaagactttgtgcctatggttggggacagagtgaggtcgttgccttgacgacgacagcatgcggcccgtggtcctcctaagtgtgagcttgcggcggaccgaggcccacctgcctccctgcctgcttcgccctggactcgtgactgcgtccgcagaagaaatcacaacagcgctggaattgctagtttgctaggcagcatcttttggacctgcgaaccatatgcatttcacctcaaatttgtttccaagttgaaaacctttgggtctttctatgcgaacggattgaagaaacgcaaaaagtttctacggactttaaattaaaatggaaaaatatgaaaacctgggtttggttggagaagggagttatggaatggtgatgaagtgtaggaataaagatactggaagaattgtggccataaagaagttcttagaaagtgacgatgacaaaatggttaaaaagattgcaatgcgagaaatcaagttactaaagcaacttaggcatgaaaacttggtgaatctcttggaagtgtgtaagaaaaaaaaacgatggtacctagtctttgaatttgttgaccacacaattcttgatgacttggagctctttccaaatggactagactaccaagtagttcaaaagtatttgtttcagattattaatggaattggattttgtcacagtcacaatatcatacacagagatataaagccagagaatatattagtctcccagtctggcgttgtcaagctatgcgattttggatttgcgcgaacattggcagctcctggggaggtttatactgattatgtggcaacccgatggtacagagctccagaactattggttggtgatgtcaagtatggcaaggctgttgatgtgtgggccattggttgtctggtaactgaaatgttcatgggggaacccctatttcctggagattctgatattgatcagctatatcatattatgatgtgtttaggtaatctaattccaaggcatcaggagctttttaataaaaatcctgtgtttgctggagtaaggttgcctgaaatcaaggaaagagaacctcttgaaagacgctatcctaagctctctgaagtggtgatagatttagcaaagaaatgcttacatattgaccccgacaaaagacccttctgtgctgagctcctacaccatgatttctttcaaatggatggatttgctgagaggttttcccaagaactacagttaaaagtacagaaagatgccagaaatgtttctttatctaaaaaatcccaaaacagaaagaaggaaaaagaaaaagatgattccttagttgaagaaagaaaaacacttgtggtacaggataccaatgctgatcccaaaattaaggattataaactatttaaaataaaaggctcaaaaattgatggagaaaaagctgaaaaaggcaatagagcttcaaatgccagctgtctccatgacagtaggacaagccacaacaaaatagtgccttcaacaagcctcaaagactgcagcaatgtcagcgtggaccacacaaggaatccaagcgtggcaattcccccacttacacacaatctttctgcagttgctcccagcattaattctggaatggggactgagactataccaattcagggttacagagtggatgagaaaactaagaagtgttctattccatttgttaaaccgaacagacattccccatcaggcatttataacattaatgtgaccacattagtctctagtgaaaaaaacctcttttgggcaagtaagaaaagaagagaatactccaggacagatgtccgtttgcctgaactaaactataatcatctccctgaactaagagcactgggaggcatagctcgaaattccaggctaacaaagaaagagagcaaaattctttcagaatctcgaattccttctctggctgctattgacctgcacacccccagtattacattacatcaggtatcaggacctcccctgtcagatgattcaggggctgatttgcctcaaatggaacaccagcactgagaaccattttggttctgaactggatgatgctcttgcacttgagatgacatcttcttgcagcaagagtgctgatatcccaagaggagagattcatggttttgatcatttccttctgaactgcctgcattttctgaggaaggccttctagaagaaggaaagacaaagacttccaaatgtttcaaaggaagattgaacaaatggccctccccaactgttatcccattacctttcacgtccaccgatgctatttcaagacatatccagtggaataacagtgatatggttcttgttacatgaatgtgtatttactgttaggagattgtatattttaagttacc

SEQ ID NO: 123851 - DNA, 3383 bp, Homo sapiens
  Payload ID: 4304
  Gene Symbol: CDKL2
  Gene Name: cyclin-dependent kinase-like 2 (CDC2-related kinase)
  Uniprot ID: Q92772
  ENST ID: ENST00000429927
  CDS Start-End: 705-2186
cctcctgacgagaaccaaggcgtgtggggacgcagggcctctgcgtgtcagggagcagaacctgggccgagccctaggtgaaggggcggggtggttggccctgagccaatcatggctcgtgacgactcggctcggccaatcagaagaagggaggcctggcgctctcggggcgggtgagaaaccgcccccccttgcagctccgcggccaacgccttcgcccaggggtagttggagcggtgcaggttcccaggctccaggtactgggcgccttacgagctgggaggtggtgcctctcacccagctaattgctctctagcccttggccttcacaggtgttggtgcctgccgtgaacgcattctgacctgggccgtatctgtctcccaagactttgtgcctatggttggggacagagtgaggtcgttgccttgacgacgacagcatgcggcccgtggtcctcctaagtgtgagcttgcggcggaccgaggcccacctgcctccctgcctgcttcgccctggactcgtgactgcgtccgcagaagaaatcacaacagcgctggaattgctagtttgctaggcagcatcttttggacctgcgaaccatatgcatttcacctcaaatttgtttccaagttgaaaacctttgggtctttctatgcgaacggattgaagaaacgcaaaaagtttctacggactttaaattaaaatggaaaaatatgaaaacctgggtttggttggagaagggagttatggaatggtgatgaagtgtaggaataaagatactggaagaattgtggccataaagaagttcttagaaagtgacgatgacaaaatggttaaaaagattgcaatgcgagaaatcaagttactaaagcaacttaggcatgaaaacttggtgaatctcttggaagtgtgtaagaaaaaaaaacgatggtacctagtctttgaatttgttgaccacacaattcttgatgacttggagctctttccaaatggactagactaccaagtagttcaaaagtatttgtttcagattattaatggaattggattttgtcacagtcacaatatcatacacagagatataaagccagagaatatattagtctcccagtctggcgttgtcaagctatgcgattttggatttgcgcgaacattggcagctcctggggaggtttatactgattatgtggcaacccgatggtacagagctccagaactattggttggtgatgtcaagtatggcaaggctgttgatgtgtgggccattggttgtctggtaactgaaatgttcatgggggaacccctatttcctggagattctgatattgatcagctatatcatattatgatgtgtttaggtaatctaattccaaggcatcaggagctttttaataaaaatcctgtgtttgctggagtaaggttgcctgaaatcaaggaaagagaacctcttgaaagacgctatcctaagctctctgaagtggtgatagatttagcaaagaaatgcttacatattgaccccgacaaaagacccttctgtgctgagctcctacaccatgatttctttcaaatggatggatttgctgagaggttttcccaagaactacagttaaaagtacagaaagatgccagaaatgtttctttatctaaaaaatcccaaaacagaaagaaggaaaaagaaaaagatgattccttagttgaagaaagaaaaacacttgtggtacaggataccaatgctgatcccaaaattaaggattataaactatttaaaataaaaggctcaaaaattgatggagaaaaagctgaaaaaggcaatagagcttcaaatgccagctgtctccatgacagtaggacaagccacaacaaaatagtgccttcaacaagcctcaaagactgcagcaatgtcagcgtggaccacacaaggaatccaagcgtggcaattcccccacttacacacaatctttctgcagttgctcccagcattaattctggaatggggactgagactataccaattcagggttacagagtggatgagaaaactaagaagtgttctattccatttgttaaaccgaacagacattccccatcaggcatttataacattaatgtgaccacattagtatcaggacctcccctgtcagatgattcaggggctgatttgcctcaaatggaacaccagcactgagaaccattttggttctgaactggatgatgctcttgcacttgagatgacatcttcttgcagcaagagtgctgatatcccaagaggagagattcatggttttgatcatttccttctgaactgcctgcattttctgaggaaggccttctagaagaaggaaagacaaagacttccaaatgtttcaaaggaagattgaacaaatggccctccccaactgttatcccattacctttcacgtccaccgatgctatttcaagacatatccagtggaataacagtgatatggttcttgttacatgaatgtgtatttactgttaggagattgtatattttaagttaccatgattaaaagtgtgtaaaaaagggggacagagagaaatactataaaaggccatgttactcatgcattgaactttgtgtgttttctgtataaatgtgtacatttatttaggagtgggtttcttgggggtaggtgataaaaattaggatcagttgaagaaaattgaagaaactaggatcagtaagagaaactgtttgctttacctgaatttaactatgaaaacacacttaacaatcttacacgtttctagatattaagtgaatatgtaactcctgtccatgggtagatgtgtatctttgacttctgtaattatttttgatattctatcagtgtattatgagactctggcctccctgcagatcttctaagaaccacactaatgcaagcgtgacagagaaacctctttcgaatgacttactacaactctggcattggttagttccatgtattgtaagattctggtgctaatgctccatacagaattgatcaggactgattactcttctgtggaccaattgctattgaactacccagctgaagagggtttggggagagaacgttcattattatggactccacttttgtcccctggtagtttaagggtgatactagaatccagagaagttcctgtctccttgtggcctcaaacactcaggccgtctcaaaagcttttcaccaaggtgcaaaatcatttacctgcattccacacatcttttccaatgcatggatccaaaactttttaggtgggaggaataaactaagttggctacaggttcttgatttctgggtttctacacatgctctgcatttatcattttagagaatggttgtttagggaaccagaatttgtgagttttttt

SEQ ID NO: 123852 - DNA, 965 bp, Homo sapiens
  Payload ID: 4304
  Gene Symbol: CDKL2
  Gene Name: cyclin-dependent kinase-like 2 (CDC2-related kinase)
  ENST ID: ENST00000506234
  CDS Start-End: 475-651
ggagcggtgcaggttcccaggctccaggtactgggcgccttacgagctgggaggtggtgcctctcacccagctaattgctctctagcccttggccttcacaggtgttggtgcctgccgtgaacgcattctgacctgggccgtatctgtctcccaagactttgtgcctatggttggggacagagtgaggtcgttgccttgacgacgacagcatgcggcccgtggtcctcctaagtgtgagcttgcggcggaccgaggcccacctgcctccctgcctgcttcgccctggactcgtgactgcgtccgcagaagaaatcacaacagcgctggaattgctagtttgctaggcagcatcttttggacctgcgaaccatatgcatttcacctcaaatttgtttccaagttgaaaacctttgggtctttctatgcgaacggattgaagaaacgcaaaaagtttctacggactttaaattaaaatggaaaaatatgaaaacctgggtttggttggagaagggagttatggaatggtgatgaagtgtaggaataaagatactggaagaattgtggccataaagaagttcttagaaagtgacgatgacaaaatggttaaaaagattgcaatgcgagaaatcaagttactaaaggtaatctaattccaaggcatcaggagctttttaataaaaatcctgtgtttgctggagtaaggttgcctgaaatcaaggaaagagaacctcttgaaagacgctatcctaagctctctgaagtggtgatagatttagcaaagaaatgcttacatattgaccccgacaaaagacccttctgtgctgagctcctacaccatgatttctttcaaatggatggatttgctgagaggttttcccaagaactacagttaaaagtacagaaagatgccagaaatgtttctttatctaaaaaatcccaaaacagaaagaaggaaaaagaaaaa

SEQ ID NO: 123853 - DNA, 2130 bp, Homo sapiens
  Payload ID: 4305
  Gene Symbol: CDKL3
  Gene Name: cyclin-dependent kinase-like 3
  Uniprot ID: Q8IVW4
  ENST ID: ENST00000265334
  CDS Start-End: 120-1898
ggaactacgcagagccagaccagcgggaccacagaatgggctgaggcggcggcggctgtttggataaagtcaacagcgggacgtggggcgtgacgccgtagtaaaagcccagcttgaaaatggagatgtatgaaacccttggaaaagtgggagagggaagttacggaacagtcatgaaatgtaaacataagaatactgggcagatagtggccattaagatattttatgagagaccagaacaatctgtcaacaaaattgcgatgagagaaataaagtttctaaagcaatttcatcacgaaaacctggtcaatctgattgaagtttttagacagaaaaagaaaattcatttggtatttgaatttattgaccacacagtattagatgagttacaacattattgtcatggactagagagtaagcgacttagaaaatacctcttccagatccttcgagcaattgactatcttcacagtaataatatcattcatcgagatataaaacctgagaatattttagtatcccagtcaggaattactaagctctgtgattttggttttgcacgaacactagcagctcctggggacatttatacggactatgtggccacacgctggtatagagctcccgaattagtattaaaagatacttcttatggaaaacctgtggatatctgggctttgggctgtatgatcattgagatggccactggaaatccctatcttcctagtagttctgatttggatttactccataaaattgttttgaaagtgggcaatttgtcacctcacttgcagaatatcttttccaagagccccatttttgctggggtagttcttcctcaagttcaacaccccaaaaatgcaagaaaaaaatatccaaagcttaatggattgttggcagatatagttcatgcttgtttacaaattgatcctgctgacaggatatcatctagtgatcttttgcatcatgagtattttactagagatggatttattgaaaaattcatgccagaactgaaagctaaattactgcaggaagcaaaagtcaattcattaataaagccaaaagagagttctaaagaaaatgaactcaggaaagatgaaagaaaaacagtttataccaatacactgctaagtagttcagttttgggaaaggaaatagaaaaagagaaaaagcccaaggagatcaaagtcagagttattaaagtcaaaggaggaagaggagatatctcagaaccaaaaaagaaagagtatgaaggtggacttggtcaacaggatgcaaatgaaaatgttcatcctatgtctccagatacaaaacttgtaaccattgaaccaccaaaccctatcaatcccagcactaactgtaatggcttgaaagaaaatccacattgcggaggttctgtgacaatgccacccatcaatctaactaacagtaatttgatggctgcaaatctcagttcaaatctctttcaccccagtgtgaggttaactgaaagagcaaaaaagagacgcacttcttcacaatctattggacaagttatgcctaatagcaggcaagaggatccaggtcctattcaaagccaaatggagaagggtatatttaatgagcgaacaggtcacagtgaccaaatggcaaatgagaacaaaaggaagctgaatttttccagatctgacaggaaagaattccattttccagaattgcctgtcacaatacagtcaaaagatacaaaaggaatggaagttaaacagataaaaatgctgaagagggagtcaaagaaaacagagtcatctaagataccaactttacttaacgtggatcaaaatcaagaaaaacaagagggtggagatggccattgcgaggggaagaatttgaagagaaacaggttttttttctggtagtgtcttttcttttacatagtccaaaaaatacaagatgacaactcttcccgttttatttatctacaatagaagtgtgatgtgagttgttgttaagacagccatccatgtgcatgagcatcatccagctttttttgttagcaaaacatttactgttttcttttcccttttaagactctgttgatgtgataatttgatttggaattataaagtcatctcttctctgcctacttct

SEQ ID NO: 123854 - DNA, 1198 bp, Homo sapiens
  Payload ID: 4305
  Gene Symbol: CDKL3
  Gene Name: cyclin-dependent kinase-like 3
  ENST ID: ENST00000519312
  CDS Start-End: 79-399
gtttagaacgggtcacgtgagcgcctcgcctggatgtgagtttcagccagacctgtggatatctgggctttgggctgtatgatcattgagatggccactggaaatccctatcttcctagtagttctgatttggatttactccataaaattgttttgaaagtgggcaatttgtcacctcacttgcagaatatcttttccaagagccccatttttgctggggtagttcttcctcaagttcaacaccccaaaaatgcaagaaaaaaatatccaaagcttaatggattgttggcagatatagttcatgcttgtttacaaattgatcctgctgacaggatatcatctagtgatcttttgcatcatgagtattttactagagatggatttattgaaaagaaatagaaaaagagaaaaagcccaaggagatcaaagtcagagttattaaagtcaaaggaggaagaggagatatctcagaaccaaaaaagaaagagtatgaaggtggacttggtcaacaggatgcaaatgaaaatgttcatcctatgtctccagatacaaaacttgtaaccattgaaccaccaaaccctatcaatcccagcactaactgtaatggcttgaaagaaaatccacattgcggaggttctgtgacaatgccacccatcaatctaactaacagtaatttgatggctgcaaatctcagttcaaatctctttcaccccagtgtgaggttaactgaaagagcaaaaaagagacgcacttcttcacaatctattggacaagttatgcctaatagcaggcaagaggatccaggtcctattcaaagccaaatggagaagggtatatttaatgagcgaacaggtcacagtgaccaaatggcaaatgagaacaaaaggaagctgaatttttccagatctgacaggaaagaattccattttccagaattgcctgtcacaatacagtcaaaagatacaaaaggaatggaagttaaacagataaaaatgctgaagagggagtcaaagaaaacagagtcatctaagataccaactttacttaacgtggatcaaaatcaagaaaaacaagaggtacgtctttatcagcggcatgaagacagaccaatacagtgaattggtaccagtagagtggggcattgctgaaaagatacccaaaaatgtggaagcaactttggaactgggtaacaggcaga

SEQ ID NO: 123855 - DNA, 466 bp, Homo sapiens
  Payload ID: 4305
  Gene Symbol: CDKL3
  Gene Name: cyclin-dependent kinase-like 3
  ENST ID: ENST00000518990
  CDS Start-End: 1-221
atacaaaaggaatggaagttaaacagataaaaatgctgaagagggagtcaaagaaaacagagtcatctaagataccaactttacttaacgtggatcaaaatcaagaaaaacaagagtttattcccttatctctgctgtctgcctgctgtcctattttcacaaatatttgctctcagctaactatcagggtggagatggccattgcgaggggaagaatttgaagagaaacaggttttttttctggtagtgtcttttcttttacatagtccaaaaaatacaagatgacaactcttcccgttttatttatctacaatagaagtgtgatgtgagttgttgttaagacagccatccatgtgcatgagcatcatccagctttttttgttagcaaaacatttactgttttcttttcccttttaagactctgttgatgtgataatttgatttggaattataaagtcatctcttc

SEQ ID NO: 123856 - DNA, 586 bp, Homo sapiens
  Payload ID: 4305
  Gene Symbol: CDKL3
  Gene Name: cyclin-dependent kinase-like 3
  ENST ID: ENST00000521755
  CDS Start-End: 36-170
cagccagacctgtggatatctgggctttgggctgtatgatcattgagatggccactggaaatccctatcttcctagtagttctgatttggatttactccataaaattgttttgaaagtgggaaatagaaaaagagaaaaagcccaaggagatcaaagtcagagttattaaagtcaaaggaggaagaggagatatctcagaaccaaaaaagaaagagtatgaaggtggacttggtcaacaggatgcaaatgaaaatgttcatcctatgtctccagatacaaaacttgtaaccattgaaccaccaaaccctatcaatcccagcactaactgtaatggcttgaaagaaaatccacattgcggaggttctgtgacaatgccacccatcaatctaactaacagtaatttgatggctgcaaatctcagttcaaatctctttcaccccagtgtgaggtgagctgtaacagagaagaaacctaaataatacaacattcctgtataatggtatttcaaagaatcgtgttcatagtgtctgtatgtaaactgaacttgaagaaaatatattgaaattaaagctgtataatgggcca

SEQ ID NO: 123857 - DNA, 652 bp, Homo sapiens
  Payload ID: 4305
  Gene Symbol: CDKL3
  Gene Name: cyclin-dependent kinase-like 3
  ENST ID: ENST00000520592
  CDS Start-End: 1-56
agcttaatggattgttggcagatatagttcatattcatgccagaactgaaagctaaattactgcaggaagcaaaagtcaattcattaataaagccaaaagagagttctaaagaaaatgaactcaggaaagatgaaagaaaaacagtttataccaatacactgctaagtagttcagttttgggaaaggaaatagaaaaagagaaaaagcccaaggagatcaaagtcagagttattaaagtcaaaggaggaagaggagatatctcagaaccaaaaaagaaagagtatgaaggtggacttggtcaacaggatgcaaatgaaaatgttcatcctatgtctccagatacaaaacttgtaaccattgaaccaccaaaccctatcaatcccagcactaactgtaatggcttgaaagaaaatccacattgcggaggttctgtgacaatgccacccatcaatctaactaacagtaatttgatggctgcaaatctcagttcaaatctctttcaccccagtgtgaggtgagctgtaacagagaagaaacctaaataatacaacattcctgtataatggtatttcaaagaatcgtgttcatagtgtctgtatgtaaactgaacttgaagaaaatatattgaaattaaagctgtataatgggcca

SEQ ID NO: 123858 - DNA, 1775 bp, Homo sapiens
  Payload ID: 4305
  Gene Symbol: CDKL3
  Gene Name: cyclin-dependent kinase-like 3
  ENST ID: ENST00000523054
  CDS Start-End: 447-1652
aacgggtcacgtgagcgcctcgcctggatgtgagtttcagccagcaatttcatcacgaaaacctggtcaatctgattgaagtttttagacagaaaaagaaaattcatttggtatttgaatttattgaccacacagtattagatgagttacaacattattgtcatggactagagagtaagcgacttagaaaatacctcttccagatccttcgagcaattgactatcttcacagtaataatatcattcatcgagatataaaacctgagaatattttagtatcccagtcaggaattactaagctctgtgattttggttttgcacgaacactagcagctcctggggacatttatacggactatgtggccacacgctggtatagagctcccgaattagtattaaaagatacttcttatggaaaacctgtggatatctgggctttgggctgtatgatcattgagatggccactggaaatccctatcttcctagtagttctgatttggatttactccataaaattgttttgaaagtgggcaatttgtcacctcacttgcagaatatcttttccaagagccccatttttgctggggtagttcttcctcaagttcaacaccccaaaaatgcaagaaaaaaatatccaaagcttaatggattgttggcagatatagttcatgcttgtttacaaattgatcctgctgacaggatatcatctagtgatcttttgcatcatgagtattttactagagatggatttattgaaaaattcatgccagaactgaaagctaaattactgcaggaagcaaaagtcaattcattaataaagccaaaagagagttctaaagaaaatgaactcaggaaagatgaaagaaaaacagtttataccaatacactgctaagtagttcagttttgggaaaggaaatagaaaaagagaaaaagcccaaggagatcaaagtcagagttattaaagtcaaaggaggaagaggagatatctcagaaccaaaaaagaaagagtatgaaggtggacttggtcaacaggatgcaaatgaaaatgttcatcctatgtctccagatacaaaacttgtaaccattgaaccaccaaaccctatcaatcccagcactaactgtaatggcttgaaagaaaatccacattgcggaggttctgtgacaatgccacccatcaatctaactaacagtaatttgatggctgcaaatctcagttcaaatctctttcaccccagtgtgaggttaactgaaagagcaaaaaagagacgcacttcttcacaatctattggacaagttatgcctaatagcaggcaagaggatccaggtcctattcaaagccaaatggagaagggtatatttaatgagcgaacaggtcacagtgaccaaatggcaaatgagaacaaaaggaagctgaatttttccagatctgacaggaaagaattccattttccagaattgcctgtcacaatacagtcaaaagatacaaaaggaatggaagttaaacagataaaaatgctgaagagggagtcaaagaaaacagagtcatctaagataccaactttacttaacgtggatcaaaatcaagaaaaacaagagaatacaggaaatgcacaaactgaaaggaagaagaacttgccagatgtagagtagaaaatgcagcagctgaaaattcagggaatcccagaatcactggtggagatggccattgcgaggggaagaatttgaagagaaacaggttttttttctggtagtgtcttttcttttacatagtcc

SEQ ID NO: 123859 - DNA, 2160 bp, Homo sapiens
  Payload ID: 4305
  Gene Symbol: CDKL3
  Gene Name: cyclin-dependent kinase-like 3
  ENST ID: ENST00000521118
  CDS Start-End: 116-1888
ctacgcagagccagaccagcgggaccacagaatgggctgaggcggcggcggctgtttggataaagtcaacagcgggacgtggggcgtgacgccgtagtaaaagcccagcttgaaaatggagatgtatgaaacccttggaaaagtgggagagggaagttacggaacagtcatgaaatgtaaacataagaatactgggcagatagtggccattaagatattttatgagagaccagaacaatctgtcaacaaaattgcgatgagagaaataaagtttctaaagcaatttcatcacgaaaacctggtcaatctgattgaagtttttagacagaaaaagaaaattcatttggtatttgaatttattgaccacacagtattagatgagttacaacattattgtcatggactagagagtaagcgacttagaaaatacctcttccagatccttcgagcaattgactatcttcacagtaataatatcattcatcgagatataaaacctgagaatattttagtatcccagtcaggaattactaagctctgtgattttggttttgcacgaacactagcagctcctggggacatttatacggactatgtggccacacgctggtatagagctcccgaattagtattaaaagatacttcttatggaaaacctgtggatatctgggctttgggctgtatgatcattgagatggccactggaaatccctatcttcctagtagttctgatttggatttactccataaaattgttttgaaagtgggcaatttgtcacctcacttgcagaatatcttttccaagagccccatttttgctggggtagttcttcctcaagttcaacaccccaaaaatgcaagaaaaaaatatccaaagcttaatggattgttggcagatatagttcatgcttgtttacaaattgatcctgctgacaggatatcatctagtgatcttttgcatcatgagtattttactagagatggatttattgaaaaattcatgccagaactgaaagctaaattactgcaggaagcaaaagtcaattcattaataaagccaaaagagagttctaaagaaaatgaactcaggaaagatgaaagaaaaacagtttataccaatacactgctaagtagttcagttttgggaaaggaaatagaaaaagagaaaaagcccaaggagatcaaagtcagagttattaaagtcaaaggaggaagaggagatatctcagaaccaaaaaagaaagagtatgaaggtggacttggtcaacaggatgcaaatgaaaatgttcatcctatgtctccagatacaaaacttgtaaccattgaaccaccaaaccctatcaatcccagcactaactgtaatggcttgaaagaaaatccacattgcggaggttctgtgacaatgccacccatcaatctaactaacagtaatttgatggctgcaaatctcagttcaaatctctttcaccccagtgtgaggttaactgaaagagcaaaaaagagacgcacttcttcacaatctattggacaagttatgcctaatagcaggcaagaggatccaggtcctattcaaagccaaatggagaagggtatatttaatgagcgaacaggtcacagtgaccaaatggcaaatgagaacaaaaggaagctgaatttttccagatctgacaggaaagaattccattttccagaattgcctgtcacaatacagtcaaaagatacaaaaggaatggaagttaaacagataaaaatgctgaagagggagtcaaagaaaacagagtcatctaagataccaactttacttaacgtggatcaaaatcaagaaaaacaagagaatacaggaaatgcacaaactgaaaggaagaagaacttgccagatgtagagtagaaaatgcagcagctgaaaattcagggaatcccagaatcactgtatggttttttaaaaatcctttttattaatgttacatacacaaaaatgctaactagataattttacaggtatatcgtaaatcctgttagttatatgtacattcacctaaatttgtttttaaatttattaatctttaaattattcatgttttcttaatttgaacatgaatttataaaaactacctgactggtacatcctaataaaattgcagcttacatttagtcatataa

SEQ ID NO: 123860 - DNA, 1501 bp, Homo sapiens
  Payload ID: 4305
  Gene Symbol: CDKL3
  Gene Name: cyclin-dependent kinase-like 3
  Uniprot ID: Q8IVW4
  ENST ID: ENST00000523832
  CDS Start-End: 1-1368
atggagatgtatgaaacccttggaaaagtgggagagggaagttacggaacagtcatgaaatgtaaacataagaatactgggcagatagtggccattaagatattttatgagagaccagaacaatctgtcaacaaaattgcgatgagagaaataaagtttctaaagcaatttcatcacgaaaacctggtcaatctgattgaagtttttagacagaaaaagaaaattcatttggtatttgaatttattgaccacacagtattagatgagttacaacattattgtcatggactagagagtaagcgacttagaaaatacctcttccagatccttcgagcaattgactatcttcacagtaataatatcattcatcgagatataaaacctgagaatattttagtatcccagtcaggaattactaagctctgtgattttggttttgcacgaacactagcagctcctggggacatttatacggactatgtggccacacgctggtatagagctcccgaattagtattaaaagatacttcttatggaaaacctgtggatatctgggctttgggctgtatgatcattgagatggccactggaaatccctatcttcctagtagttctgatttggatttactccataaaattgttttgaaagtgggcaatttgtcacctcacttgcagaatatcttttccaagagccccatttttgctggggtagttcttcctcaagttcaacaccccaaaaatgcaagaaaaaaatatccaaagcttaatggattgttggcagatatagttcatgcttgtttacaaattgatcctgctgacaggatatcatctagtgatcttttgcatcatgagtattttactagagatggatttattgaaaaattcatgccagaactgaaagctaaattactgcaggaagcaaaagtcaattcattaataaagccaaaagagagttctaaagaaaatgaactcaggaaagatgaaagaaaaacagtttataccaatacactgctaagtagttcagttttgggaaaggaaatagaaaaagagaaaaagcccaaggagatcaaagtcagagttattaaagtcaaaggaggaagaggagatatctcagaaccaaaaaagaaagagtatgaaggtggacttggtcaacaggatgcaaatgaaaatgttcatcctatgtctccagatacaaaacttgtaaccattgaaccaccaaaccctatcaatcccagcactaactgtaatggcttgaaagaaaatccacattgcggaggttctgtgacaatgccacccatcaatctaactaacagtaatttgatggctgcaaatctcagttcaaatctctttcaccccagtgtgaggtgagctgtaacagagaagaaacctaaataatacaacattcctgtataatggtatttcaaagaatcgtgttcatagtgtctgtatgtaaactgaacttgaagaaaatatattgaaattaaagctgtataatgggcca

SEQ ID NO: 123861 - DNA, 1417 bp, Homo sapiens
  Payload ID: 4305
  Gene Symbol: CDKL3
  Gene Name: cyclin-dependent kinase-like 3
  ENST ID: ENST00000520693
  CDS Start-End: 74-322
gaacgggtcacgtgagcgcctcgcctggatgtgagtttcagccagacctgtggatatctgggctttgggctgtatgatcattgagatggccactggaaatccctatcttcctagtagttctgatttggatttactccataaaattgttttgaaagtgggcaatttgtcacctcacttgcagaatatcttttccaagagccccatttttgctggggtagttcttcctcaagttcaacaccccaaaaatgcaagaaaaaaatatccaaagcttaatggattgttggcagatatagttcatattcatgccagaactgaaagctaaattactgcaggaagcaaaagtcaattcattaataaagccaaaagagagttctaaagaaaatgaactcaggaaagatgaaagaaaaacagtttataccaatacactgctaagtagttcagttttgggaaaggaaatagaaaaagagaaaaagcccaaggagatcaaagtcagagttattaaagtcaaaggaggaagaggagatatctcagaaccaaaaaagaaagagtatgaaggtggacttggtcaacaggatgcaaatgaaaatgttcatcctatgtctccagatacaaaacttgtaaccattgaaccaccaaaccctatcaatcccagcactaactgtaatggcttgaaagaaaatccacattgcggaggttctgtgacaatgccacccatcaatctaactaacagtaatttgatggctgcaaatctcagttcaaatctctttcaccccagtgtgaggttaactgaaagagcaaaaaagagacgcacttcttcacaatctattggacaagttatgcctaatagcaggcaagaggatccaggtcctattcaaagccaaatggagaagggtatatttaatgagcgaacaggtcacagtgaccaaatggcaaatgagaacaaaaggaagctgaatttttccagatctgacaggaaagaattccattttccagaattgcctgtcacaatacagtcaaaagatacaaaaggaatggaagttaaacagataaaaatgctgaagagggagtcaaagaaaacagagtcatctaagataccaactttacttaacgtggatcaaaatcaagaaaaacaagagtttattcccttatctctgctgtctgcctgctgtcctattttcacaaatatttgctctcagctaactatcaggtacgtctttatcagcggcatgaagacagaccaatacagtgaattggtaccagtagagtggggcattgctgaaaagatacccaaaaatgtggaagcaactttggaactgggtaacaggcagaggtttgaacagtttggagagctcagaagaagacaggaaaatgtgggaaagtttggaactttctagagacttgttgaatggctttgacc

SEQ ID NO: 123862 - DNA, 1567 bp, Homo sapiens
  Payload ID: 4306
  Gene Symbol: CDKL4
  Gene Name: cyclin-dependent kinase-like 4
  Uniprot ID: Q5MAI5
  ENST ID: ENST00000378803
  CDS Start-End: 1-948
atggaaaagtatgaaaaattagctaagactggagaagggtcttatggggttgtattcaaatgcagaaacaaaacctctggacaagtagtagctgttaaaaaatttgtggaatctgaagatgatcctgttgttaagaaaatagcactaagagaaatacgtatgttgaagcaattaaaacatccaaatcttgtgaacctcatcgaggtgttcaggagaaaaaggaaaatgcatttagtttttgaatactgtgatcatacacttttaaatgagctggaaagaaacccaaatggagttgctgatggagtgatcaaaagcgtattatggcaaacacttcaagctcttaatttctgtcatatacataactgtattcacagagatataaaacctgaaaatattctaataactaagcaaggaataatcaagatttgtgacttcgggtttgcacaaattctgattccaggagatgcctacaccgattatgtagctacgagatggtaccgagctcctgaacttcttgtgggagatactcagtatggttcttcagtcgatatatgggctattggttgtgtttttgcagagctcctgacaggccagccactgtggcctggaaaatcagatgtggaccaactttatctgataatcagaacactaggaaaattaatcccaagacatcaatcaatctttaaaagtaacgggtttttccatggcatcagtatacctgagccagaagacatggaaactcttgaggaaaagttctcagatgttcatcctgtggctctgaacttcatgaaggggtgtctgaagatgaatccagatgacagattaacctgttcccaactcctggagagctcctactttgattcttttcaagaggcccaaattaaaagaaaagcacgtaatgaaggaagaaacagaagacgccaacaggtacttccgctcaaaagttaaagtgctataaaaataattccttttttgtttttgtttgtctgcctttcaaagtgagacaaggtggacaccaagacctttcatttgtactggtgtagttgtatttgtctagcttaataaatattggtaattgatgtaataaaaccatagaactatgaaaatatcaagattattgcaaaaatcttattccaaacacacctgaatcaaatcgttacgcaactctttggctgctctgattggatatcccacccacaagatcgtatacccataatataacaacttcatataataaaatgctgattccaacaggactgagttttgccagcattgcaaaggaatccaagtgcctttctgtagcctccagatgtgcaataacggtaacttgactcttccatcttttcacccacagcaggcacctaagtctgcctttcctaggctttttctcaaaaccaagatctgccaggtacaaaggaatgaaacccagacatctgggaaccaaattctacccaatgggccaatattgcagaacagtatggtgactgttatgacaaacattaattctgcagtttatcaggtgactgtccttcacttgctttcagaaaactttgaagttaaatcgtaa

SEQ ID NO: 123863 - DNA, 1140 bp, Homo sapiens
  Payload ID: 4306
  Gene Symbol: CDKL4
  Gene Name: cyclin-dependent kinase-like 4
  Uniprot ID: Q5MAI5
  ENST ID: ENST00000395035
  CDS Start-End: 1-1140
atggaaaagtatgaaaaattagctaagactggagaagggtcttatggggttgtattcaaatgcagaaacaaaacctctggacaagtagtagctgttaaaaaatttgtggaatctgaagatgatcctgttgttaagaaaatagcactaagagaaatacgtatgttgaagcaattaaaacatccaaatcttgtgaacctcatcgaggtgttcaggagaaaaaggaaaatgcatttagtttttgaatactgtgatcatacacttttaaatgagctggaaagaaacccaaatggagttgctgatggagtgatcaaaagcgtattatggcaaacacttcaagctcttaatttctgtcatatacataactgtattcacagagatataaaacctgaaaatattctaataactaagcaaggaataatcaagatttgtgacttcgggtttgcacaaattctgattccaggagatgcctacaccgattatgtagctacgagatggtaccgagctcctgaacttcttgtgggagatactcagtatggttcttcagtcgatatatgggctattggttgtgtttttgcagagctcctgacaggccagccactgtggcctggaaaatcagatgtggaccaactttatctgataatcagaacactaggaaaattaatcccaagacatcaatcaatctttaaaagtaacgggtttttccatggcatcagtatacctgagccagaagacatggaaactcttgaggaaaagttctcagatgttcatcctgtggctctgaacttcatgaaggggtgtctgaagatgaatccagatgacagattaacctgttcccaactcctggagagctcctactttgattcttttcaagaggcccaaattaaaagaaaagcacgtaatgaaggaagaaacagaagacgccaacagcaggcacctaagtctgcctttcctaggctttttctcaaaaccaagatctgccaggtacaaaggaatgaaacccagacatctgggaaccaaattctacccaatgggccaatattgcagaacagtatggtgactgttatgacaaacattaattctgcagtttatcaggtgactgtccttcacttgctttcagaaaactttgaagttaaatcgtaa

SEQ ID NO: 123864 - DNA, 724 bp, Homo sapiens
  Payload ID: 4306
  Gene Symbol: CDKL4
  Gene Name: cyclin-dependent kinase-like 4
  ENST ID: ENST00000451199
  CDS Start-End: 1-375
aaattaatcccaagacatcaatcaatctttaaaagtaacgggtttttccatggcatcagtatacctgagccagaagacatggaaactcttgaggaaaagttctcagatgttcatcctgtggctctgaacttcatgaaggggtgtctgaagatgaatccagatgacagattaacctgttcccaactcctggagagctcctactttgattcttttcaagaggcccaaattaaaagaaaagcacgtaatgaaggaagaaacagaagacgccaacagaatcaactgttgcctctcataccaggaagccacatctcccccacacctgatggaagaaaacaagtcctccagttaaaatttgatcaccttccaaacatttaggaaaatgttctttcaagtgcaaagtaatttaatatgtacacattttgtacaagtgagataggaattctcagtgtttcaaatgcaaatgagccatatgaaaattaagatgccttctagaattgttttgctctgatcattgctgattcctttccccatgttttacatgccaactttatcttttagaatattttctttaaatgttataaagcctaaaactgcacatatggaagagacattttcaatttcatcagagcagcccctcccgaggctatctatatggagaatttgtgagcttatactttgatttatgaaaaagatttacatgtgtcatcttgcttcagctgaccac

SEQ ID NO: 123865 - DNA, 388 bp, Homo sapiens
  Payload ID: 4306
  Gene Symbol: CDKL4
  Gene Name: cyclin-dependent kinase-like 4
  ENST ID: ENST00000419111
  CDS Start-End: 57-233
gtgcagcattgtactgcaagtcaatcgatacaataatttaagtcacttcagctataatggaaaagtatgaaaaattagctaagactggagaagggtcttatggggttgtattcaaatgcagaaacaaaacctctggacaagtagtagctgttaaaaaatttgtggaatctgaagatgatcctgttgttaagaaaatagcactaagagaaatacgtatgttgaagagttgctgatggagtgatcaaaagcgtattatggcaaacacttcaagctcttaatttctgtcatatacataactgtattcacagagatataaaacctgaaaatattctaataactaagcaaggaataatcaagatttgtgacttcgggtttgcacaaattctga

SEQ ID NO: 123866 - DNA, 3463 bp, Homo sapiens
  Payload ID: 4307
  Gene Symbol: CDKL5
  Gene Name: cyclin-dependent kinase-like 5
  Uniprot ID: O76039
  ENST ID: ENST00000379989
  CDS Start-End: 286-3378
acctcaggactctttagagctctgagtgagtggggtgggggagttggaggaggaagaccctacaggaagttgagctgtactctccaacaggcgagcacatggtcgtctcctctctcccttcagggagtcatttaatacttcatgattagaacaaatatgtgaaagttcccaccaaccagtgagaatttcttccttcagacggttttggatcttactgcacagctttctgagaagttcttttggtgccatgttttgtggcttgcatcaaaagaggagtttgtcttcatgaagattcctaacattggtaatgtgatgaataaatttgagatccttggggttgtaggtgaaggagcctatggagttgtacttaaatgcagacacaaggaaacacatgaaattgtggcgatcaagaaattcaaggacagtgaagaaaatgaagaagtcaaagaaacgactttacgagagcttaaaatgcttcggactctcaagcaggaaaacattgtggagttgaaggaagcatttcgtcggaggggaaagttgtacttggtgtttgagtatgttgaaaaaaatatgctcgaattgctggaagaaatgccaaatggagttccacctgagaaagtaaaaagctacatctatcagctaatcaaggctattcactggtgccataagaatgatattgtccatcgagatataaaaccagaaaatctcttaatcagccacaatgatgtcctaaaactgtgtgactttggttttgctcgtaatctgtcagaaggcaataatgctaattacacagagtacgttgccaccagatggtatcggtccccagaactcttacttggcgctccctatggaaagtccgtggacatgtggtcggtgggctgtattcttggggagcttagcgatggacagcctttatttcctggagaaagtgaaattgaccaactttttactattcagaaggtgctaggaccacttccatctgagcagatgaagcttttctacagtaatcctcgcttccatgggctccggtttccagctgttaaccatcctcagtccttggaaagaagataccttggaattttgaatagtgttctacttgacctaatgaagaatttactgaagttggacccagctgacagatacttgacagaacagtgtttgaatcaccctacatttcaaacccagagacttctggatcgttctccttcaaggtcagcaaaaagaaaaccttaccatgtggaaagcagcacattgtctaatagaaaccaagccggcaaaagtactgctttgcagtctcaccacagatctaacagcaaggacatccagaacctgagtgtaggcctgccccgggctgacgaaggtctccctgccaatgaaagcttcctaaatggaaaccttgctggagctagtcttagtccactgcacaccaaaacctaccaagcaagcagccagcctgggtctaccagcaaagatctcaccaacaacaacataccacaccttcttagcccaaaagaagccaagtcaaaaacagagtttgattttaatattgacccaaagccttcagaaggcccagggacaaagtacctcaagtcaaacagcagatctcagcagaaccgccactcattcatggaaagctctcaaagcaaagctgggacactgcagcccaatgaaaagcagagtcggcatagctatattgacacaattccccagtcctctaggagtccctcctacaggaccaaggccaaaagccatggggcactgagtgactccaagtctgtgagcaacctttctgaagccagggcccaaattgcggagcccagtaccagtaggtacttcccatctagctgcttagacttgaattctcccaccagcccaacccccaccagacacagtgacacgagaactttgctcagcccttctggaagaaataaccgaaatgagggaacgctggactcacgtcgaaccacaaccagacattctaagacgatggaggaattgaagctgccggagcacatggacagtagccattcccattcactgtctgcacctcacgaatctttttcttatggactgggctacaccagccccttttcttcccagcaacgtcctcataggcattctatgtatgtgacccgtgacaaagtgagagccaagggcttggatggaagcttgagcatagggcaagggatggcagctagagccaacagcctgcaactcttgtcaccccagcctggagaacagctccctccagagatgactgtggcaagatcttcggtcaaagagacctccagagaaggcacctcttccttccatacacgccagaagtctgagggtggagtgtatcatgacccacactctgatgatggcacagcccccaaagaaaatagacacctatacaatgatcctgtgccaaggagagttggtagcttttacagagtgccatctccacgtccagacaattctttccatgaaaataatgtgtcaactagagtttcttctctaccatcagagagcagttctggaaccaaccactcaaaaagacaaccagcattcgatccatggaaaagtcctgaaaatattagtcattcagagcaactcaaggaaaaagagaagcaaggatttttcaggtcaatgaaaaagaaaaagaagaaatctcaaacagtacccaattccgacagccctgatcttctgacgttgcagaaatccattcattctgctagcactccaagcagcagaccaaaggagtggcgccccgagaagatctcagatctgcagacccaaagccagccattaaaatcactgcgcaagttgttacatctctcttcggcctcaaatcacccggcttcctcagatccccgcttccagcccttaacagctcaacaaaccaaaaattccttctcagaaattcggattcaccccctgagccaggcctctggcgggagcagcaacatccggcaggaacccgcaccgaagggcaggccagccctccagctgccagacggtggatgtgatggcagaagacagagacaccattctggaccccaagatagacgcttcatgttaaggacgacagaacaacaaggagaatacttctgctgtggtgacccaaagaagcctcacactccgtgcgtcccaaaccgagcccttcatcgtccaatctccagtcctgctccctatccagtactccaggtccgaggcacttccatgtgcccgacactccaggtccgaggcactgatgctttcagctgcccaacccagcaatccgggttctctttcttcgtgagacacgttatgagggaagccctgattcacagggcccaggtaaaccaagctgcgctcctgacataccatgagaatgcggcactgacgggcaagtgacttctgcaagcctgcggctggtcccaatgccctgaatcacctctctcatggaagaaccaattaacaccaatgaatcaaccattaa

SEQ ID NO: 123867 - DNA, 3449 bp, Homo sapiens
  Payload ID: 4307
  Gene Symbol: CDKL5
  Gene Name: cyclin-dependent kinase-like 5
  Uniprot ID: O76039
  ENST ID: ENST00000379996
  CDS Start-End: 276-3368
gagggcggggccggaggtttcgattagttgtctctgccgctggggaaggtaaagcggcgacggcgtcctcaggagctgtggggtcccctgctagaagtgggggactcggcgggggagtcatttaatacttcatgattagaacaaatatgtgaaagttcccaccaaccagtgagaatttcttccttcagacggttttggatcttactgcacagctttctgagaagttcttttggtgccatgttttgtggcttgcatcaaaagaggagtttgtcttcatgaagattcctaacattggtaatgtgatgaataaatttgagatccttggggttgtaggtgaaggagcctatggagttgtacttaaatgcagacacaaggaaacacatgaaattgtggcgatcaagaaattcaaggacagtgaagaaaatgaagaagtcaaagaaacgactttacgagagcttaaaatgcttcggactctcaagcaggaaaacattgtggagttgaaggaagcatttcgtcggaggggaaagttgtacttggtgtttgagtatgttgaaaaaaatatgctcgaattgctggaagaaatgccaaatggagttccacctgagaaagtaaaaagctacatctatcagctaatcaaggctattcactggtgccataagaatgatattgtccatcgagatataaaaccagaaaatctcttaatcagccacaatgatgtcctaaaactgtgtgactttggttttgctcgtaatctgtcagaaggcaataatgctaattacacagagtacgttgccaccagatggtatcggtccccagaactcttacttggcgctccctatggaaagtccgtggacatgtggtcggtgggctgtattcttggggagcttagcgatggacagcctttatttcctggagaaagtgaaattgaccaactttttactattcagaaggtgctaggaccacttccatctgagcagatgaagcttttctacagtaatcctcgcttccatgggctccggtttccagctgttaaccatcctcagtccttggaaagaagataccttggaattttgaatagtgttctacttgacctaatgaagaatttactgaagttggacccagctgacagatacttgacagaacagtgtttgaatcaccctacatttcaaacccagagacttctggatcgttctccttcaaggtcagcaaaaagaaaaccttaccatgtggaaagcagcacattgtctaatagaaaccaagccggcaaaagtactgctttgcagtctcaccacagatctaacagcaaggacatccagaacctgagtgtaggcctgccccgggctgacgaaggtctccctgccaatgaaagcttcctaaatggaaaccttgctggagctagtcttagtccactgcacaccaaaacctaccaagcaagcagccagcctgggtctaccagcaaagatctcaccaacaacaacataccacaccttcttagcccaaaagaagccaagtcaaaaacagagtttgattttaatattgacccaaagccttcagaaggcccagggacaaagtacctcaagtcaaacagcagatctcagcagaaccgccactcattcatggaaagctctcaaagcaaagctgggacactgcagcccaatgaaaagcagagtcggcatagctatattgacacaattccccagtcctctaggagtccctcctacaggaccaaggccaaaagccatggggcactgagtgactccaagtctgtgagcaacctttctgaagccagggcccaaattgcggagcccagtaccagtaggtacttcccatctagctgcttagacttgaattctcccaccagcccaacccccaccagacacagtgacacgagaactttgctcagcccttctggaagaaataaccgaaatgagggaacgctggactcacgtcgaaccacaaccagacattctaagacgatggaggaattgaagctgccggagcacatggacagtagccattcccattcactgtctgcacctcacgaatctttttcttatggactgggctacaccagccccttttcttcccagcaacgtcctcataggcattctatgtatgtgacccgtgacaaagtgagagccaagggcttggatggaagcttgagcatagggcaagggatggcagctagagccaacagcctgcaactcttgtcaccccagcctggagaacagctccctccagagatgactgtggcaagatcttcggtcaaagagacctccagagaaggcacctcttccttccatacacgccagaagtctgagggtggagtgtatcatgacccacactctgatgatggcacagcccccaaagaaaatagacacctatacaatgatcctgtgccaaggagagttggtagcttttacagagtgccatctccacgtccagacaattctttccatgaaaataatgtgtcaactagagtttcttctctaccatcagagagcagttctggaaccaaccactcaaaaagacaaccagcattcgatccatggaaaagtcctgaaaatattagtcattcagagcaactcaaggaaaaagagaagcaaggatttttcaggtcaatgaaaaagaaaaagaagaaatctcaaacagtacccaattccgacagccctgatcttctgacgttgcagaaatccattcattctgctagcactccaagcagcagaccaaaggagtggcgccccgagaagatctcagatctgcagacccaaagccagccattaaaatcactgcgcaagttgttacatctctcttcggcctcaaatcacccggcttcctcagatccccgcttccagcccttaacagctcaacaaaccaaaaattccttctcagaaattcggattcaccccctgagccaggcctctggcgggagcagcaacatccggcaggaacccgcaccgaagggcaggccagccctccagctgccagacggtggatgtgatggcagaagacagagacaccattctggaccccaagatagacgcttcatgttaaggacgacagaacaacaaggagaatacttctgctgtggtgacccaaagaagcctcacactccgtgcgtcccaaaccgagcccttcatcgtccaatctccagtcctgctccctatccagtactccaggtccgaggcacttccatgtgcccgacactccaggtccgaggcactgatgctttcagctgcccaacccagcaatccgggttctctttcttcgtgagacacgttatgagggaagccctgattcacagggcccaggtaaaccaagctgcgctcctgacataccatgagaatgcggcactgacgggcaagtgacttctgcaagcctgcggctggtcccaatgccctgaatcacctctctcatggaagaaccaattaacaccaatgaatcaacca

SEQ ID NO: 123868 - DNA, 2632 bp, Homo sapiens
  Payload ID: 4307
  Gene Symbol: CDKL5
  Gene Name: cyclin-dependent kinase-like 5
  ENST ID: ENST00000463994
  CDS Start-End: 279-2632
aatttctgtgacccccagtggtttcacactatcttttcagcaagccacattggatttcacgcatttactgactcttctacccgttctttttggtgtccagctgtactctccaacagggagtcatttaatacttcatgattagaacaaatatgtgaaagttcccaccaaccagtgagaatttcttccttcagacggttttggatcttactgcacagctttctgagaagttcttttggtgccatgttttgtggcttgcatcaaaagaggagtttgtcttcatgaagattcctaacattggtaatgtgatgaataaatttgagatccttggggttgtaggtgaaggagcctatggagttgtacttaaatgcagacacaaggaaacacatgaaattgtggcgatcaagaaattcaaggacagtgaagaaaatgaagaagtcaaagaaacgactttacgagagcttaaaatgcttcggactctcaagcaggaaaacattgtggagttgaaggaagcatttcgtcggaggggaaagttgtacttggtgtttgagtatgttgaaaaaaatatgctcgaattgctggaagaaatgccaaatggagttccacctgagaaagtaaaaagctacatctatcagctaatcaaggctattcactggtgccataagaatgatattgtccatcgagatataaaaccagaaaatctcttaatcagccacaatgatgtcctaaaactgtgtgactttggttttgctcgtaatctgtcagaaggcaataatgctaattacacagagtacgttgccaccagatggtatcggtccccagaactcttacttggcgctccctatggaaagtccgtggacatgtggtcggtgggctgtattcttggggagcttagcgatggacagcctttatttcctggagaaagtgaaattgaccaactttttactattcagaaggtgctaggaccacttccatctgagcagatgaagcttttctacagtaatcctcgcttccatgggctccggtttccagctgttaaccatcctcagtccttggaaagaagataccttggaattttgaatagtgttctacttgacctaatgaagaatttactgaagttggacccagctgacagatacttgacagaacagtgtttgaatcaccctacatttcaaacccagagacttctggatcgttctccttcaaggtcagcaaaaagaaaaccttaccatgtggaaagcagcacattgtctaatagaaaccaagccggcaaaagtactgctttgcagtctcaccacagatctaacagcaaggacatccagaacctgagtgtaggcctgccccgggctgacgaaggtctccctgccaatgaaagcttcctaaatggaaaccttgctggagctagtcttagtccactgcacaccaaaacctaccaagcaagcagccagcctgggtctaccagcaaagatctcaccaacaacaacataccacaccttcttagcccaaaagaagccaagtcaaaaacagagtttgattttaatattgacccaaagccttcagaaggcccagggacaaagtacctcaagtcaaacagcagatctcagcagaaccgccactcattcatggaaagctctcaaagcaaagctgggacactgcagcccaatgaaaagcagagtcggcatagctatattgacacaattccccagtcctctaggagtccctcctacaggaccaaggccaaaagccatggggcactgagtgactccaagtctgtgagcaacctttctgaagccagggcccaaattgcggagcccagtaccagtaggtacttcccatctagctgcttagacttgaattctcccaccagcccaacccccaccagacacagtgacacgagaactttgctcagcccttctggaagaaataaccgaaatgagggaacgctggactcacgtcgaaccacaaccagacattctaagacgatggaggaattgaagctgccggagcacatggacagtagccattcccattcactgtctgcacctcacgaatctttttcttatggactgggctacaccagccccttttcttcccagcaacgtcctcataggcattctatgtatgtgacccgtgacaaagtgagagccaagggcttggatggaagcttgagcatagggcaagggatggcagctagagccaacagcctgcaactcttgtcaccccagcctggagaacagctccctccagagatgactgtggcaagatcttcggtcaaagagacctccagagaaggcacctcttccttccatacacgccagaagtctgagggtggagtgtatcatgacccacactctgatgatggcacagcccccaaagaaaatagacacctatacaatgatcctgtgccaaggagagttggtagcttttacagagtgccatctccacgtccagacaattctttccatgaaaataatgtgtcaactagagtttcttctctaccatcagagagcagttctggaaccaaccactcaaaaagacaaccagcattcgatccatggaaaagtcctgaaaatattagtcattcagagcaactcaaggaaaaagagaagcaaggatttttcaggtcaatgaaaaa

SEQ ID NO: 123869 - DNA, 12533 bp, Homo sapiens
  Payload ID: 4307
  Gene Symbol: CDKL5
  Gene Name: cyclin-dependent kinase-like 5
  Uniprot ID: O76039
  ENST ID: ENST00000623535
  CDS Start-End: 1-2883
atgaagattcctaacattggtaatgtgatgaataaatttgagatccttggggttgtaggtgaaggagcctatggagttgtacttaaatgcagacacaaggaaacacatgaaattgtggcgatcaagaaattcaaggacagtgaagaaaatgaagaagtcaaagaaacgactttacgagagcttaaaatgcttcggactctcaagcaggaaaacattgtggagttgaaggaagcatttcgtcggaggggaaagttgtacttggtgtttgagtatgttgaaaaaaatatgctcgaattgctggaagaaatgccaaatggagttccacctgagaaagtaaaaagctacatctatcagctaatcaaggctattcactggtgccataagaatgatattgtccatcgagatataaaaccagaaaatctcttaatcagccacaatgatgtcctaaaactgtgtgactttggttttgctcgtaatctgtcagaaggcaataatgctaattacacagagtacgttgccaccagatggtatcggtccccagaactcttacttggcgctccctatggaaagtccgtggacatgtggtcggtgggctgtattcttggggagcttagcgatggacagcctttatttcctggagaaagtgaaattgaccaactttttactattcagaaggtgctaggaccacttccatctgagcagatgaagcttttctacagtaatcctcgcttccatgggctccggtttccagctgttaaccatcctcagtccttggaaagaagataccttggaattttgaatagtgttctacttgacctaatgaagaatttactgaagttggacccagctgacagatacttgacagaacagtgtttgaatcaccctacatttcaaacccagagacttctggatcgttctccttcaaggtcagcaaaaagaaaaccttaccatgtggaaagcagcacattgtctaatagaaaccaagccggcaaaagtactgctttgcagtctcaccacagatctaacagcaaggacatccagaacctgagtgtaggcctgccccgggctgacgaaggtctccctgccaatgaaagcttcctaaatggaaaccttgctggagctagtcttagtccactgcacaccaaaacctaccaagcaagcagccagcctgggtctaccagcaaagatctcaccaacaacaacataccacaccttcttagcccaaaagaagccaagtcaaaaacagagtttgattttaatattgacccaaagccttcagaaggcccagggacaaagtacctcaagtcaaacagcagatctcagcagaaccgccactcattcatggaaagctctcaaagcaaagctgggacactgcagcccaatgaaaagcagagtcggcatagctatattgacacaattccccagtcctctaggagtccctcctacaggaccaaggccaaaagccatggggcactgagtgactccaagtctgtgagcaacctttctgaagccagggcccaaattgcggagcccagtaccagtaggtacttcccatctagctgcttagacttgaattctcccaccagcccaacccccaccagacacagtgacacgagaactttgctcagcccttctggaagaaataaccgaaatgagggaacgctggactcacgtcgaaccacaaccagacattctaagacgatggaggaattgaagctgccggagcacatggacagtagccattcccattcactgtctgcacctcacgaatctttttcttatggactgggctacaccagccccttttcttcccagcaacgtcctcataggcattctatgtatgtgacccgtgacaaagtgagagccaagggcttggatggaagcttgagcatagggcaagggatggcagctagagccaacagcctgcaactcttgtcaccccagcctggagaacagctccctccagagatgactgtggcaagatcttcggtcaaagagacctccagagaaggcacctcttccttccatacacgccagaagtctgagggtggagtgtatcatgacccacactctgatgatggcacagcccccaaagaaaatagacacctatacaatgatcctgtgccaaggagagttggtagcttttacagagtgccatctccacgtccagacaattctttccatgaaaataatgtgtcaactagagtttcttctctaccatcagagagcagttctggaaccaaccactcaaaaagacaaccagcattcgatccatggaaaagtcctgaaaatattagtcattcagagcaactcaaggaaaaagagaagcaaggatttttcaggtcaatgaaaaagaaaaagaagaaatctcaaacagtacccaattccgacagccctgatcttctgacgttgcagaaatccattcattctgctagcactccaagcagcagaccaaaggagtggcgccccgagaagatctcagatctgcagacccaaagccagccattaaaatcactgcgcaagttgttacatctctcttcggcctcaaatcacccggcttcctcagatccccgcttccagcccttaacagctcaacaaaccaaaaattccttctcagaaattcggattcaccccctgagccaggcctctggcgggagcagcaacatccggcaggaacccgcaccgaagggcaggccagccctccagctgccaggtcagatggatcctggttggcatgtgtcctctgtgaccaggagtgccacagagggcccttcctactctgaacagctgggtgccaaaagtgggccaaatgggcacccctataacagaacaaatcgctcacgaatgccaaatctgaatgatttaaaagagacagccttgtaatttgtgctggtaggggggaggggtggacagacaagccagtggggaggggtgggaaagggtgggctgggcttggggcatgggccgggccaagtggtgagccaatattttcagctttatgaaggtgtgtgcaatattgcatgtgttggggccgttgagctcctcgcggccacaaatgctagtcagggatcttagagccacaggagttccttagggatcgccactccccacaggtcttgtgtgagaatagatagagtgtgccattgaggaagaagaaattcttgccagtttctcccctttacattccagctttagtgcaatctctgttgaacttgggaatgccaggatgtgtcctggcactgcaagggataggaaagtcgtgttgaccgatgcccttactacatatttttttctgcctagagtaaatgtggggtttattgtaatccaagagtatccctttgaagggttagcagatgaactgtatgtcttaaattgttttctaaacttccatatttgataggatttgtaacatttatttataattaatattgtactgttaaaatcatatcttttatgttataatgtaaagttattttgagctgtttgaaacattgtgaagcagtgggacagctacagtagtttctataaaaactaaacagtaacatttatatattgcatcaggagtattttattctatatataatatatatatatggtaaatatctgttttataaatatattcatttaaagaaagtatcgttatgacactatctgccatatttttatacatttgtgatatgaagtgagtattatacttctactaaagggagttgaattgtggctacacgtgactgtaacagtatgaaccttgctcaactttgaggccccagcagtagcctctagacatgatccttggtagcagacgagatgcagcatctctttccaaacctgcaggggaagaaagtcagataggccagtgagaattccagcaggcctggtttccgtcctcacacacttggctcctgtttgtgtccagggacgttacttgcacacaggggagaatagattgaggcgttactcgtgggtctttgtagagagaatgtgctcttccacttagcattagtgtagagcgtagaccaaagatttgccagtgaacattccttgttgtgagatcataagaggtacctgtctgcagatcttgcaaaccatctctatgctcctgaatattgtccactgtcccggagactcttggctgatggggtgtgagatatatgtgtggcatttctatttctgaatgccttttttgctattgctctctccaataccatatttaaaaggctcctggagcaattccagatagataaaaaattactctatccatttttttcttcctggggctgtccacttatgacaagattttcatgcacacctgttacgcacacaacccccatcagaacaggacctatcttcccctcatctgatctctttcagctcccaagttactcccaagtatcatcaaaccctttggccatcaagtgttatcctcccatgcctctgggtcatccttgagggaagtcacctcagcaccatcatctatcagtagtagtagatttttggaattagtctctgagcaataatacttttaaaggtccctcccacccctcaaagagataacttctcagtatttattacttgtcctcaaattctgagtgtcagcccctgcatcaagtcagctatgatcaaaatgtgctgttactgttaaccctcccccgagattttgagaatcatagctctgatgattatgaagattataaagactaaggtcctagtttccctgaagcttaaattgtgcacatattgcatttttatataaatactataatgtgtattgattatatagataggtcattttaaggtgctttttatttaattttaatgagtgtaataggcactaaaatgaaactcgactgggtactattactgaaaaaatttgactcaaaccaatagttttgcatgctctttagttctttttctgtcttacttctttcaccagttcagtactgtttgggtagctctgaattctggcttttccaggcagctgcttgatgatacaaatgaggtggaccatcagcagttttgcctggacactaatgactctaaaagggtgtgtatttaactcttctttttcatactagatctctaccttgtattccccccttgcaaaccagaaactacactttttttctctggaaagacttctcactgtgctatgcgcttaggaactgcacggtcccgttgccatgctgtggcattcgaggctcgtcacctaggggctggtttcccatgttgtcatccttgctaacactgggatctcagatgtttgcagaacatttctattcatgacggttcttcaaagaagggctagaatatttgccttctacctagagcaaagtaaacctaattgttgaagagtcaatacgtactttttgtactttcccagatttgagccagaaaatacctacagatatctacaaatgttttcaaccagtgttttcgaggtagctctttaatcctcttctcagcttttgtctgttctgacttttcatccaataagctgtaagtgaactacaatctgcatttccagcatgcaattctcttcctgctcacggagggggatgcaaaagttttctctcacacctaatgggccctctcttagcttttaactgttgttttcccctgttgatgaaaaattactgacatcacaaagattgccatccatggtagaaaggacttgatttaaagtcagaaaaatttgccttttctttaggaaggggaattcatgacatccatgtcctattatcggccgtaacttcctaaagaagaaaaagggtgaatgaaagcttatgttacttttatgaaagtatcactgatctcctttggaaaagaaactctgcttcactgtttttctacctttatttctctgccatcctcgtttttcctctctgaagttctaaataccctttaactgaaccttgttggtcttgctctaaaatttagcctctttctagagcccaagaccaaaagggagtgcttcatgctgaggggctcaagtgagctgactctacaactgtggttctcaactaggggcagatttacccccaagggtacatttggcaatgtctggggacatttggttgtcatagctgggggggaggtgatggtatgctactggcatcaagtggttagaggccacagatgctactaaacaccctgccatgcacaggacagccccccaaacaaacagtggtccagccccaagcactactagtgctgaggttgagaaaccctgccctacaccatcccaagcccaccagtctgcagagcttggctctggccttgttctgtccaggctacagtactgcaggtgtgatttcttcaacatcacattctcttaagagtcttcaaccactatgcctgaatccttggaatcctattgttcgtttccattgtcttgggcctgctaaaaggtgcatactttggaaggagaccagagttactttataggtgttggagaacttaaattctaggttagcatccttagaaaatctttcatagagccatgaggcttatatttagaagcaagcaacagcctggcagattggcatgatttttaccaactgctcaaaggcatccgtggctttcagctgtgtctcccgaaagaaaatgtctttgttttttattcaagtcatttaatagctctttacaaatattagcatatggcagaccaattagaagcaaaaaagtccgtattggtggttgtgatgtggctgttatagaagtatttgtgctgtatgctttggttaaatctgttttaaaacatgctttaagattcaccttacgcagttgtactttaattctaagctcagagctatgctgtcagtctctagtcacgccatgtattataaagtatgttgtggttgtagagttagccagtttagcatgttcctaatctgagaattagtggactatactaggaaatgctatcccattttccctttccagcccctcttagttaagatcatagtatcctcacttcttaaactagtctttagagtaaataaggaaaaaagccatttattttcttctagccatgtattattgagaatgactcatagtacaactttttttcaaaggccagaggattactttgcaagtgtgtagaaagatctgtctatttctgttcacctgggacctggtggtgactgaactctttcagcaagggcaatggctcaatgtgattcggtgctggagctcagctgggactcagtaaatctgcacgttctctgctggtcagaacatgtttcctggagagcattgcttttctatctagaagttcgttacctcctgcatgatagtgggatattgagatgtgggttctaagatccacagactcatacttttgtgaactttggaatgtggtagggtacactgaaccaagtcagaaaatagtgaaatatttccttgcctccttcagttcatcactaagaaagtgtgtaggcagagaaaacttacttatggtttgaagaaccacaattgtttttgaaaggggacatagaaaagacagtacaaaggttgtaagtgtcctgtcgctaattcccagggccagaatctcacaagaagatcctctcaaagacttaaaagcctggcttacaaaaataaccagaaaccaaacttgtaagcagttacaatttcttccttttgcttcttgaccagctgagatacagaatatcttgaggtctggttcagctgatgaaaaattctgtctcagaaacgatgagtaagaaaccatacaagaaaaagaagtccctcatctatctgcatacacgcaatgtgggagaagtggggtggctaggaaactctgggcctgctgcccccttcgattctttttttttttctttgtgaattgaatgtacgatacaaatggtaggccttcatgtgagccagttactacatgaatcttcatttcccacagtggtttgttcattcatcagcgttaggcttggtcctggctccacctttctcctctccgggcactgaccccacctttccgtgtatttactgtaggctattaaatatgatcatgacccgccttgcattttcattcatcacctgtttatgcccaaatttaaaggaagtttgtctcattttgccagaaaaaaattgtaatagtcggcacgctggatttgtagggccagcaaaattgcggcagtgaaactagtttcacttctaaagcccttcatttcccacaaggttaagctctcgaaaccccatttgatccttggttcctatttcgatcctcctttggaatctgaaaatcggtctccatgttgtatgcagattagaagttgccttgtttgttactcttccaacacagggtatcagggagaaagaggccttatctgttcctccatcccccctgttttgacagactgctaagaattcctcaggacttcctttggttggggattttactttcccaaaagtctgatctgatttctttcaggggtagacaagcttgtcctagtgctctgcttcaggtcttatcagaagaaacccaggaatagaaaaggtagatgccttgacttttgtccctgttgtggggactaaagtgttttttgccagaattgtcaaaagctccggttcaaactctgtagagtttcatggaaaaacaaaacaaaacaaaaaagatgcttatcgtcccggagaatgtgtaagtaagttctccagcacggcttaggttttccaaaatggaaagcaaagcttgcagacaacctgttttctctagagacacacaatgattctggccctcagtctgtttccctccccttgtttactctttggtcaccgatcgagtcaggctagaggggtaatacggtgattaaaagaagtaaattctcactgtaaacttggattgattaacagaaacaattaaaccaaacaaaatcattgccccaaatttctatctccaagaattgctttgtgccattttgaattcaggtagttattctgtatatacttagctaactattcagagcttcttcaatctctagtaagcttgaaggtggtgtctgggaagacacagggcagggtgacatttagactctgttcattcttaaaaatagggataagccagaatgatgtgacatctagtatgtggtagatgaagaatcagtggaaattcttaattgcacagactttataatccattatataaagtgtaattccatactttttactgtggcaagggtgtgatgtgattgttaatctttttaatttttgaatccaaactgaatttaaagtgttgaatacttaaatcctcacaagtgaattatgaaccatttgtaaagtgtttctataactctttgtatcatgtgttggtacatcttatcaagttttttctggcatgtaattccattctaaacttatgtaaaatttctattgttgctgtaaatattacacaaatatctattccgtgataaccttcattatcagcatgaaatggttaatttttactgagcacaatgtatttttgaatggatcttcccaaatgtctttaataaaatgcagattttgcactgactgatgtgactgccaggccgtcccaatcttgagcactgtggtccttcgtgtttgaactgcgaacagctccattttagttccttcttgggaagaaagaatgcattcgaattcaaatgagggatgatgggcctttgaggttgtaatcagtttgagacagaaattaatgtaaaactaggcaaatcctgtaacttaatgatgttgatctttgttttcctatttataaagcttttttccccttacggcattttgaaaactttggtttgttttatacttgagtgttgtcacctttgcacgtcgctagacactcacgtggtagtttgaggaggatgggaagagaggccaatcttgtgctaagtgctatggagaaagcaaagatgcacagcttaataagggttttttgattctagaggagaggtgggcaagcttttcctgtaaagggccagatggtaaatattgggggctctgtggcccatcagttccctgtcaacattactcagctctgcctttgtattgcagaggctgcatggataatatgtaaatcagtaagtgtggctgtggtcccgtaaaactttacttatagaaacaggccatagtttactaacccgttttaggccctcagtttcatcatttagggtaacaccaaccgagtacatgttcaatcaggagggaaagaacttagcttttgtgataacttatagatgaaatattccccagttttctttctctttctaaacaaagggtaggagctgaaagtcagtgctctccattcttaaaagtcctctgtcaaccacctcttcactctatctccttaagtgacatggaaacttgtggcctgtgctttcaactataatcttaccaagactgaatgaaagtatttggtgcttatactttttaatgttcatagcacttactatggccaggcacaatgcccaagtgttttgctttattattattattattattattattattattattattattattattttcacaacaacccagcgaaacaggtactattattatcccctttttgtaaatgaggaaacagatttccatacttgacattaacctgcccaaggtcacccagtttggaagtggcagggccaggatttgaagccgaatatgttcattgtaaagcccatatacccttaaaagtcactgcacgtccacgtatggtaatgtggtcacaatcagtattgtttctctttagtaattcagatttattcaagtaactccaaggttcaaattttcaaaaacagtttccaacacaggttatattaaaaactttgcctgaagtttactctaggtgcagaaataaagacaacttagtcaagtgaaggaaagggtaacagacttagaaatggctatctacactgatggaataagtatactaattagagcaggtaacaagtccccacgatgtataacatattcttctctaaaagctcacaacaatttatgtgccaccttccatcccctttcccagcagatggtaattgatgcaatttgagaatagaacacttcattgaaacaagtcactggaggtcctctggggatgcagcttaaaagcccaggatcaggccaggtgtggtggctcacgcctgtaatcccagcactgtgggagactgagacgggcagatcacctgaagtcaggagttcgagaccagcctggccaatatagagaaaccccgtctgtactaaaaatacaaaaattaggtctgggcggtggctcacgcccgtaatcctagcactttgggaggccaaggtgggtggatcacgaggtcaggagttcgagaccagcctggccaacatggtgaaaccccgtctctactaaaaatacaaaaattgggtgtggtggtacatgcctgtaatcccagctgcttaggaggctgaggcaggagaatcacttgaacccaaaaggcagaggttgcagtgagccgagatcacgccactgcactccagcctggcaacagagcgagactctgtctcaaaaaaaaaaaaaaaaaaatacaaaaattagccgggaatggtggtgaatgtctataatcccagccactcgggaggctgaggcaggagaatcacttgaacccaaaaggcagaggttgcagtgagccaagatcgcaccactgcactcccacctggacgacagagcgagacgccatctcaaaaataaataaataaataaatccctaggatatagagtccgcttgcctgggtggagtcttggctccatctcctacatctcatgtgacttgaagcaaggcacttcactatgcctcagtttccttatctttaaatggaggtaatcacagtacctacctcagtgttgttgtgaagatttaatgagataataacctgcagagcacttgagagtctcaagaaatatgagctcttataacattattgctattgtaaaacattgctattacttctgtcccaatttggcagtttcaggaaattgagaaggaatgtcactgaatctttaatgccagttacacagagctcagtaggtgtccgcacagccctttagatgcacgtagcctatttgatcttcgtatcagccctgtaaggttgggcttaagaatgacccagcatggaagtactcttgggaccacaggggaagcaacagtccttgtaagctgtttgtcagtgggccttagcaaccaagccccaagtggacagaaagatggggttctgtgagcatccattccaagggtcactttaggggtgcaatcttctgggctctgagaatggattcacagcagcatctctatctggaaatacctttgctttgtccaagtaacctcctcccacacagagtacccgaatcagctcagattttttttccttaatattggcaacacttaatgctacttctttgttcgtaacatttcatttaattatttaaaaatctgcaaatgttgtgtatattttaccgcaatttttaaacaaactccagtgtagaccgtgctctagcatttctaaaaataaaagtaaatatgttaaaataa

SEQ ID NO: 123870 - DNA, 564 bp, Homo sapiens
  Payload ID: 4307
  Gene Symbol: CDKL5
  Gene Name: cyclin-dependent kinase-like 5
  ENST ID: ENST00000624700
  CDS Start-End: 359-564
gagttggaggaggaagaccctacaggaagttgaggtatcatatcctcaatttctgtgacccccagtggtttcacactatcttttcagcaagccacattggatttcacgcatttactgactcttctacccgttctttttggtgtccagctgtactctccaacaggcgagcacatggtcgtctcctctctcccttcagggagtcatttaatacttcatgattagaacaaatatgtgaaagttcccaccaaccagtgagaatttcttccttcagacggttttggatcttactgcacagctttctgagaagttcttttggtgccatgttttgtggcttgcatcaaaagaggagtttgtcttcatgaagattcctaacattggtaatgtgatgaataaatttgagatccttggggttgtaggtgaaggagcctatggagttgtacttaaatgcagacacaaggaaacacatgaaattgtggcgatcaagaaattcaaggacagtgaagaaaatgaagaagtcaaagaaacgactttacgagagcttaaaatgcttcggactctcaagca

SEQ ID NO: 123871 - DNA, 483 bp, Homo sapiens
  Payload ID: 4307
  Gene Symbol: CDKL5
  Gene Name: cyclin-dependent kinase-like 5
  ENST ID: ENST00000623364
  CDS Start-End: 302-483
gggggagttggaggaggaagaccctacaggaagttgagctgtactctccaacaggcgagcacatggtcgtctcctctctcccttcaggctgctcatcttcaaggggaaaacatggctactggatttcctctgttctaagggagtcatttaatacttcatgattagaacaaatatgtgaaagttcccaccaaccagtgagaatttcttccttcagacggttttggatcttactgcacagctttctgagaagttcttttggtgccatgttttgtggcttgcatcaaaagaggagtttgtcttcatgaagattcctaacattggtaatgtgatgaataaatttgagatccttggggttgtaggtgaaggagcctatggagttgtacttaaatgcagacacaaggaaacacatgaaattgtggcgatcaagaaattcaaggacagtgaagaaaatgaagaagtcaaagaaacgactttacgagagct

SEQ ID NO: 123872 - DNA, 567 bp, Homo sapiens
  Payload ID: 4307
  Gene Symbol: CDKL5
  Gene Name: cyclin-dependent kinase-like 5
  ENST ID: ENST00000624953
  CDS Start-End: 515-567
gtgagtggggtgggggagttggaggaggaagaccctacaggaagttgaggtatcatatcctcaatttctgtgacccccagtggtttcacactatcttttcagcaagccacattggatttcacgcatttactgactcttctacccgttctttttggtgtccagctgtactctccaacaggcgagcacatggtcgtctcctctctcccttcaggctggtctggaactcctggcttcaagtgatcctcctcagcctcccaaagatctgggattacaggtgtgaaccactgcacctggcctagttttatttgctaatgacaagtcaacagtcagtttagttgtaatttcgttgtagggagtcatttaatacttcatgattagaacaaatatgtgaaagttcccaccaaccagtgagaatttcttccttcagacggttttggatcttactgcacagctttctgagaagttcttttggtgccatgttttgtggcttgcatcaaaagaggagtttgtcttcatgaagattcctaacattggtaatgtgatgaataaatttgagatccttggggt

SEQ ID NO: 123873 - DNA, 2106 bp, Homo sapiens
  Payload ID: 4308
  Gene Symbol: CYLC1
  Gene Name: cylicin, basic protein of sperm head cytoskeleton 1
  Uniprot ID: P35663
  ENST ID: ENST00000329312
  CDS Start-End: 38-1993
actatgctcaagtccaggcaacgtacaggcaggggaaatgtctcttccaaggttgctaaaagtaaacatcagaacatatgataattccattccaatcagtgaatcaagcagaaaatcatggaatcaaaaacactttgctttgacatttcccaaaccactccagagaggtacaaatgataaatcaagacctttgaaatcacaaataacagttactagacatgacaaaagaaaactagaagaaggccagaaaccagctcataaatggataaggcattctttcagaaaaattttgcaatggccacccatttacacagctgccagggaacagactccattcagacatctttatacttccaaaacccatcttaaaaaagcagaatataaaaagtccaaagatgaaaaaggaggaacacctttgaagaaagattccaagaaaaaaggaggttcatatgcaacaaatccagaatccaagcaaatagtagaagagaaaactaaaagacaaaatgaggcagataaaactcccttaaaatcatcacatgaaaatgaacaatccaagaagtcaaaatccagttcagaaactaatccagaatcccaaaattctaagacagtctcaaaaaattgttcacaaaaagataagaaagattcaaagaattccaagaagacaaacactgaattcctacatacaaagaacaatccaaagaaagatttgaagaggtcaaagactagtaatgatcccatatcagagatttgctcagaaaatagtttaaatgttgatttcctcatgttagtgggacagtctgatgatgaatccataaattttgatgcatggttaaggaattactcacagaataattcaaagaattattctttgaagtatacaaagtatacaaagaaggacacaaaaaagaatgcaaagaaaagctctgatgctgaatctgaagactcaaaggatgctaagaaagattcaaagaaagttaagaaaaatgtcaagaaagatgacaagaaaaaggatgtaaagaaggacacagagtctactgatgctgaatctggagactcaaaggatgaaaggaaagatacaaagaaggataagaaaaaattaaagaaagatgacaagaaaaaggacacaaagaagtacccagagtctactgatactgaatcaggagatgcaaaggatgcaagaaatgattcaagaaatttgaagaaagcttcaaagaatgatgacaagaaaaaggatgcaaagaaaattacattctctactgattctgaatctgaactggagtcaaaggagagtcagaaagatgaaaaaaaggataaaaaagattcaaagacagataataaaaagtctgtcaagaatgatgaagagtctactgatgctgactctgaaccgaagggagattcaaaaaagggtaaaaaggatgaaaagaaggggaagaaagattcaaagaaagatgacaaaaagaaggatgcaaagaaaaatgcagaatctactgaaatggaatctgatttggagttaaagaaggacaagaaacactcaaaggaaaagaaaggttcaaagaaagatatcaagaaggatgcaagaaaggacacagagtctactgatgctgaatttgatgaatcttccaagacaggctttaaaacatctacaaaaatcaaaggttcagatactgaatctgaagagtcactatataaacctggggctaagaagaaaattgatgaatcagatggcacatctgcaaattcaaagatggaaggactggaatcaaagagaggattcagaatgtcatccaaaaagactacattcaatgaaaaaggggaaaaagcaagtacaggtagagttcctccatcaagagaaaaaccaccactccctgcttgtgagccttctctaccatcaccaaaggtcagacgtctttgttggtgcaagatgcctcctccacctccaaaaccaagatatgctcctttgcctgaagcaccgtggattcataagctgctttaaagaacaactgagcacttggtttcacagaatggccttaccacagtaagcaccacctactctcaaatgagcatttctacctctgtggaactgaaataaaaacaagtcttccatga

SEQ ID NO: 123874 - DNA, 379 bp, Homo sapiens
  Payload ID: 4308
  Gene Symbol: CYLC1
  Gene Name: cylicin, basic protein of sperm head cytoskeleton 1
  ENST ID: ENST00000621735
  CDS Start-End: 58-264
aacattaccagtttcaacttactatgctcaagtccaggcaacgtacaggcaggggaaatgtctcttccaaggctaaaagtaaacatcagaacatatgataattccattccaatcagtgaatcaagcagaaaatcatggaatcaaaaacactttgctttgacatttcccaaaccactccagagaggtacaaatgataaatcaagacctttgaaatcacaaataacagttactcctgaagcaccgtggattcataagctgctttaaagaacaactgagcacttggtttcacagaatggccttaccacagtaagcaccacctactctcaaatgagcatttctacctctgtggaactgaaataaaaacaagtcttccatgagt

SEQ ID NO: 123875 - DNA, 2053 bp, Homo sapiens
  Payload ID: 4309
  Gene Symbol: CYLC2
  Gene Name: cylicin, basic protein of sperm head cytoskeleton 2
  Uniprot ID: Q14093
  ENST ID: ENST00000487798
  CDS Start-End: 38-1084
acaatacttaagtcctggcaagtcataagtggggaaaatgtctctcccaagattccaaagagtaaactttgggccatatgataattacattccagtcagtgaattaagcaaaaaatcatggaatcagcaacactttgccctgttatttcccaaaccacaacggccaggaaccaaaaggagatcaaaaccttctcaaatacgggacaacacggtttctataattgatgaagaacaattaagaggagatcgtagacaaccattatggatgtaccgttctttaatgagaatttctgagagaccatctgtttatttagctgccaggaggcagcctctcaaaccaactcgtactgtcgaggtggattctaaagcagcagaaattggtaagaaaggtgaagacaagacaacacagaaggacacaacagattcggaatcagaattaaaacaaggaaaaaaagattcaaagaaaggcaaggatatagagaaaggaaaagaagaaaagctagatgcaaagaaagatagcaaaaaaggtaaaaaggatgcagagaagggcaaagactcagcaacagaatctgaagatgaaaaaggaggtgcaaagaaagataacaaaaaagataaaaaggattcaaacaaaggcaaagactcggcaacagaatctgaaggtgaaaaaggaggtacagagaaagatagcaaaaaaggtaaaaaggattcaaagaagggcaaggattcagccatagaattacaagctgtaaaagcagatgaaaagaaggatgaggatggaaaaaaagatgcaaacaaaggtgatgaatcgaaggatgccaagaaagatgcaaaggagattaaaaaaggtaagaaagataagaagaagcccagtagtacagacagtgactcaaaggatgatgtcaagaaagagtctaagaaggacgccacgaaagatgccaagaaagttgccaagaaagatactgagaaagaatctgctgattcaaagaaggatgcaaagaaaaatgctaagaaggatgcaaagaaggatgcaaagaagaatgcaaagaaggatgaaaagaaggatgcaaagaagaagggcaagtaggccttggataagaatttgaaccgaaagaataattcaaaagcatatttgatgaaacaatagtggtagtctgcagctgaatttgtgagaaaacaagaggcctcaaagaattaaataatttttaaaaggtggtaaagaaggatacaaaggagaactcagcagagatttataaaaatatataagaaagatgttaagaaaaattaaggggggatccattgaaagacttgaagaatacatatacttatattcggggatatgaaggattcaatgaatgatctctagaaagatttaaagaagaatattcagataaggatgttgaagataatgacactaaatctatggacacacacacacacacacacacacacacacacacacacacacacacacacacacagtttaatgaaggcttaaagaatccaaggagacagatgttgtatctatagatttaaaataatctcaagctgcatccacagatacaaaaaaatataggagccatgaaatgaagttaaacaccttgtagaaagcctactttcaagtaaatatagcattcctttggcaaaaagaaaaaaaaagtaaaagaaaagaaaaaaaatgtattaccacccgatgagcctacatctttctttctgaagtttaaacaaccacagtcatgtttatggttgttggatgtgccacttccaatccaaaagaagcacacttgatctactacagaatttaagaaggcagttgttctattcataattgctcacaatcagcctctcctcctactactgttcctactctctataccctttgtgtctgctcagactaccgtgaggatggattggacattacaccacactggaaaagtgaaacatctcattcagttggtgatcttcctgtcatgaaagttgcttgacagctctaattacgaattgaacacattaaacacctggtgaaattatcaattaaaaacatctagtcaccata

SEQ ID NO: 123876 - DNA, 2171 bp, Homo sapiens
  Payload ID: 4309
  Gene Symbol: CYLC2
  Gene Name: cylicin, basic protein of sperm head cytoskeleton 2
  Uniprot ID: Q14093
  ENST ID: ENST00000374798
  CDS Start-End: 71-1117
gatgtcacctttcaacatcaccagtttgaacttacaatacttaagtcctggcaagtcataagtggggaaaatgtctctcccaagattccaaagagtaaactttgggccatatgataattacattccagtcagtgaattaagcaaaaaatcatggaatcagcaacactttgccctgttatttcccaaaccacaacggccaggaaccaaaaggagatcaaaaccttctcaaatacgggacaacacggtttctataattgatgaagaacaattaagaggagatcgtagacaaccattatggatgtaccgttctttaatgagaatttctgagagaccatctgtttatttagctgccaggaggcagcctctcaaaccaactcgtactgtcgaggtggattctaaagcagcagaaattggtaagaaaggtgaagacaagacaacacagaaggacacaacagattcggaatcagaattaaaacaaggaaaaaaagattcaaagaaaggcaaggatatagagaaaggaaaagaagaaaagctagatgcaaagaaagatagcaaaaaaggtaaaaaggatgcagagaagggcaaagactcagcaacagaatctgaagatgaaaaaggaggtgcaaagaaagataacaaaaaagataaaaaggattcaaacaaaggcaaagactcggcaacagaatctgaaggtgaaaaaggaggtacagagaaagatagcaaaaaaggtaaaaaggattcaaagaagggcaaggattcagccatagaattacaagctgtaaaagcagatgaaaagaaggatgaggatggaaaaaaagatgcaaacaaaggtgatgaatcgaaggatgccaagaaagatgcaaaggagattaaaaaaggtaagaaagataagaagaagcccagtagtacagacagtgactcaaaggatgatgtcaagaaagagtctaagaaggacgccacgaaagatgccaagaaagttgccaagaaagatactgagaaagaatctgctgattcaaagaaggatgcaaagaaaaatgctaagaaggatgcaaagaaggatgcaaagaagaatgcaaagaaggatgaaaagaaggatgcaaagaagaagggcaagtaggccttggataagaatttgaaccgaaagaataattcaaaagcatatttgatgaaacaatagtggtagtctgcagctgaatttgtgagaaaacaagaggcctcaaagaattaaataatttttaaaaggtggtaaagaaggatacaaaggagaactcagcagagatttataaaaatatataagaaagatgttaagaaaaattaaggggggatccattgaaagacttgaagaatacatatacttatattcggggatatgaaggattcaatgaatgatctctagaaagatttaaagaagaatattcagataaggatgttgaagataatgacactaaatctatggacacacacacacacacacacacacacacacacacacacacacacacacacacacagtttaatgaaggcttaaagaatccaaggagacagatgttgtatctatagatttaaaataatctcaagctgcatccacagatacaaaaaaatataggagccatgaaatgaagttaaacaccttgtagaaagcctactttcaagtaaatatagcattcctttggcaaaaagaaaaaaaaagtaaaagaaaagaaaaaaaatgtattaccacccgatgagcctacatctttctttctgaagtttaaacaaccacagtcatgtttatggttgttggatgtgccacttccaatccaaaagaagcacacttgtctcgctctgttgccctggctggagttcagtgacatgatctcaggcttactacagcctccaccttcaggttcaagtgattctcctgcctcagcctctctggtagctgggattacagggaaggaaaatagctggcatttcttgctggagaaagttatcacaagtggaaaggttaccctagaaacaaaagatgactaccgtgaggatggattggacattacaccacactggaaaagtgaaacatctcattcagttggtgatcttcctgtcatgaaagttgcttgacagctctaattacgaattgaacacattaaacacctggtgaaattatcaattaaaaacatctagtcaccata

SEQ ID NO: 123877 - DNA, 1817 bp, Homo sapiens
  Payload ID: 4309
  Gene Symbol: CYLC2
  Gene Name: cylicin, basic protein of sperm head cytoskeleton 2
  Uniprot ID: Q14093
  ENST ID: ENST00000612124
  CDS Start-End: 71-1117
gatgtcacctttcaacatcaccagtttgaacttacaatacttaagtcctggcaagtcataagtggggaaaatgtctctcccaagattccaaagagtaaactttgggccatatgataattacattccagtcagtgaattaagcaaaaaatcatggaatcagcaacactttgccctgttatttcccaaaccacaacggccaggaaccaaaaggagatcaaaaccttctcaaatacgggacaacacggtttctataattgatgaagaacaattaagaggagatcgtagacaaccattatggatgtaccgttctttaatgagaatttctgagagaccatctgtttatttagctgccaggaggcagcctctcaaaccaactcgtactgtcgaggtggattctaaagcagcagaaattggtaagaaaggtgaagacaagacaacacagaaggacacaacagattcggaatcagaattaaaacaaggaaaaaaagattcaaagaaaggcaaggatatagagaaaggaaaagaagaaaagctagatgcaaagaaagatagcaaaaaaggtaaaaaggatgcagagaagggcaaagactcagcaacagaatctgaagatgaaaaaggaggtgcaaagaaagataacaaaaaagataaaaaggattcaaacaaaggcaaagactcggcaacagaatctgaaggtgaaaaaggaggtacagagaaagatagcaaaaaaggtaaaaaggattcaaagaagggcaaggattcagccatagaattacaagctgtaaaagcagatgaaaagaaggatgaggatggaaaaaaagatgcaaacaaaggtgatgaatcgaaggatgccaagaaagatgcaaaggagattaaaaaaggtaagaaagataagaagaagcccagtagtacagacagtgactcaaaggatgatgtcaagaaagagtctaagaaggacgccacgaaagatgccaagaaagttgccaagaaagatactgagaaagaatctgctgattcaaagaaggatgcaaagaaaaatgctaagaaggatgcaaagaaggatgcaaagaagaatgcaaagaaggatgaaaagaaggatgcaaagaagaagggcaagtaggccttggataagaatttgaaccgaaagaataattcaaaagcatatttgatgaaacaatagtggtagtctgcagctgaatttgtgagaaaacaagaggcctcaaagaattaaataatttttaaaaggtggtaaagaaggatacaaaggagaactcagcagagatttataaaaatatataagaaagatgttaagaaaaattaaggggggatccattgaaagacttgaagaatacatatacttatattcggggatatgaaggattcaatgaatgatctctagaaagatttaaagaagaatattcagataaggatgttgaagataatgacactaaatctatggacacacacacacacacacacacacacacacacacacacacacacacacacacacagtttaatgaaggcttaaagaatccaaggagacagatgttgtatctatagatttaaaataatctcaagctgcatccacagatacaaaaaaatataggagccatgaaatgaagttaaacaccttgtagaaagcctactttcaagtaaatatagcattcctttggcaaaaagaaaaaaaaagtaaaagaaaagaaaaaaaatgtattaccacccgatgagcctacatctttctttctgaagtttaaacaaccacagtcatgtttatggttgttggatgtgccacttccaatccaaaagaagcacacttg

SEQ ID NO: 123878 - DNA, 5371 bp, Homo sapiens
  Payload ID: 4310
  Gene Symbol: CYLD
  Gene Name: cylindromatosis (turban tumor syndrome)
  Uniprot ID: Q9NQC7
  ENST ID: ENST00000311559
  CDS Start-End: 392-3262
gggggcgggcccaggtagcaggtttggctgcgcgggggccgcgcgtcggagtttccccctttctagggtgaggatggttctacacagccacccggagttccttagttgaaaggtgcgccctgctgtgacagaatgtggtaattgtaatctttaacattttcatgtaaaacatatttcctgatcatctttccattgtcttcatggaaaattgataaatatttgtgccttccaactctcgtcttggttgaatgacttcatcttaatacaacatggacaccacgttgctgaaaacatgctttgggactgccactgaatttatcttttgcggttttatgacaaagttattagtagtttcccttttttgaattagtattttgaagttaatatcacaatgagttcaggcttatggagccaagaaaaagtcacttcaccctactgggaagagcggattttttacttgcttcttcaagaatgcagcgttacagacaaacaaacacaaaagctccttaaagtaccgaagggaagtataggacagtatattcaagatcgttctgtggggcattcaaggattccttctgcaaaaggcaagaaaaatcagattggattaaaaattctagagcaacctcatgcagttctctttgttgatgaaaaggatgttgtagagataaatgaaaagttcacagagttacttttggcaattaccaattgtgaggagaggttcagcctgtttaaaaacagaaacagactaagtaaaggcctccaaatagacgtgggctgtcctgtgaaagtacagctgagatctggggaagaaaaatttcctggagttgtacgcttcagaggacccctgttagcagagaggacagtctccggaatattctttggagttgaattgctggaagaaggtcgtggtcaaggtttcactgacggggtgtaccaagggaaacagctttttcagtgtgatgaagattgtggcgtgtttgttgcattggacaagctagaactcatagaagatgatgacactgcattggaaagtgattacgcaggtcctggggacacaatgcaggtcgaacttcctcctttggaaataaactccagagtttctttgaaggttggagaaacaatagaatctggaacagttatattctgtgatgttttgccaggaaaagaaagcttaggatattttgttggtgtggacatggataaccctattggcaactgggatggaagatttgatggagtgcagctttgtagttttgcgtgtgttgaaagtacaattctattgcacatcaatgatatcatcccagctttatcagagagtgtgacgcaggaaaggaggcctcccaaacttgcctttatgtcaagaggtgttggggacaaaggttcatccagtcataataaaccaaaggctacaggatctacctcagaccctggaaatagaaacagatctgaattattttataccttaaatgggtcttctgttgactcacaaccacaatccaaatcaaaaaatacatggtacattgatgaagttgcagaagaccctgcaaaatctcttacagagatatctacagactttgaccgttcttcaccaccactccagcctcctcctgtgaactcactgaccaccgagaacagattccactctttaccattcagtctcaccaagatgcccaataccaatggaagtattggccacagtccactttctctgtcagcccagtctgtaatggaagagctaaacactgcacccgtccaagagagtccacccttggccatgcctcctgggaactcacatggtctagaagtgggctcattggctgaagttaaggagaaccctcctttctatggggtaatccgttggatcggtcagccaccaggactgaatgaagtgctcgctggactggaactggaagatgagtgtgcaggctgtacggatggaaccttcagaggcactcggtatttcacctgtgccctgaagaaggcgctgtttgtgaaactgaagagctgcaggcctgactctaggtttgcatcattgcagccggtttccaatcagattgagcgctgtaactctttagcatttggaggctacttaagtgaagtagtagaagaaaatactccaccaaaaatggaaaaagaaggcttggagataatgattgggaagaagaaaggcatccagggtcattacaattcttgttacttagactcaaccttattctgcttatttgcttttagttctgttctggacactgtgttacttagacccaaagaaaagaacgatgtagaatattatagtgaaacccaagagctactgaggacagaaattgttaatcctctgagaatatatggatatgtgtgtgccacaaaaattatgaaactgaggaaaatacttgaaaaggtggaggctgcatcaggatttacctctgaagaaaaagatcctgaggaattcttgaatattctgtttcatcatattttaagggtagaacctttgctaaaaataagatcagcaggtcaaaaggtacaagattgttacttctatcaaatttttatggaaaaaaatgagaaagttggcgttcccacaattcagcagttgttagaatggtcttttatcaacagtaacctgaaatttgcagaggcaccatcatgtctgattattcagatgcctcgatttggaaaagactttaaactatttaaaaaaatttttccttctctggaattaaatataacagatttacttgaagacactcccagacagtgccggatatgtggagggcttgcaatgtatgagtgtagagaatgctacgacgatccggacatctcagctggaaaaatcaagcagttttgtaaaacctgcaacactcaagtccaccttcatccgaagaggctgaatcataaatataacccagtgtcacttcccaaagacttacccgactgggactggagacacggctgcatcccttgccagaatatggagttatttgctgttctctgcatagaaacaagccactatgttgcttttgtgaagtatgggaaggacgattctgcctggctcttctttgacagcatggccgatcgggatggtggtcagaatggcttcaacattcctcaagtcaccccatgcccagaagtaggagagtacttgaagatgtctctggaagacctgcattccttggactccaggagaatccaaggctgtgcacgaagactgctttgtgatgcatatatgtgcatgtaccagagtccaacaatgagtttgtacaaataactggggtcatcgggaaaggcaaagaaactgaaggcagagtcctaacgttgcatcttattcgagctggcagttctgttcacgtccattgccggcaatggatgtctttgtggtgatgatccttcagaaaaggatgcctctgtttaaaaacaaattgcttttgtgtccctgaagtatttaataagaagcattttgcactctagaaagtatgtttgtgttggttttttaagaagtctaaatgaagttattaatacctgaagctttaagttaagtgcattgatcatatgatatttttggaagcatacaattttaattgtggaagtttaaagcctcttttagtccattgagaatgtaaataaatgtgtcttctttatggaccaaggatatgaaatcatttttcttttgtagctaacggttgccttgaggaagaaataatttggttttattaagagtctactctcaatccagttattagagatgtactgagtttgatttgttaatcctttctatatactgctgatcttgcatgtctacaatctgctcagtttttctgtgtttctgcaatagtggtcagaaaaatacttaaattcccttaatggtgttgttttctatttgttctggttttgagataaatgagtgattctgtccccaaatgtccatttttgaagtgattttcctggaggattagggtatttagcagttgaagctcttcattcatagtagttactgtcagctaacaggttttttaaggcttttaactattaatattttatggaatggggcaaagtaaattgatgaaagaattggagtgataatagtcctttacaaacatacagtccataagaaaatgaatttggcatatagaattattacaatttcctgggagagatggatatttaaacctctattattttagacaagactgtctagaacttaagtttgatctgtcagccagtactcccattaaattcagtgtagtttcacttgatagaatcagatatgttatcgaaatgttagcagcagcttcatcctccttctgattaaagtaagtagaaatgggatgttttgtttaataacagccatagtgtgtgtttagaccacagcggatgttgtagaccaggaccatagatgatacatgtcagtgctgtggaatgtgcattctctgagtgttgttttgtggtatcattgtctttcctgaatgactttctaactgtgcagaaaggcagaaaagtcatcatatgtatatgtcatatgactttataaaatatttaatgtgacaaaaagtggaaagaatctttacaaaccctgcaattacttttttaaaggcacttttactctttggttttatcattccattttgctaatatttactagctttataaattacagtaaggtacaaaaactcatcttgtaatattttcatttttgaagtgaaaaagtacatatattttgcacaaggttttatactgctaagtgcttggttggggtggtgagatgatgattagatcaggggtgaggctgagagactctgggtttagggctagccctgcctccatctcccttgggtaaaatgaagggtgtggggtaaaagatgcataaggccttttctagctctgacagcctagaagtccaatcaccctgtaataaatatgtgttgaatgaagaaatgggtgaatgagcttgtcaatgtgattttaaaaaattgactacctggaggaatgattaggaatctaaatgaagccagccctcggtatctgcaggtttctcatccatggattcaaccaactgcaaatggaaaatacgattttttttaaaaaaaggatggttacatccgtattgaacatgtacagacttttttcttgtcattattctctgaacaatacaagaactctttatgtagcatttacatttattaggtattataagtaatctagagattatttaattaaaatatacaggaggatgtgtgtcagttatatgcaaattctgtaccattttgtatcagggaattgagcatcttcagatgttggtatctgcagggatcctggaaccaaacccctgcagatactaagggctgacgatctaggtaagactggatttaacagttggaaa

SEQ ID NO: 123879 - DNA, 3536 bp, Homo sapiens
  Payload ID: 4310
  Gene Symbol: CYLD
  Gene Name: cylindromatosis (turban tumor syndrome)
  Uniprot ID: Q9NQC7
  ENST ID: ENST00000398568
  CDS Start-End: 301-3162
cggaggtaaatactagggcggtgggtgtggggagccggggccggcccgggacgcgggctggggagccggggcgaggggcgacgccccgccgcccgagtttccccctttctagggtgaggatggttctacacagccacccggagttccttagttgaaaggtgcgccctgctgtgacagcatggacaccacgttgctgaaaacatgctttgggactgccactgaatttatcttttgcggttttatgacaaagttattagtagtttcccttttttgaattagtattttgaagttaatatcacaatgagttcaggcttatggagccaagaaaaagtcacttcaccctactgggaagagcggattttttacttgcttcttcaagaatgcagcgttacagacaaacaaacacaaaagctccttaaagtaccgaagggaagtataggacagtatattcaagatcgttctgtggggcattcaaggattccttctgcaaaaggcaagaaaaatcagattggattaaaaattctagagcaacctcatgcagttctctttgttgatgaaaaggatgttgtagagataaatgaaaagttcacagagttacttttggcaattaccaattgtgaggagaggttcagcctgtttaaaaacagaaacagactaagtaaaggcctccaaatagacgtgggctgtcctgtgaaagtacagctgagatctggggaagaaaaatttcctggagttgtacgcttcagaggacccctgttagcagagaggacagtctccggaatattctttggagttgaattgctggaagaaggtcgtggtcaaggtttcactgacggggtgtaccaagggaaacagctttttcagtgtgatgaagattgtggcgtgtttgttgcattggacaagctagaactcatagaagatgatgacactgcattggaaagtgattacgcaggtcctggggacacaatgcaggtcgaacttcctcctttggaaataaactccagagtttctttgaaggttggagaaacaatagaatctggaacagttatattctgtgatgttttgccaggaaaagaaagcttaggatattttgttggtgtggacatggataaccctattggcaactgggatggaagatttgatggagtgcagctttgtagttttgcgtgtgttgaaagtacaattctattgcacatcaatgatatcatcccagagagtgtgacgcaggaaaggaggcctcccaaacttgcctttatgtcaagaggtgttggggacaaaggttcatccagtcataataaaccaaaggctacaggatctacctcagaccctggaaatagaaacagatctgaattattttataccttaaatgggtcttctgttgactcacaaccacaatccaaatcaaaaaatacatggtacattgatgaagttgcagaagaccctgcaaaatctcttacagagatatctacagactttgaccgttcttcaccaccactccagcctcctcctgtgaactcactgaccaccgagaacagattccactctttaccattcagtctcaccaagatgcccaataccaatggaagtattggccacagtccactttctctgtcagcccagtctgtaatggaagagctaaacactgcacccgtccaagagagtccacccttggccatgcctcctgggaactcacatggtctagaagtgggctcattggctgaagttaaggagaaccctcctttctatggggtaatccgttggatcggtcagccaccaggactgaatgaagtgctcgctggactggaactggaagatgagtgtgcaggctgtacggatggaaccttcagaggcactcggtatttcacctgtgccctgaagaaggcgctgtttgtgaaactgaagagctgcaggcctgactctaggtttgcatcattgcagccggtttccaatcagattgagcgctgtaactctttagcatttggaggctacttaagtgaagtagtagaagaaaatactccaccaaaaatggaaaaagaaggcttggagataatgattgggaagaagaaaggcatccagggtcattacaattcttgttacttagactcaaccttattctgcttatttgcttttagttctgttctggacactgtgttacttagacccaaagaaaagaacgatgtagaatattatagtgaaacccaagagctactgaggacagaaattgttaatcctctgagaatatatggatatgtgtgtgccacaaaaattatgaaactgaggaaaatacttgaaaaggtggaggctgcatcaggatttacctctgaagaaaaagatcctgaggaattcttgaatattctgtttcatcatattttaagggtagaacctttgctaaaaataagatcagcaggtcaaaaggtacaagattgttacttctatcaaatttttatggaaaaaaatgagaaagttggcgttcccacaattcagcagttgttagaatggtcttttatcaacagtaacctgaaatttgcagaggcaccatcatgtctgattattcagatgcctcgatttggaaaagactttaaactatttaaaaaaatttttccttctctggaattaaatataacagatttacttgaagacactcccagacagtgccggatatgtggagggcttgcaatgtatgagtgtagagaatgctacgacgatccggacatctcagctggaaaaatcaagcagttttgtaaaacctgcaacactcaagtccaccttcatccgaagaggctgaatcataaatataacccagtgtcacttcccaaagacttacccgactgggactggagacacggctgcatcccttgccagaatatggagttatttgctgttctctgcatagaaacaagccactatgttgcttttgtgaagtatgggaaggacgattctgcctggctcttctttgacagcatggccgatcgggatggtggtcagaatggcttcaacattcctcaagtcaccccatgcccagaagtaggagagtacttgaagatgtctctggaagacctgcattccttggactccaggagaatccaaggctgtgcacgaagactgctttgtgatgcatatatgtgcatgtaccagagtccaacaatgagtttgtacaaataactggggtcatcgggaaaggcaaagaaactgaaggcagagtcctaacgttgcatcttattcgagctggcagttctgttcacgtccattgccggcaatggatgtctttgtggtgatgatccttcagaaaaggatgcctctgtttaaaaacaaattgcttttgtgtccctgaagtatttaataagaagcattttgcactctagaaagtatgtttgtgttggttttttaagaagtctaaatgaagttattaatacctgaagctttaagttaagtgcattgatcatatgatatttttggaagcatacaattttaattgtggaagtttaaagcctcttttagtccattgagaatgtaaataaatgtgtcttctttatgga

SEQ ID NO: 123880 - DNA, 8503 bp, Homo sapiens
  Payload ID: 4310
  Gene Symbol: CYLD
  Gene Name: cylindromatosis (turban tumor syndrome)
  Uniprot ID: Q9NQC7
  ENST ID: ENST00000427738
  CDS Start-End: 206-3076
agtttccccctttctagggtgaggatggttctacacagccacccggagttccttagttgaaaggtgcgccctgctgtgacagcatggacaccacgttgctgaaaacatgctttgggactgccactgaatttatcttttgcggttttatgacaaagttattagtagtttcccttttttgaattagtattttgaagttaatatcacaatgagttcaggcttatggagccaagaaaaagtcacttcaccctactgggaagagcggattttttacttgcttcttcaagaatgcagcgttacagacaaacaaacacaaaagctccttaaagtaccgaagggaagtataggacagtatattcaagatcgttctgtggggcattcaaggattccttctgcaaaaggcaagaaaaatcagattggattaaaaattctagagcaacctcatgcagttctctttgttgatgaaaaggatgttgtagagataaatgaaaagttcacagagttacttttggcaattaccaattgtgaggagaggttcagcctgtttaaaaacagaaacagactaagtaaaggcctccaaatagacgtgggctgtcctgtgaaagtacagctgagatctggggaagaaaaatttcctggagttgtacgcttcagaggacccctgttagcagagaggacagtctccggaatattctttggagttgaattgctggaagaaggtcgtggtcaaggtttcactgacggggtgtaccaagggaaacagctttttcagtgtgatgaagattgtggcgtgtttgttgcattggacaagctagaactcatagaagatgatgacactgcattggaaagtgattacgcaggtcctggggacacaatgcaggtcgaacttcctcctttggaaataaactccagagtttctttgaaggttggagaaacaatagaatctggaacagttatattctgtgatgttttgccaggaaaagaaagcttaggatattttgttggtgtggacatggataaccctattggcaactgggatggaagatttgatggagtgcagctttgtagttttgcgtgtgttgaaagtacaattctattgcacatcaatgatatcatcccagctttatcagagagtgtgacgcaggaaaggaggcctcccaaacttgcctttatgtcaagaggtgttggggacaaaggttcatccagtcataataaaccaaaggctacaggatctacctcagaccctggaaatagaaacagatctgaattattttataccttaaatgggtcttctgttgactcacaaccacaatccaaatcaaaaaatacatggtacattgatgaagttgcagaagaccctgcaaaatctcttacagagatatctacagactttgaccgttcttcaccaccactccagcctcctcctgtgaactcactgaccaccgagaacagattccactctttaccattcagtctcaccaagatgcccaataccaatggaagtattggccacagtccactttctctgtcagcccagtctgtaatggaagagctaaacactgcacccgtccaagagagtccacccttggccatgcctcctgggaactcacatggtctagaagtgggctcattggctgaagttaaggagaaccctcctttctatggggtaatccgttggatcggtcagccaccaggactgaatgaagtgctcgctggactggaactggaagatgagtgtgcaggctgtacggatggaaccttcagaggcactcggtatttcacctgtgccctgaagaaggcgctgtttgtgaaactgaagagctgcaggcctgactctaggtttgcatcattgcagccggtttccaatcagattgagcgctgtaactctttagcatttggaggctacttaagtgaagtagtagaagaaaatactccaccaaaaatggaaaaagaaggcttggagataatgattgggaagaagaaaggcatccagggtcattacaattcttgttacttagactcaaccttattctgcttatttgcttttagttctgttctggacactgtgttacttagacccaaagaaaagaacgatgtagaatattatagtgaaacccaagagctactgaggacagaaattgttaatcctctgagaatatatggatatgtgtgtgccacaaaaattatgaaactgaggaaaatacttgaaaaggtggaggctgcatcaggatttacctctgaagaaaaagatcctgaggaattcttgaatattctgtttcatcatattttaagggtagaacctttgctaaaaataagatcagcaggtcaaaaggtacaagattgttacttctatcaaatttttatggaaaaaaatgagaaagttggcgttcccacaattcagcagttgttagaatggtcttttatcaacagtaacctgaaatttgcagaggcaccatcatgtctgattattcagatgcctcgatttggaaaagactttaaactatttaaaaaaatttttccttctctggaattaaatataacagatttacttgaagacactcccagacagtgccggatatgtggagggcttgcaatgtatgagtgtagagaatgctacgacgatccggacatctcagctggaaaaatcaagcagttttgtaaaacctgcaacactcaagtccaccttcatccgaagaggctgaatcataaatataacccagtgtcacttcccaaagacttacccgactgggactggagacacggctgcatcccttgccagaatatggagttatttgctgttctctgcatagaaacaagccactatgttgcttttgtgaagtatgggaaggacgattctgcctggctcttctttgacagcatggccgatcgggatggtggtcagaatggcttcaacattcctcaagtcaccccatgcccagaagtaggagagtacttgaagatgtctctggaagacctgcattccttggactccaggagaatccaaggctgtgcacgaagactgctttgtgatgcatatatgtgcatgtaccagagtccaacaatgagtttgtacaaataactggggtcatcgggaaaggcaaagaaactgaaggcagagtcctaacgttgcatcttattcgagctggcagttctgttcacgtccattgccggcaatggatgtctttgtggtgatgatccttcagaaaaggatgcctctgtttaaaaacaaattgcttttgtgtccctgaagtatttaataagaagcattttgcactctagaaagtatgtttgtgttggttttttaagaagtctaaatgaagttattaatacctgaagctttaagttaagtgcattgatcatatgatatttttggaagcatacaattttaattgtggaagtttaaagcctcttttagtccattgagaatgtaaataaatgtgtcttctttatggaccaaggatatgaaatcatttttcttttgtagctaacggttgccttgaggaagaaataatttggttttattaagagtctactctcaatccagttattagagatgtactgagtttgatttgttaatcctttctatatactgctgatcttgcatgtctacaatctgctcagtttttctgtgtttctgcaatagtggtcagaaaaatacttaaattcccttaatggtgttgttttctatttgttctggttttgagataaatgagtgattctgtccccaaatgtccatttttgaagtgattttcctggaggattagggtatttagcagttgaagctcttcattcatagtagttactgtcagctaacaggttttttaaggcttttaactattaatattttatggaatggggcaaagtaaattgatgaaagaattggagtgataatagtcctttacaaacatacagtccataagaaaatgaatttggcatatagaattattacaatttcctgggagagatggatatttaaacctctattattttagacaagactgtctagaacttaagtttgatctgtcagccagtactcccattaaattcagtgtagtttcacttgatagaatcagatatgttatcgaaatgttagcagcagcttcatcctccttctgattaaagtaagtagaaatgggatgttttgtttaataacagccatagtgtgtgtttagaccacagcggatgttgtagaccaggaccatagatgatacatgtcagtgctgtggaatgtgcattctctgagtgttgttttgtggtatcattgtctttcctgaatgactttctaactgtgcagaaaggcagaaaagtcatcatatgtatatgtcatatgactttataaaatatttaatgtgacaaaaagtggaaagaatctttacaaaccctgcaattacttttttaaaggcacttttactctttggttttatcattccattttgctaatatttactagctttataaattacagtaaggtacaaaaactcatcttgtaatattttcatttttgaagtgaaaaagtacatatattttgcacaaggttttatactgctaagtgcttggttggggtggtgagatgatgattagatcaggggtgaggctgagagactctgggtttagggctagccctgcctccatctcccttgggtaaaatgaagggtgtggggtaaaagatgcataaggccttttctagctctgacagcctagaagtccaatcaccctgtaataaatatgtgttgaatgaagaaatgggtgaatgagcttgtcaatgtgattttaaaaaattgactacctggaggaatgattaggaatctaaatgaagccagccctcggtatctgcaggtttctcatccatggattcaaccaactgcaaatggaaaatacgattttttttaaaaaaaggatggttacatccgtattgaacatgtacagacttttttcttgtcattattctctgaacaatacaagaactctttatgtagcatttacatttattaggtattataagtaatctagagattatttaattaaaatatacaggaggatgtgtgtcagttatatgcaaattctgtaccattttgtatcagggaattgagcatcttcagatgttggtatctgcagggatcctggaaccaaacccctgcagatactaagggctgacgatctaggtaagactggatttaacagttggaaaaaaaaaaaaaaaaggagagagaagacagttcctttcctgtagaaattaaaacaaaatacaaattgaggaagctctgctacccaggctgtcatggtagagaacttgaagaagacctgtttggatggacacctggtttcaaaagtcaggtgtggagactgttaaatgggagggcctcatccataaatgatttctggcaacgtcttcttcaggtggagcttgacgtctttttaatgttacttggggagggagtgctcattaagggatgccagggccagctctggtggttcctggggaggctgcgtccttccctgcttctgcatgtcatgaggcagcaggaaggtttcccctgcacctgtctgtcctggctccctctgggtagccccctactgttctgtgcttcagcacagcctggtttgtcaagaggcacatagttggggctgggctgcatggcacaggggcttatgtgcctgctggttatttaattttcagccttaagttttctttaatattttcctgttggctatttaaaggttttggttatcttttattccttatctacaatcaagatgacaatgtaattgaattatcttatttataacacggttcgtgattcatgattcatgattacaagtagaaaatatgtcatgttcctcacctccaaataaatatgtgtgtgtctgtgtgtgtgtatatatgtatgtggcggagagggagagagtggggaaggagagcagtgttatcatacatagagaggctaaatgtgtcccatccctcactgtcagctttataaaggagtttgactccatccacagaagaatgttttataagactaggaaaacacgttgaaaactaggataaacagcaacaaaaatcaactaaatatgttgttactgttgctaaggattttctccttagaataatttaggatttttaaaaatttctgtttgccaaatgctgtagataaatggccagattcttcctatccctaggattcctttattattttttttcacagattttgagaacaagggggagagatagtatggaagattaagattccattaatcttatagaactgtgttgtcacccaaattcctgcttgtttgaacatggcatcttcatagattcaggattcactaccctctatagctggatcttgaaaattatctggccagataattttgcatctgcttggatgattgtagactgagatgtgagtggaggataaagtattagacttttgctgagtaactgccaaccaagaagtatttatcggacacttactaggtgcctaggattgtatcagagggaatatgaaatgtgtccctgccctacctagttttaacgacagaatatctattaaaggctacttagctgaagggtaagggtgacaggtctaggggaagctttgggaggtggtgtgctgtgacagaaaaagtggcagagtagggacgagagacctgcattctagccctgtttctgtcacttgctctgtacacttagacaacagcttgacctcttgagctttagtttcctcctctgcataatgagagggttagactactgaattgtatgggaaaaaaatacaaattcctgggtcctaggccatgcctgctgaatccgactgttcaggaagaggcctaggaaatctgtgagggaatccccaggggaatctcgtgaccagccaggtgtgaaatctgctaactggaagatctcaaagcttccttcactttttgtgattttgtggtcatgtaacgttactgtattattctacgtaaatgtgggtacttggatgtttatcatactgtttctctgtgtttacatactaatttgtgtaagaaatgcattttagtctgtgtacctcaacctgctgtttgtttcctagaggtgttagtagtctttaaatacaagtaagacttaagaggatatttgatgttatttacctggatattttcttccccttttatttatttagaggaaattgagattctaggagccaaaaaaatgaaaacaaaattctaaggcaaagttaaagaaaaaaattacattatttcttaccatttgctactttataatgaaaatttaaaaattatatgggaagatttttctctgggataacaaatccttgtcataaagtaagaggtctttttaaagtaggtaggctataaggcctgtaatttaaaataatactcctttctctagggtttggtgcaattctccattaatgaagataacatttgaattccccaaagcaggtgaggagtcggggaggagaaagcgatgttaaaatgaaaactcactgcaaaagaggaggcagaggaagaaggaatgtaaaccccttaaagcagatgtgtgtggggccttatgaagaccaggattctgcgggtgtcaggggattgcccctcttgacagagactagggttttagactgaggcttcctgcagggtgttcgcattgcccttctccgttccccttcagacctttctggggagaagaggtgggaggaggggagaaagactgttcatcttattctgaatcctggagcagctgaaggttttctcttgagtcaggatgcagtggtaatgcattaaccagcaagtgtggccaaggataatgaaaaagtgggaaaggaaggtcctcctcctccctgattgtagcatccagcagtctctgtagccaggttactcaagaaccacatttgatttcctggccctttgccttggcagtgatggcatttttatttcactgtgttttaaagtcttcatttatttttataacatgggttagggagaagggccacaaatggagggattgtcctttcaagcaccacagcttcagataaaattagtactttcaaatattgtccactttaacttaaaaaattctagagggattatattggagactcaactgcccttggttttagtttataaaatggcctagtactgtggaattttaattttagaaagtcttagcatcagatcataaacattcattaaaagaactcacatcccatctgaaacttcccaggggagttgggattcttagtagattggtagaaaggggctcattttctactgcatttcccatttttggtatcttgttcagcatgttttatttttatttcttgtctgcagaacatcctatatttatgagaacattctttaagaagaccaccacatagaataccccttcctatcagctcgctctgatttagccttaattttgttaaattttttagagatgaatgaagtgctgctgtggaaagaaatgtacatatactatttctgtatcattaaaattacatttttatggttc

SEQ ID NO: 123881 - DNA, 3259 bp, Homo sapiens
  Payload ID: 4310
  Gene Symbol: CYLD
  Gene Name: cylindromatosis (turban tumor syndrome)
  Uniprot ID: Q9NQC7
  ENST ID: ENST00000564326
  CDS Start-End: 195-3056
ggcccaggtagcaggtttggctgcgcgggggccgcgcgtcggaggcattttgatttcctttctttttacagcatggacaccacgttgctgaaaacatgctttgggactgccactgaatttatcttttgcggttttatgacaaagttattagtagtttcccttttttgaattagtattttgaagttaatatcacaatgagttcaggcttatggagccaagaaaaagtcacttcaccctactgggaagagcggattttttacttgcttcttcaagaatgcagcgttacagacaaacaaacacaaaagctccttaaagtaccgaagggaagtataggacagtatattcaagatcgttctgtggggcattcaaggattccttctgcaaaaggcaagaaaaatcagattggattaaaaattctagagcaacctcatgcagttctctttgttgatgaaaaggatgttgtagagataaatgaaaagttcacagagttacttttggcaattaccaattgtgaggagaggttcagcctgtttaaaaacagaaacagactaagtaaaggcctccaaatagacgtgggctgtcctgtgaaagtacagctgagatctggggaagaaaaatttcctggagttgtacgcttcagaggacccctgttagcagagaggacagtctccggaatattctttggagttgaattgctggaagaaggtcgtggtcaaggtttcactgacggggtgtaccaagggaaacagctttttcagtgtgatgaagattgtggcgtgtttgttgcattggacaagctagaactcatagaagatgatgacactgcattggaaagtgattacgcaggtcctggggacacaatgcaggtcgaacttcctcctttggaaataaactccagagtttctttgaaggttggagaaacaatagaatctggaacagttatattctgtgatgttttgccaggaaaagaaagcttaggatattttgttggtgtggacatggataaccctattggcaactgggatggaagatttgatggagtgcagctttgtagttttgcgtgtgttgaaagtacaattctattgcacatcaatgatatcatcccagagagtgtgacgcaggaaaggaggcctcccaaacttgcctttatgtcaagaggtgttggggacaaaggttcatccagtcataataaaccaaaggctacaggatctacctcagaccctggaaatagaaacagatctgaattattttataccttaaatgggtcttctgttgactcacaaccacaatccaaatcaaaaaatacatggtacattgatgaagttgcagaagaccctgcaaaatctcttacagagatatctacagactttgaccgttcttcaccaccactccagcctcctcctgtgaactcactgaccaccgagaacagattccactctttaccattcagtctcaccaagatgcccaataccaatggaagtattggccacagtccactttctctgtcagcccagtctgtaatggaagagctaaacactgcacccgtccaagagagtccacccttggccatgcctcctgggaactcacatggtctagaagtgggctcattggctgaagttaaggagaaccctcctttctatggggtaatccgttggatcggtcagccaccaggactgaatgaagtgctcgctggactggaactggaagatgagtgtgcaggctgtacggatggaaccttcagaggcactcggtatttcacctgtgccctgaagaaggcgctgtttgtgaaactgaagagctgcaggcctgactctaggtttgcatcattgcagccggtttccaatcagattgagcgctgtaactctttagcatttggaggctacttaagtgaagtagtagaagaaaatactccaccaaaaatggaaaaagaaggcttggagataatgattgggaagaagaaaggcatccagggtcattacaattcttgttacttagactcaaccttattctgcttatttgcttttagttctgttctggacactgtgttacttagacccaaagaaaagaacgatgtagaatattatagtgaaacccaagagctactgaggacagaaattgttaatcctctgagaatatatggatatgtgtgtgccacaaaaattatgaaactgaggaaaatacttgaaaaggtggaggctgcatcaggatttacctctgaagaaaaagatcctgaggaattcttgaatattctgtttcatcatattttaagggtagaacctttgctaaaaataagatcagcaggtcaaaaggtacaagattgttacttctatcaaatttttatggaaaaaaatgagaaagttggcgttcccacaattcagcagttgttagaatggtcttttatcaacagtaacctgaaatttgcagaggcaccatcatgtctgattattcagatgcctcgatttggaaaagactttaaactatttaaaaaaatttttccttctctggaattaaatataacagatttacttgaagacactcccagacagtgccggatatgtggagggcttgcaatgtatgagtgtagagaatgctacgacgatccggacatctcagctggaaaaatcaagcagttttgtaaaacctgcaacactcaagtccaccttcatccgaagaggctgaatcataaatataacccagtgtcacttcccaaagacttacccgactgggactggagacacggctgcatcccttgccagaatatggagttatttgctgttctctgcatagaaacaagccactatgttgcttttgtgaagtatgggaaggacgattctgcctggctcttctttgacagcatggccgatcgggatggtggtcagaatggcttcaacattcctcaagtcaccccatgcccagaagtaggagagtacttgaagatgtctctggaagacctgcattccttggactccaggagaatccaaggctgtgcacgaagactgctttgtgatgcatatatgtgcatgtaccagagtccaacaatgagtttgtacaaataactggggtcatcgggaaaggcaaagaaactgaaggcagagtcctaacgttgcatcttattcgagctggcagttctgttcacgtccattgccggcaatggatgtctttgtggtgatgatccttcagaaaaggatgcctctgtttaaaaacaaattgcttttgtgtccctgaagtatttaataagaagcattttgcactctagaaa

SEQ ID NO: 123882 - DNA, 539 bp, Homo sapiens
  Payload ID: 4310
  Gene Symbol: CYLD
  Gene Name: cylindromatosis (turban tumor syndrome)
  ENST ID: ENST00000564634
  CDS Start-End: 440-539
gtcggaggtaaatactagggcggtgggtgtggggagccggggccggcccgggacgcgggctggggagccggggcgaggggcgacgccccgccgcccgagtttccccctttctagggtgaggatggttctacacagccacccggagttccttagttgaaaggtgcgccctgctgtgacagaatgtggtaattgtaatctttaacattttcatgtaaaacatatttcctgatcatctttccattgtcttcatggaaaattgataaatatttgtgccttccaactctcgtcttggttgaatgacttcatcttaatacaacatggacaccacgttgctgaaaacatgctttgggactgccactgaatttatcttttgcggttttatgacaaagttattagtagtttcccttttttgaattagtattttgaagttaatatcacaatgagttcaggcttatggagccaagaaaaagtcacttcaccctactgggaagagcggattttttacttgcttcttcaagaatgcagcgttacagacaaac

SEQ ID NO: 123883 - DNA, 3292 bp, Homo sapiens
  Payload ID: 4310
  Gene Symbol: CYLD
  Gene Name: cylindromatosis (turban tumor syndrome)
  ENST ID: ENST00000568704
  CDS Start-End: 151-2466
gcattttgatttcctttctttttacagcatggacaccacgttgctgaaaacatgctttgggactgccactgaatttatcttttgcggttttatgacaaagttattagtagtttcccttttttgaattagtattttgaagttaatatcacaatgagttcaggcttatggagccaagaaaaagtcacttcaccctactgggaagagcggattttttacttgcttcttcaagaatgcagcgttacagacaaacaaacacaaaagctccttaaagtaccgaagggaagtataggacagtatattcaagatcgttctgtggggcattcaaggattccttctgcaaaaggcaagaaaaatcagattggattaaaaattctagagcaacctcatgcagttctctttgttgatgaaaaggatgttgtagagataaatgaaaagttcacagagttacttttggcaattaccaattgtgaggagaggttcagcctgtttaaaaacagaaacagactaagtaaaggcctccaaatagacgtgggctgtcctgtgaaagtacagctgagatctggggaagaaaaatttcctggagttgtacgcttcagaggacccctgttagcagagaggacagtctccggaatattctttggagttgaattgctggaagaaggtcgtggtcaaggtttcactgacggggtgtaccaagggaaacagctttttcagtgtgatgaagattgtggcgtgtttgttgcattggacaagctagaactcatagaagatgatgacactgcattggaaagtgattacgcaggtcctggggacacaatgcaggtcgaacttcctcctttggaaataaactccagagtttctttgaaggttggagaaacaatagaatctggaacagttatattctgtgatgttttgccaggaaaagaaagcttaggatattttgttggtgtggacatggataaccctattggcaactgggatggaagatttgatggagtgcagctttgtagttttgcgtgtgttgaaagtacaattctattgcacatcaatgatatcatcccagagagtgtgacgcaggaaaggaggcctcccaaacttgcctttatgtcaagaggtgttggggacaaaggttcatccagtcataataaaccaaaggctacaggatctacctcagaccctggaaatagaaacagatctgaattattttataccttaaatgggtcttctgttgactcacaaccacaatccaaatcaaaaaatacatggtacattgatgaagcatttggaggctacttaagtgaagtagtagaagaaaatactccaccaaaaatggaaaaagaaggcttggagataatgattgggaagaagaaaggcatccagggtcattacaattcttgttacttagactcaaccttattctgcttatttgcttttagttctgttctggacactgtgttacttagacccaaagaaaagaacgatgtagaatattatagtgaaacccaagagctactgaggacagaaattgttaatcctctgagaatatatggatatgtgtgtgccacaaaaattatgaaactgaggaaaatacttgaaaaggtggaggctgcatcaggatttacctctgaagaaaaagatcctgaggaattcttgaatattctgtttcatcatattttaagggtagaacctttgctaaaaataagatcagcaggtcaaaaggtacaagattgttacttctatcaaatttttatggaaaaaaatgagaaagttggcgttcccacaattcagcagttgttagaatggtcttttatcaacagtaacctgaaatttgcagaggcaccatcatgtctgattattcagatgcctcgatttggaaaagactttaaactatttaaaaaaatttttccttctctggaattaaatataacagatttacttgaagacactcccagacagtgccggatatgtggagggcttgcaatgtatgagtgtagagaatgctacgacgatccggacatctcagctggaaaaatcaagcagttttgtaaaacctgcaacactcaagtccaccttcatccgaagaggctgaatcataaatataacccagtgtcacttcccaaagacttacccgactgggactggagacacggctgcatcccttgccagaatatggagttatttgctgttctctgcatagaaacaagccactatgttgcttttgtgaagtatgggaaggacgattctgcctggctcttctttgacagcatggccgatcgggatggtggtcagaatggcttcaacattcctcaagtcaccccatgcccagaagtaggagagtacttgaagatgtctctggaagacctgcattccttggactccaggagaatccaaggctgtgcacgaagactgctttgtgatgcatatatgtgcatgtaccagagtccaacaatgagtttgtacaaataactggggtcatcgggaaaggcaaagaaactgaaggcagagtcctaacgttgcatcttattcgagctggcagttctgttcacgtccattgccggcaatggatgtctttgtggtgatgatccttcagaaaaggatgcctctgtttaaaaacaaattgcttttgtgtccctgaagtatttaataagaagcattttgcactctagaaagtatgtttgtgttggttttttaagaagtctaaatgaagttattaatacctgaagctttaagttaagtgcattgatcatatgatatttttggaagcatacaattttaattgtggaagtttaaagcctcttttagtccattgagaatgtaaataaatgtgtcttctttatggaccaaggatatgaaatcatttttcttttgtagctaacggttgccttgaggaagaaataatttggttttattaagagtctactctcaatccagttattagagatgtactgagtttgatttgttaatcctttctatatactgctgatcttgcatgtctacaatctgctcagtttttctgtgtttctgcaatagtggtcagaaaaatacttaaattcccttaatggtgttgttttctatttgttctggttttgagataaatgagtgattctgtccccaaatgtccatttttgaagtgattttcctggaggattagggtatttagcagttgaagctcttcattcatagtagttactgtcagctaacaggttttttaaggcttttaactattaatattttatggaatggggcaaagtaaattgatgaaagaattggagtgataatagtcctttacaaa

SEQ ID NO: 123884 - DNA, 1158 bp, Homo sapiens
  Payload ID: 4310
  Gene Symbol: CYLD
  Gene Name: cylindromatosis (turban tumor syndrome)
  ENST ID: ENST00000566679
  CDS Start-End: 246-1158
ggccgcgcgtcggagtttccccctttctagggtgaggatggttctacacagccacccggagttccttagttgaaaggtgcgccctgctgtgacaggcattttgatttcctttctttttacagcatggacaccacgttgctgaaaacatgctttgggactgccactgaatttatcttttgcggttttatgacaaagttattagtagtttcccttttttgaattagtattttgaagttaatatcacaatgagttcaggcttatggagccaagaaaaagtcacttcaccctactgggaagagcggattttttacttgcttcttcaagaatgcagcgttacagacaaacaaacacaaaagctccttaaagtaccgaagggaagtataggacagtatattcaagatcgttctgtggggcattcaaggattccttctgcaaaaggcaagaaaaatcagattggattaaaaattctagagcaacctcatgcagttctctttgttgatgaaaaggatgttgtagagataaatgaaaagttcacagagttacttttggcaattaccaattgtgaggagaggttcagcctgtttaaaaacagaaacagactaagtaaaggcctccaaatagacgtgggctgtcctgtgaaagtacagctgagatctggggaagaaaaatttcctggagttgtacgcttcagaggacccctgttagcagagaggacagtctccggaatattctttggagttgaattgctggaagaaggtcgtggtcaaggtttcactgacggggtgtaccaagggaaacagctttttcagtgtgatgaagattgtggcgtgtttgttgcattggacaagctagaactcatagaagatgatgacactgcattggaaagtgattacgcaggtcctggggacacaatgcaggtcgaacttcctcctttggaaataaactccagagtttctttgaaggttggagaaacaatagaatctggaacagttatattctgtgatgttttgccaggaaaagaaagcttaggatattttgttggtgtggacatggataaccctattggcaactgggatggaagatttgatggagtgcagctttgtagttttgcgtgtgttgaaagtacaattctattgcacatcaatgatatcatcccag

SEQ ID NO: 123885 - DNA, 777 bp, Homo sapiens
  Payload ID: 4310
  Gene Symbol: CYLD
  Gene Name: cylindromatosis (turban tumor syndrome)
  ENST ID: ENST00000569681
  CDS Start-End: 279-777
gtgcggttcggaggcggggcaggtgggggcgggcccaggtagcaggtttggctgcgcgggggccgcgcgtcggagtttccccctttctagggtgaggatggttctacacagccacccggagttccttagttgaaaggtgcgccctgctgtgacagcatggacaccacgttgctgaaaacatgctttgggactgccactgaatttatcttttgcggttttatgacaaagttattagtagtttcccttttttgaattagtattttgaagttaatatcacaatgagttcaggcttatggagccaagaaaaagtcacttcaccctactgggaagagcggattttttacttgcttcttcaagaatgcagcgttacagacaaacaaacacaaaagctccttaaagtaccgaagggaagtataggacagtatattcaagatcgttctgtggggcattcaaggattccttctgcaaaaggcaagaaaaatcagattggattaaaaattctagagcaacctcatgcagttctctttgttgatgaaaaggatgttgtagagataaatgaaaagttcacagagttacttttggcaattaccaattgtgaggagaggttcagcctgtttaaaaacagaaacagactaagtaaaggcctccaaatagacgtgggctgtcctgtgaaagtacagctgagatctggggaagaaaaatttcctggagttgtacgcttcagaggacccctgttagcagagaggacagtctccggaatattctttggagttgaat

SEQ ID NO: 123886 - DNA, 3513 bp, Homo sapiens
  Payload ID: 4310
  Gene Symbol: CYLD
  Gene Name: cylindromatosis (turban tumor syndrome)
  Uniprot ID: Q9NQC7
  ENST ID: ENST00000569418
  CDS Start-End: 279-3140
gtgcggttcggaggcggggcaggtgggggcgggcccaggtagcaggtttggctgcgcgggggccgcgcgtcggagtttccccctttctagggtgaggatggttctacacagccacccggagttccttagttgaaaggtgcgccctgctgtgacagcatggacaccacgttgctgaaaacatgctttgggactgccactgaatttatcttttgcggttttatgacaaagttattagtagtttcccttttttgaattagtattttgaagttaatatcacaatgagttcaggcttatggagccaagaaaaagtcacttcaccctactgggaagagcggattttttacttgcttcttcaagaatgcagcgttacagacaaacaaacacaaaagctccttaaagtaccgaagggaagtataggacagtatattcaagatcgttctgtggggcattcaaggattccttctgcaaaaggcaagaaaaatcagattggattaaaaattctagagcaacctcatgcagttctctttgttgatgaaaaggatgttgtagagataaatgaaaagttcacagagttacttttggcaattaccaattgtgaggagaggttcagcctgtttaaaaacagaaacagactaagtaaaggcctccaaatagacgtgggctgtcctgtgaaagtacagctgagatctggggaagaaaaatttcctggagttgtacgcttcagaggacccctgttagcagagaggacagtctccggaatattctttggagttgaattgctggaagaaggtcgtggtcaaggtttcactgacggggtgtaccaagggaaacagctttttcagtgtgatgaagattgtggcgtgtttgttgcattggacaagctagaactcatagaagatgatgacactgcattggaaagtgattacgcaggtcctggggacacaatgcaggtcgaacttcctcctttggaaataaactccagagtttctttgaaggttggagaaacaatagaatctggaacagttatattctgtgatgttttgccaggaaaagaaagcttaggatattttgttggtgtggacatggataaccctattggcaactgggatggaagatttgatggagtgcagctttgtagttttgcgtgtgttgaaagtacaattctattgcacatcaatgatatcatcccagagagtgtgacgcaggaaaggaggcctcccaaacttgcctttatgtcaagaggtgttggggacaaaggttcatccagtcataataaaccaaaggctacaggatctacctcagaccctggaaatagaaacagatctgaattattttataccttaaatgggtcttctgttgactcacaaccacaatccaaatcaaaaaatacatggtacattgatgaagttgcagaagaccctgcaaaatctcttacagagatatctacagactttgaccgttcttcaccaccactccagcctcctcctgtgaactcactgaccaccgagaacagattccactctttaccattcagtctcaccaagatgcccaataccaatggaagtattggccacagtccactttctctgtcagcccagtctgtaatggaagagctaaacactgcacccgtccaagagagtccacccttggccatgcctcctgggaactcacatggtctagaagtgggctcattggctgaagttaaggagaaccctcctttctatggggtaatccgttggatcggtcagccaccaggactgaatgaagtgctcgctggactggaactggaagatgagtgtgcaggctgtacggatggaaccttcagaggcactcggtatttcacctgtgccctgaagaaggcgctgtttgtgaaactgaagagctgcaggcctgactctaggtttgcatcattgcagccggtttccaatcagattgagcgctgtaactctttagcatttggaggctacttaagtgaagtagtagaagaaaatactccaccaaaaatggaaaaagaaggcttggagataatgattgggaagaagaaaggcatccagggtcattacaattcttgttacttagactcaaccttattctgcttatttgcttttagttctgttctggacactgtgttacttagacccaaagaaaagaacgatgtagaatattatagtgaaacccaagagctactgaggacagaaattgttaatcctctgagaatatatggatatgtgtgtgccacaaaaattatgaaactgaggaaaatacttgaaaaggtggaggctgcatcaggatttacctctgaagaaaaagatcctgaggaattcttgaatattctgtttcatcatattttaagggtagaacctttgctaaaaataagatcagcaggtcaaaaggtacaagattgttacttctatcaaatttttatggaaaaaaatgagaaagttggcgttcccacaattcagcagttgttagaatggtcttttatcaacagtaacctgaaatttgcagaggcaccatcatgtctgattattcagatgcctcgatttggaaaagactttaaactatttaaaaaaatttttccttctctggaattaaatataacagatttacttgaagacactcccagacagtgccggatatgtggagggcttgcaatgtatgagtgtagagaatgctacgacgatccggacatctcagctggaaaaatcaagcagttttgtaaaacctgcaacactcaagtccaccttcatccgaagaggctgaatcataaatataacccagtgtcacttcccaaagacttacccgactgggactggagacacggctgcatcccttgccagaatatggagttatttgctgttctctgcatagaaacaagccactatgttgcttttgtgaagtatgggaaggacgattctgcctggctcttctttgacagcatggccgatcgggatggtggtcagaatggcttcaacattcctcaagtcaccccatgcccagaagtaggagagtacttgaagatgtctctggaagacctgcattccttggactccaggagaatccaaggctgtgcacgaagactgctttgtgatgcatatatgtgcatgtaccagagtccaacaatgagtttgtacaaataactggggtcatcgggaaaggcaaagaaactgaaggcagagtcctaacgttgcatcttattcgagctggcagttctgttcacgtccattgccggcaatggatgtctttgtggtgatgatccttcagaaaaggatgcctctgtttaaaaacaaattgcttttgtgtccctgaagtatttaataagaagcattttgcactctagaaagtatgtttgtgttggttttttaagaagtctaaatgaagttattaatacctgaagctttaagttaagtgcattgatcatatgatatttttggaagcatacaattttaattgtggaagtttaaagcctcttttagtccattgagaatgtaaataaatgtgtcttctttatgg

SEQ ID NO: 123887 - DNA, 409 bp, Homo sapiens
  Payload ID: 4310
  Gene Symbol: CYLD
  Gene Name: cylindromatosis (turban tumor syndrome)
  ENST ID: ENST00000566024
  CDS Start-End: 1-200
acggctgcatcccttgccagaatatggagttatttgctgttctctgcatagaaacaagccactatgttgcttttgtgaagtatgggaaggacgattctgcctggctcttctttgacagcatggccgatcgggatggtactgaaaacgcctttcttctgcatgtggcacagggttctgggtttggtgcaattctccattaatgaagataacatttgaattccccaaagcagaacatcctatatttatgagaacattctttaagaagaccaccacatagaataccccttcctatcagctcgctctgatttagccttaattttgttaaattttttagagatgaatgaagtgctgctgtggaaagaaatgtacatatactatttctgtatcattaaaattacatttttatggt

SEQ ID NO: 123888 - DNA, 3104 bp, Homo sapiens
  Payload ID: 4310
  Gene Symbol: CYLD
  Gene Name: cylindromatosis (turban tumor syndrome)
  ENST ID: ENST00000566206
  CDS Start-End: 251-2983
aggtagcaggtttggctgcgcgggggccgcgcgtcggagtttccccctttctagggtgaggatggttctacacagccacccggagttccttagttgaaaggcattttgatttcctttctttttacagcatggacaccacgttgctgaaaacatgctttgggactgccactgaatttatcttttgcggttttatgacaaagttattagtagtttcccttttttgaattagtattttgaagttaatatcacaatgagttcaggcttatggagccaagaaaaagtcacttcaccctactgggaagagcggattttttacttgcttcttcaagaatgcagcgttacagacaaacaaacacaaaagctccttaaagtaccgaagggaagtataggacagtatattcaagatcgttctgtggggcattcaaggattccttctgcaaaaggcaagaaaaatcagattggattaaaaattctagagcaacctcatgcagttctctttgttgatgaaaaggatgttgtagagataaatgaaaagttcacagagttacttttggcaattaccaattgtgaggagaggttcagcctgtttaaaaacagaaacagactaagtaaaggcctccaaatagacgtgggctgtcctgtgaaagtacagctgagatctggggaagaaaaatttcctggagttgtacgcttcagaggacccctgttagcagagaggacagtctccggaatattctttggagttgaattgctggaagaaggtcgtggtcaaggtttcactgacggggtgtaccaagggaaacagctttttcagtgtgatgaagattgtggcgtgtttgttgcattggacaagctagaactcatagaagatgatgacactgcattggaaagtgattacgcaggtcctggggacacaatgcaggtcgaacttcctcctttggaaataaactccagagtttctttgaaggttggagaaacaatagaatctggaacagttatattctgtgatgttttgccaggaaaagaaagcttaggatattttgttggtgtggacatggataaccctattggcaactgggatggaagatttgatggagtgcagctttgtagttttgcgtgtgttgaaagtacaattctattgcacatcaatgatatcatcccagagagtgtgacgcaggaaaggaggcctcccaaacttgcctttatgtcaagaggtgttggggacaaaggttcatccagtcataataaaccaaaggctacaggatctacctcagaccctggaaatagaaacagatctgaattattttataccttaaatgggtcttctgttgactcacaaccacaatccaaatcaaaaaatacatggtacattgatgaagttgcagaagaccctgcaaaatctcttacagagatatctacagactttgaccgttcttcaccaccactccagcctcctcctgtgaactcactgaccaccgagaacagattccactctttaccattcagtctcaccaagatgcccaataccaatggaagtattggccacagtccactttctctgtcagcccagtctgtaatggaagagctaaacactgcacccgtccaagagagtccacccttggccatgcctcctgggaactcacatggtctagaagtgggctcattggctgaagttaaggagaaccctcctttctatggggtaatccgttggatcggtcagccaccaggactgaatgaagtgctcgctggactggaactggaagatgagtgtgcaggctgtacggatggaaccttcagaggcactcggtatttcacctgtgccctgaagaaggcgctgtttgtgaaactgaagagctgcaggcctgactctaggtttgcatcattgcagccggtttccaatcagattgagcgctgtaactctttagcatttggaggctacttaagtgaagtagtagaagaaaatactccaccaaaaatggaaaaagaaggcttggagataatgattgggaagaagaaaggcatccagggtcattacaattcttgttacttagactcaaccttattctgcttatttgcttttagttctgttctggacactgtgttacttagacccaaagaaaagaacgatgtagaatattatagtgaaacccaagagctactgaggacagaaattgttaatcctctgagaatatatggatatgtgtgtgccacaaaaattatgaaactgaggaaaatacttgaaaaggtggaggctgcatcaggatttacctctgaagaaaaagatcctgaggaattcttgaatattctgtttcatcatattttaagggtagaacctttgctaaaaataagatcagcaggtcaaaaggtacaagattgttacttctatcaaatttttatggaaaaaaatgagaaagttggcgttcccacaattcagcagttgttagaatggtcttttatcaacagtaacctgaaatttgcagaggcaccatcatgtctgattattcagatgcctcgatttggaaaagactttaaactatttaaaaaaatttttccttctctggaattaaatataacagatttacttgaagacactcccagacagtgccggatatgtggagggcttgcaatgtatgagtgtagagaatgctacgacgatccggacatctcagctggaaaaatcaagcagttttgtaaaacctgcaacactcaagtccaccttcatccgaagaggctgaatcataaatataacccagtgtcacttcccaaagacttacccgactgggactggagacacggctgcatcccttgccagaatatggagttatttgctgttctctgcatagaaacaagccactatgttgcttttgtgaagtatgggaaggacgattctgcctggctcttctttgacagcatggccgatcgggatgctgctctctcagatccagcccccacggccttctggtgtggccctccagtagcctaagacattccctgtggcagcctcttgaacagaggcccaggccctagatcaagagttctccaccttttctcagttctctgatgcttgagggatacatcccagccccatctgtagatgtgccccc

SEQ ID NO: 123889 - DNA, 725 bp, Homo sapiens
  Payload ID: 4310
  Gene Symbol: CYLD
  Gene Name: cylindromatosis (turban tumor syndrome)
  ENST ID: ENST00000562884
  CDS Start-End: 1-315
atctcagctggaaaaatcaagcagttttgtaaaacctgcaacactcaagtccaccttcatccgaagaggctgaatcataaatataacccagtgtcacttcccaaagacttacccgactgggactggagacacggctgcatcccttgccagaatatggagttatttgctgttctctgcatagaaacaagccactatgttgcttttgtgaagtatgggaaggacgattctgcctggctcttctttgacagcatggccgatcgggatggtactgaaaacgcctttcttctgcatgtggcacagggttctggtttgtagtgggacagtttgtagtgggatcgcctgttctgagtgatattttctgagaaaatcctttcaggattattctggtgacaacagtcttatatcttggattgcattaacaaccttgctagctgaactaaggaataatatgctgtgtttttttttttccttttttgagatggagtctcactctgtcacccaggctggagtgcagcagcgtgatcttggctcattgcaacctccacctctcaggttcaagcaatcctcccacctcagcctcctgagtagctgggactacacgcatatgccaccatgcctggctaatttttgtatttttagtagagatgggcttctgccatgttgcccaagctggtctcaaattcctggcctcaagtgattaaccctccttttcctctcgatgtgct

SEQ ID NO: 123890 - DNA, 1704 bp, Homo sapiens
  Payload ID: 4311
  Gene Symbol: CYP3A7-CYP3A51P
  Gene Name: CYP3A7-CYP3A51P readthrough
  ENST ID: ENST00000620220
  CDS Start-End: 10-1521
aaagtagtgatggatctcatcccaaacttggccgtggaaacctggcttctcctggctgtcagcctgatactcctctatctatatggaacccgtacacatggactttttaagaagcttggaattccagggcccacacctctgccttttttgggaaatgctttgtccttccgtaagggctattggacgtttgacatggaatgttataaaaagtatagaaaagtctggggtatttatgactgtcaacagcctatgctggctatcacagatcccgacatgatcaaaacagtgctagtgaaagaatgttattctgtcttcacaaaccggaggcctttcgggccagtgggatttatgaaaaatgccatctctatagctgaggatgaagaatggaagagaatacgatcattgctgtctccaacattcaccagcggaaaactcaaggagatggtccctatcattgcccagtatggagatgtgttggtgagaaatctgaggcgggaagcagagacaggcaagcctgtcaccttgaaacacgtctttggggcctacagcatggatgtgatcactagcacatcatttggagtgagcatcgactctctcaacaatccacaagacccctttgtggaaaacaccaagaagcttttaagatttaatccattagatccattcgttctctcaataaaagtctttccattccttaccccaattcttgaagcattaaatatcactgtgtttccaagaaaagttataagttttctaacaaaatctgtaaaacagataaaagaaggtcgcctcaaagagacacaaaagcaccgagtggatttccttcagctgatgattgactctcagaattcaaaagactctgagacccacaaagctctgtctgatctggagctcatggcccaatcaattatctttatttttgctggctatgaaaccacgagcagtgttctctccttcattatatatgaactggccactcaccctgatgtccagcagaaagtgcagaaggaaattgatacagttttacccaataaggcaccacccacctatgatactgtgctacagttggagtatcttgacatggtggtgaatgaaacactcagattattcccagttgctatgagacttgagagggtctgcaaaaaagatgttgaaatcaatgggatgtttattcccaaaggggtggtggtgatgattccaagctatgttcttcatcatgacccaaagtactggacagagcctgagaagttcctccctgaaaggttcagtaaaaagaacaaggacaacatagatccttacatatacacaccctttggaagtggacccagaaactgcattggcatgaggtttgctctcgtgaacatgaaacttgctctagtcagagtccttcagaacttctccttcaaaccttgtaaagaaacacagatcccgctgaaattacgcttaggaggacttcttcaaccagaaaaacccattgttctaaaggttgagtcaagggatgggaccgtaagtggaacctgaatttccctaaggacttctgctttgctcttcaaaaaagctgtgacctagaacaccagagacctcaaattactttgtgaatagtaccctgaaatgaagatgggcttcatccactgtactgcataaataaccagggattctgtacatgcactgagctctctccctgtctgtgtagagtgttatact

SEQ ID NO: 123891 - DNA, 1608 bp, Homo sapiens
  Payload ID: 4311
  Gene Symbol: CYP3A7-CYP3A51P
  Gene Name: CYP3A7-CYP3A51P readthrough
  Uniprot ID: P24462
  ENST ID: ENST00000611620
  CDS Start-End: 1-1608
atggatctcatcccaaacttggccgtggaaacctggcttctcctggctgtcagcctgatactcctctatctatatggaacccgtacacatggactttttaagaagcttggaattccagggcccacacctctgccttttttgggaaatgctttgtccttccgtaagggctattggacgtttgacatggaatgttataaaaagtatagaaaagtctggggtatttatgactgtcaacagcctatgctggctatcacagatcccgacatgatcaaaacagtgctagtgaaagaatgttattctgtcttcacaaaccggaggcctttcgggccagtgggatttatgaaaaatgccatctctatagctgaggatgaagaatggaagagaatacgatcattgctgtctccaacattcaccagcggaaaactcaaggagatggtccctatcattgcccagtatggagatgtgttggtgagaaatctgaggcgggaagcagagacaggcaagcctgtcaccttgaaacacgtctttggggcctacagcatggatgtgatcactagcacatcatttggagtgagcatcgactctctcaacaatccacaagacccctttgtggaaaacaccaagaagcttttaagatttaatccattagatccattcgttctctcaataaaagtctttccattccttaccccaattcttgaagcattaaatatcactgtgtttccaagaaaagttataagttttctaacaaaatctgtaaaacagataaaagaaggtcgcctcaaagagacacaaaagcaccgagtggatttccttcagctgatgattgactctcagaattcaaaagactctgagacccacaaagctctgtctgatctggagctcatggcccaatcaattatctttatttttgctggctatgaaaccacgagcagtgttctctccttcattatatatgaactggccactcaccctgatgtccagcagaaagtgcagaaggaaattgatacagttttacccaataaggcaccacccacctatgatactgtgctacagttggagtatcttgacatggtggtgaatgaaacactcagattattcccagttgctatgagacttgagagggtctgcaaaaaagatgttgaaatcaatgggatgtttattcccaaaggggtggtggtgatgattccaagctatgttcttcatcatgacccaaagtactggacagagcctgagaagttcctccctgaaaggttcagtaaaaagaacaaggacaacatagatccttacatatacacaccctttggaagtggacccagaaactgcattggcatgaggtttgctctcgtgaacatgaaacttgctctagtcagagtccttcagaacttctccttcaaaccttgtaaagaaacacagatccccctgaaattacgctttggaggacttcttctaacagaaaaacccattgttctaaaggctgagtcaagggatgagacctttgtagatatggagcccattcacatggactttttaagaagcttggcattccagggcccacacctctgctttttttgggaactactttgtcctaccatcagatcccgctga

SEQ ID NO: 123892 - DNA, 1196 bp, Homo sapiens
  Payload ID: 4312
  Gene Symbol: CTH
  Gene Name: cystathionine gamma-lyase
  Uniprot ID: P32929
  ENST ID: ENST00000346806
  CDS Start-End: 34-1119
ttcttttcctctcttcttctttcgcggttcagcatgcaggaaaaagacgcctcctcacaaggtttcctgccacacttccaacatttcgccacgcaggcgatccatgtgggccaggatccagagcaatggacctccagggctgtagtgccccccatctcactgtccaccacgttcaagcaaggggcgcctggccagcactcgggttttgaatatagccgttctggaaatcccactaggaattgccttgaaaaagcagtggcagcactggatggggctaagtactgtttggcctttgcttcaggtttagcagccactgtaactattacccatcttttaaaagcaggagaccaaattatttgtatggatgatgtgtatggaggtacaaacaggtacttcaggcaagtggcatctgaatttggattaaagatttcttttgttgattgttccaaaatcaaattactagaggcagcaattacaccagaaaccaagcgccctttggctctgggagctgatatttctatgtattctgcaacaaaatacatgaatggccacagtgatgttgtaatgggcctggtgtctgttaattgtgaaagccttcataatagacttcgtttcttgcaaaactctcttggagcagttccatctcctattgattgttacctctgcaatcgaggtctgaagactctacatgtccgaatggaaaagcatttcaaaaacggaatggcagttgcccagttcctggaatctaatccttgggtagaaaaggttatttatcctgggctgccctctcatccacagcatgagttggtgaagcgtcagtgtacaggttgtacagggatggtcaccttttatattaagggcactcttcagcatgctgagattttcctcaagaacctaaagctatttactctggccgagagcttgggaggattcgaaagccttgctgagcttccggcaatcatgactcatgcatcagttcttaagaatgacagagatgtccttggaattagtgacacactgattcgactttctgtgggcttagaggatgaggaagacctactggaagatctagatcaagctttgaaggcagcacaccctccaagtggaagtcacagctagtattccagagctgctattagaagctgcttcctgtgaagatcaaatcttcctgagtaattaaatggaccaacaatgag

SEQ ID NO: 123893 - DNA, 1805 bp, Homo sapiens
  Payload ID: 4312
  Gene Symbol: CTH
  Gene Name: cystathionine gamma-lyase
  Uniprot ID: P32929
  ENST ID: ENST00000370938
  CDS Start-End: 145-1362
ctttagtgcgctcgccgtcggctctacctgcgtgctttagctccttctcgcctgatccttctgtctctcccaaccccggacacccggcttcgactggttatatcttcggtgttcttttcctctcttcttctttcgcggttcagcatgcaggaaaaagacgcctcctcacaaggtttcctgccacacttccaacatttcgccacgcaggcgatccatgtgggccaggatccagagcaatggacctccagggctgtagtgccccccatctcactgtccaccacgttcaagcaaggggcgcctggccagcactcgggttttgaatatagccgttctggaaatcccactaggaattgccttgaaaaagcagtggcagcactggatggggctaagtactgtttggcctttgcttcaggtttagcagccactgtaactattacccatcttttaaaagcaggagaccaaattatttgtatggatgatgtgtatggaggtacaaacaggtacttcaggcaagtggcatctgaatttggattaaagatttcttttgttgattgttccaaaatcaaattactagaggcagcaattacaccagaaaccaagcttgtttggatcgaaacccccacaaaccccacccagaaggtgattgacattgaaggctgtgcacatattgtccataagcatggagacattattttggtcgtggataacacttttatgtcaccatatttccagcgccctttggctctgggagctgatatttctatgtattctgcaacaaaatacatgaatggccacagtgatgttgtaatgggcctggtgtctgttaattgtgaaagccttcataatagacttcgtttcttgcaaaactctcttggagcagttccatctcctattgattgttacctctgcaatcgaggtctgaagactctacatgtccgaatggaaaagcatttcaaaaacggaatggcagttgcccagttcctggaatctaatccttgggtagaaaaggttatttatcctgggctgccctctcatccacagcatgagttggtgaagcgtcagtgtacaggttgtacagggatggtcaccttttatattaagggcactcttcagcatgctgagattttcctcaagaacctaaagctatttactctggccgagagcttgggaggattcgaaagccttgctgagcttccggcaatcatgactcatgcatcagttcttaagaatgacagagatgtccttggaattagtgacacactgattcgactttctgtgggcttagaggatgaggaagacctactggaagatctagatcaagctttgaaggcagcacaccctccaagtggaagtcacagctagtattccagagctgctattagaagctgcttcctgtgaagatcaaatcttcctgagtaattaaatggaccaacaatgagcctttgcaaaattttcaagcggaaattttaaggcacctcattatctttcataactgtaattttcttagggatcatctctgttaaaaagttttctgtatgtcatgttataattacaggtcaattctgttaatatctttttgttaattttgctctatgtttgcctctgaaggaggtgagatttgtgctactttgggagattatgttcttttttcatgtctaagatttattttgatcatgtttataatataatggtaattcatttttgatgttttgtgaagaatttaaatttaaacgaatgttcttaaatcaagtgtgatttttttgcatatcattgaaaagaacattaaaagcaatggtttacactta

SEQ ID NO: 123894 - DNA, 2044 bp, Homo sapiens
  Payload ID: 4312
  Gene Symbol: CTH
  Gene Name: cystathionine gamma-lyase
  Uniprot ID: P32929
  ENST ID: ENST00000411986
  CDS Start-End: 199-1320
tcgtgagactgcagacccgctaataaaatccaccccaacaatcgctgtgtgccgctttagtgcgctcgccgtcggctctacctgcgtgctttagctccttctcgcctgatccttctgtctctcccaaccccggacacccggcttcgactggttatatcttcggtgttcttttcctctcttcttctttcgcggttcagcatgcaggaaaaagacgcctcctcacaaggtttcctgccacacttccaacatttcgccacgcaggcgatccatgtgggccaggatccagagcaatggacctccagggctgtagtgccccccatctcactgtccaccacgttcaagcaaggggcgcctggccagcactcgggttttgaatatagccgttctggaaatcccactaggaattgccttgaaaaagcagtggcagcactggatggggctaagtactgtacaaacaggtacttcaggcaagtggcatctgaatttggattaaagatttcttttgttgattgttccaaaatcaaattactagaggcagcaattacaccagaaaccaagcttgtttggatcgaaacccccacaaaccccacccagaaggtgattgacattgaaggctgtgcacatattgtccataagcatggagacattattttggtcgtggataacacttttatgtcaccatatttccagcgccctttggctctgggagctgatatttctatgtattctgcaacaaaatacatgaatggccacagtgatgttgtaatgggcctggtgtctgttaattgtgaaagccttcataatagacttcgtttcttgcaaaactctcttggagcagttccatctcctattgattgttacctctgcaatcgaggtctgaagactctacatgtccgaatggaaaagcatttcaaaaacggaatggcagttgcccagttcctggaatctaatccttgggtagaaaaggttatttatcctgggctgccctctcatccacagcatgagttggtgaagcgtcagtgtacaggttgtacagggatggtcaccttttatattaagggcactcttcagcatgctgagattttcctcaagaacctaaagctatttactctggccgagagcttgggaggattcgaaagccttgctgagcttccggcaatcatgactcatgcatcagttcttaagaatgacagagatgtccttggaattagtgacacactgattcgactttctgtgggcttagaggatgaggaagacctactggaagatctagatcaagctttgaaggcagcacaccctccaagtggaagtcacagctagtattccagagctgctattagaagctgcttcctgtgaagatcaaatcttcctgagtaattaaatggaccaacaatgagcctttgcaaaattttcaagcggaaattttaaggcacctcattatctttcataactgtaattttcttagggatcatctctgttaaaaagttttctgtatgtcatgttataattacaggtcaattctgttaatatctttttgttaattttgctctatgtttgcctctgaaggaggtgagatttgtgctactttgggagattatgttcttttttcatgtctaagatttattttgatcatgtttataatataatggtaattcatttttgatgttttgtgaagaatttaaatttaaacgaatgttcttaaatcaagtgtgatttttttgcatatcattgaaaagaacattaaaagcaatggtttacacttagttaccataagccgaaaatcaaatacttgaaaagtttactgtgaaattctactgatttaagactatacttaatatttttaaaaaaataaatcagctgggcgcggtggctcacgcatgtaatgccagcacttttggaggataaggcgggcggatcacgaggtcaggagattgagaccatcctggctagcgcagtgaaacccccatctctactaaaaatgcaaaaaaaattagacggacgtggtggcgggtgcctgtagtcccagctacttgggaggctgagg

SEQ ID NO: 123895 - DNA, 2583 bp, Homo sapiens
  Payload ID: 4313
  Gene Symbol: CBS
  Gene Name: cystathionine-beta-synthase
  Uniprot ID: P35520
  ENST ID: ENST00000352178
  CDS Start-End: 239-1894
tcccgggcccgcgacacacgccctcggggtcggtcctcgaggacgcgcagggccccccacccaccaggacgcacgtttcaagctcatcagtaaaggttccttaaattcccgaagggcaagaagttaaccaagtaaaacagcatcggaacaccaggatcccatgacagattctgttgtcacgtctccttacagagtttgagcggtgctgaactgtcagcaccatctgtccggtcccagcatgccttctgagaccccccaggcagaagtggggcccacaggctgcccccaccgctcagggccacactcggcgaaggggagcctggagaaggggtccccagaggataaggaagccaaggagcccctgtggatccggcccgatgctccgagcaggtgcacctggcagctgggccggcctgcctccgagtccccacatcaccacactgccccggcaaaatctccaaaaatcttgccagatattctgaagaaaatcggggacacccctatggtcagaatcaacaagattgggaagaagttcggcctgaagtgtgagctcttggccaagtgtgagttcttcaacgcgggcgggagcgtgaaggaccgcatcagcctgcggatgattgaggatgctgagcgcgacgggacgctgaagcccggggacacgattatcgagccgacatccgggaacaccgggatcgggctggccctggctgcggcagtgaggggctatcgctgcatcatcgtgatgccagagaagatgagctccgagaaggtggacgtgctgcgggcactgggggctgagattgtgaggacgcccaccaatgccaggttcgactccccggagtcacacgtgggggtggcctggcggctgaagaacgaaatccccaattctcacatcctagaccagtaccgcaacgccagcaaccccctggctcactacgacaccaccgctgatgagatcctgcagcagtgtgatgggaagctggacatgctggtggcttcagtgggcacgggcggcaccatcacgggcattgccaggaagctgaaggagaagtgtcctggatgcaggatcattggggtggatcccgaagggtccatcctcgcagagccggaggagctgaaccagacggagcagacaacctacgaggtggaagggatcggctacgacttcatccccacggtgctggacaggacggtggtggacaagtggttcaagagcaacgatgaggaggcgttcacctttgcccgcatgctgatcgcgcaagaggggctgctgtgcggtggcagtgctggcagcacggtggcggtggccgtgaaggccgcgcaggagctgcaggagggccagcgctgcgtggtcattctgcccgactcagtgcggaactacatgaccaagttcctgagcgacaggtggatgctgcagaagggctttctgaaggaggaggacctcacggagaagaagccctggtggtggcacctccgtgttcaggagctgggcctgtcagccccgctgaccgtgctcccgaccatcacctgtgggcacaccatcgagatcctccgggagaagggcttcgaccaggcgcccgtggtggatgaggcgggggtaatcctgggaatggtgacgcttgggaacatgctctcgtccctgcttgccgggaaggtgcagccgtcagaccaagttggcaaagtcatctacaagcagttcaaacagatccgcctcacggacacgctgggcaggctctcgcacatcctggagatggaccacttcgccctggtggtgcacgagcagatccagtaccacagcaccgggaagtccagtcagcggcagatggtgttcggggtggtcaccgccattgacttgctgaacttcgtggccgcccaggagcgggaccagaagtgaagtccggagcgctgggcggtgcggagcgggcccgccacccttgcccacttctccttcgctttcctgagccctaaacacacgcgtgattggtaactgcctggcctggcaccgttatccctgcacacggcacagagcatccgtctcccctcgttaacacatggcttcctaaatggccctgtttacggcctatgagatgaaatatgtgattttctctaatgtaacttcctcttaggatgtttcaccaaggaaatattgagagagaagtcggccaggtaggatgaacacaggcaatgactgcgcagagtggattaaaggcaaaagagagaagagtccaggaaggggcggggagaagcctgggtggctcagcatcctccacgggctgcgccgtctgctcggggctgagctggcgggagcagtttgcgtgtttgggttttttaattgagatgaaattcaaataacctaaaaatcaatcacttgaaagtgaacaatcagcggcatttagtacatccagaaagttgtgtaggcaccacctctgtcacgttctggaacattctgtcatcaccccgtgaagcaatcatttcccctcccgtcttcctcctcccctggcaactgctgatcgactttgtgtctctgttgtctaaaataggttttccctgttctggacatttcatataaatggaatcacacaa

SEQ ID NO: 123896 - DNA, 2353 bp, Homo sapiens
  Payload ID: 4313
  Gene Symbol: CBS
  Gene Name: cystathionine-beta-synthase
  Uniprot ID: P35520
  ENST ID: ENST00000359624
  CDS Start-End: 223-1878
cacgccctcggggtcggtcctcgaggacgcgcagggccccccacccaccaggacgcacgtttcaagctcatcagtaaaggttccttaaattcccgaagggcaagaagttaaccaagtaaaacagcatcggaacaccaggatcccatgacagattctgttgtcacgtctccttacagagtttgagcggtgctgaactgtcagcaccatctgtccggtcccagcatgccttctgagaccccccaggcagaagtggggcccacaggctgcccccaccgctcagggccacactcggcgaaggggagcctggagaaggggtccccagaggataaggaagccaaggagcccctgtggatccggcccgatgctccgagcaggtgcacctggcagctgggccggcctgcctccgagtccccacatcaccacactgccccggcaaaatctccaaaaatcttgccagatattctgaagaaaatcggggacacccctatggtcagaatcaacaagattgggaagaagttcggcctgaagtgtgagctcttggccaagtgtgagttcttcaacgcgggcgggagcgtgaaggaccgcatcagcctgcggatgattgaggatgctgagcgcgacgggacgctgaagcccggggacacgattatcgagccgacatccgggaacaccgggatcgggctggccctggctgcggcagtgaggggctatcgctgcatcatcgtgatgccagagaagatgagctccgagaaggtggacgtgctgcgggcactgggggctgagattgtgaggacgcccaccaatgccaggttcgactccccggagtcacacgtgggggtggcctggcggctgaagaacgaaatccccaattctcacatcctagaccagtaccgcaacgccagcaaccccctggctcactacgacaccaccgctgatgagatcctgcagcagtgtgatgggaagctggacatgctggtggcttcagtgggcacgggcggcaccatcacgggcattgccaggaagctgaaggagaagtgtcctggatgcaggatcattggggtggatcccgaagggtccatcctcgcagagccggaggagctgaaccagacggagcagacaacctacgaggtggaagggatcggctacgacttcatccccacggtgctggacaggacggtggtggacaagtggttcaagagcaacgatgaggaggcgttcacctttgcccgcatgctgatcgcgcaagaggggctgctgtgcggtggcagtgctggcagcacggtggcggtggccgtgaaggccgcgcaggagctgcaggagggccagcgctgcgtggtcattctgcccgactcagtgcggaactacatgaccaagttcctgagcgacaggtggatgctgcagaagggctttctgaaggaggaggacctcacggagaagaagccctggtggtggcacctccgtgttcaggagctgggcctgtcagccccgctgaccgtgctcccgaccatcacctgtgggcacaccatcgagatcctccgggagaagggcttcgaccaggcgcccgtggtggatgaggcgggggtaatcctgggaatggtgacgcttgggaacatgctctcgtccctgcttgccgggaaggtgcagccgtcagaccaagttggcaaagtcatctacaagcagttcaaacagatccgcctcacggacacgctgggcaggctctcgcacatcctggagatggaccacttcgccctggtggtgcacgagcagatccagtaccacagcaccgggaagtccagtcagcggcagatggtgttcggggtggtcaccgccattgacttgctgaacttcgtggccgcccaggagcgggaccagaagtgaagtccggagcgctgggcggatgtttcaccaaggaaatattgagagagaagtcggccaggtaggatgaacacaggcaatgactgcgcagagtggattaaaggcaaaagagagaagagtccaggaaggggcggggagaagcctgggtggctcagcatcctccacgggctgcgccgtctgctcggggctgagctggcgggagcagtttgcgtgtttgggttttttaattgagatgaaattcaaataacctaaaaatcaatcacttgaaagtgaacaatcagcggcatttagtacatccagaaagttgtgtaggcaccacctctgtcacgttctggaacattctgtcatcaccccgtgaagcaatcatttcccctcccgtcttcctcctcccctggcaactgctgatcgactttgtgtctctgttgtctaaaataggttttccctgttctggacatttcatataaatggaatcacacaa

SEQ ID NO: 123897 - DNA, 2453 bp, Homo sapiens
  Payload ID: 4313
  Gene Symbol: CBS
  Gene Name: cystathionine-beta-synthase
  Uniprot ID: P35520
  ENST ID: ENST00000398158
  CDS Start-End: 109-1764
ccgtctccgcctcgccgcagtcggggcagccgctcgcccctcttttccatgtatccgtccagagtttgagcggtgctgaactgtcagcaccatctgtccggtcccagcatgccttctgagaccccccaggcagaagtggggcccacaggctgcccccaccgctcagggccacactcggcgaaggggagcctggagaaggggtccccagaggataaggaagccaaggagcccctgtggatccggcccgatgctccgagcaggtgcacctggcagctgggccggcctgcctccgagtccccacatcaccacactgccccggcaaaatctccaaaaatcttgccagatattctgaagaaaatcggggacacccctatggtcagaatcaacaagattgggaagaagttcggcctgaagtgtgagctcttggccaagtgtgagttcttcaacgcgggcgggagcgtgaaggaccgcatcagcctgcggatgattgaggatgctgagcgcgacgggacgctgaagcccggggacacgattatcgagccgacatccgggaacaccgggatcgggctggccctggctgcggcagtgaggggctatcgctgcatcatcgtgatgccagagaagatgagctccgagaaggtggacgtgctgcgggcactgggggctgagattgtgaggacgcccaccaatgccaggttcgactccccggagtcacacgtgggggtggcctggcggctgaagaacgaaatccccaattctcacatcctagaccagtaccgcaacgccagcaaccccctggctcactacgacaccaccgctgatgagatcctgcagcagtgtgatgggaagctggacatgctggtggcttcagtgggcacgggcggcaccatcacgggcattgccaggaagctgaaggagaagtgtcctggatgcaggatcattggggtggatcccgaagggtccatcctcgcagagccggaggagctgaaccagacggagcagacaacctacgaggtggaagggatcggctacgacttcatccccacggtgctggacaggacggtggtggacaagtggttcaagagcaacgatgaggaggcgttcacctttgcccgcatgctgatcgcgcaagaggggctgctgtgcggtggcagtgctggcagcacggtggcggtggccgtgaaggccgcgcaggagctgcaggagggccagcgctgcgtggtcattctgcccgactcagtgcggaactacatgaccaagttcctgagcgacaggtggatgctgcagaagggctttctgaaggaggaggacctcacggagaagaagccctggtggtggcacctccgtgttcaggagctgggcctgtcagccccgctgaccgtgctcccgaccatcacctgtgggcacaccatcgagatcctccgggagaagggcttcgaccaggcgcccgtggtggatgaggcgggggtaatcctgggaatggtgacgcttgggaacatgctctcgtccctgcttgccgggaaggtgcagccgtcagaccaagttggcaaagtcatctacaagcagttcaaacagatccgcctcacggacacgctgggcaggctctcgcacatcctggagatggaccacttcgccctggtggtgcacgagcagatccagtaccacagcaccgggaagtccagtcagcggcagatggtgttcggggtggtcaccgccattgacttgctgaacttcgtggccgcccaggagcgggaccagaagtgaagtccggagcgctgggcggtgcggagcgggcccgccacccttgcccacttctccttcgctttcctgagccctaaacacacgcgtgattggtaactgcctggcctggcaccgttatccctgcacacggcacagagcatccgtctcccctcgttaacacatggcttcctaaatggccctgtttacggcctatgagatgaaatatgtgattttctctaatgtaacttcctcttaggatgtttcaccaaggaaatattgagagagaagtcggccaggtaggatgaacacaggcaatgactgcgcagagtggattaaaggcaaaagagagaagagtccaggaaggggcggggagaagcctgggtggctcagcatcctccacgggctgcgccgtctgctcggggctgagctggcgggagcagtttgcgtgtttgggttttttaattgagatgaaattcaaataacctaaaaatcaatcacttgaaagtgaacaatcagcggcatttagtacatccagaaagttgtgtaggcaccacctctgtcacgttctggaacattctgtcatcaccccgtgaagcaatcatttcccctcccgtcttcctcctcccctggcaactgctgatcgactttgtgtctctgttgtctaaaataggttttccctgttctggacatttcatataaatggaatcacacaa

SEQ ID NO: 123898 - DNA, 2605 bp, Homo sapiens
  Payload ID: 4313
  Gene Symbol: CBS
  Gene Name: cystathionine-beta-synthase
  Uniprot ID: P35520
  ENST ID: ENST00000398165
  CDS Start-End: 261-1916
gtgctctgccacgagacattggccggcgccggcctccgcccccgcctctccgccaatcaccgcccgcctgctcccctcgccgtgggtccccgcgaggccgccaccccggggtcgccgtctccgcctcgccgcagtcggggcagccgctcgcccctcttttccatgtatccgtccaggatcccatgacagattctgttgtcacgtctccttacagagtttgagcggtgctgaactgtcagcaccatctgtccggtcccagcatgccttctgagaccccccaggcagaagtggggcccacaggctgcccccaccgctcagggccacactcggcgaaggggagcctggagaaggggtccccagaggataaggaagccaaggagcccctgtggatccggcccgatgctccgagcaggtgcacctggcagctgggccggcctgcctccgagtccccacatcaccacactgccccggcaaaatctccaaaaatcttgccagatattctgaagaaaatcggggacacccctatggtcagaatcaacaagattgggaagaagttcggcctgaagtgtgagctcttggccaagtgtgagttcttcaacgcgggcgggagcgtgaaggaccgcatcagcctgcggatgattgaggatgctgagcgcgacgggacgctgaagcccggggacacgattatcgagccgacatccgggaacaccgggatcgggctggccctggctgcggcagtgaggggctatcgctgcatcatcgtgatgccagagaagatgagctccgagaaggtggacgtgctgcgggcactgggggctgagattgtgaggacgcccaccaatgccaggttcgactccccggagtcacacgtgggggtggcctggcggctgaagaacgaaatccccaattctcacatcctagaccagtaccgcaacgccagcaaccccctggctcactacgacaccaccgctgatgagatcctgcagcagtgtgatgggaagctggacatgctggtggcttcagtgggcacgggcggcaccatcacgggcattgccaggaagctgaaggagaagtgtcctggatgcaggatcattggggtggatcccgaagggtccatcctcgcagagccggaggagctgaaccagacggagcagacaacctacgaggtggaagggatcggctacgacttcatccccacggtgctggacaggacggtggtggacaagtggttcaagagcaacgatgaggaggcgttcacctttgcccgcatgctgatcgcgcaagaggggctgctgtgcggtggcagtgctggcagcacggtggcggtggccgtgaaggccgcgcaggagctgcaggagggccagcgctgcgtggtcattctgcccgactcagtgcggaactacatgaccaagttcctgagcgacaggtggatgctgcagaagggctttctgaaggaggaggacctcacggagaagaagccctggtggtggcacctccgtgttcaggagctgggcctgtcagccccgctgaccgtgctcccgaccatcacctgtgggcacaccatcgagatcctccgggagaagggcttcgaccaggcgcccgtggtggatgaggcgggggtaatcctgggaatggtgacgcttgggaacatgctctcgtccctgcttgccgggaaggtgcagccgtcagaccaagttggcaaagtcatctacaagcagttcaaacagatccgcctcacggacacgctgggcaggctctcgcacatcctggagatggaccacttcgccctggtggtgcacgagcagatccagtaccacagcaccgggaagtccagtcagcggcagatggtgttcggggtggtcaccgccattgacttgctgaacttcgtggccgcccaggagcgggaccagaagtgaagtccggagcgctgggcggtgcggagcgggcccgccacccttgcccacttctccttcgctttcctgagccctaaacacacgcgtgattggtaactgcctggcctggcaccgttatccctgcacacggcacagagcatccgtctcccctcgttaacacatggcttcctaaatggccctgtttacggcctatgagatgaaatatgtgattttctctaatgtaacttcctcttaggatgtttcaccaaggaaatattgagagagaagtcggccaggtaggatgaacacaggcaatgactgcgcagagtggattaaaggcaaaagagagaagagtccaggaaggggcggggagaagcctgggtggctcagcatcctccacgggctgcgccgtctgctcggggctgagctggcgggagcagtttgcgtgtttgggttttttaattgagatgaaattcaaataacctaaaaatcaatcacttgaaagtgaacaatcagcggcatttagtacatccagaaagttgtgtaggcaccacctctgtcacgttctggaacattctgtcatcaccccgtgaagcaatcatttcccctcccgtcttcctcctcccctggcaactgctgatcgactttgtgtctctgttgtctaaaataggttttccctgttctggacatttcatataaatggaatcacacaa

SEQ ID NO: 123899 - DNA, 819 bp, Homo sapiens
  Payload ID: 4313
  Gene Symbol: CBS
  Gene Name: cystathionine-beta-synthase
  ENST ID: ENST00000441030
  CDS Start-End: 289-819
agttcctgccagtggacatttaattctaattcacgtctcactccctcccctactgtgagccccacgtggcagagaccgcggcggagctgcgcgggccggaggaggctgcggagcatcgctctgacctgagccggggacgctgcggaggcgcagcacgttcctctgcccagagctgatgggcaccgtccgtgtctttcgctgcaggatcccatgacagattctgttgtcacgtctccttacagagtttgagcggtgctgaactgtcagcaccatctgtccggtcccagcatgccttctgagaccccccaggcagaagtggggcccacaggctgcccccaccgctcagggccacactcggcgaaggggagcctggagaaggggtccccagaggataaggaagccaaggagcccctgtggatccggcccgatgctccgagcaggtgcacctggcagctgggccggcctgcctccgagtccccacatcaccacactgccccggcaaaatctccaaaaatcttgccagatattctgaagaaaatcggggacacccctatggtcagaatcaacaagattgggaagaagttcggcctgaagtgtgagctcttggccaagtgtgagttcttcaacgcgggcgggagcgtgaaggaccgcatcagcctgcggatgattgaggatgctgagcgcgacgggacgctgaagcccggggacacgattatcgagccgacatccgggaacaccgggatcgggctggccctggctgcggcagtgaggggctatcgctgcatcatcgtgatgccagagaagatgagctccgagaag

SEQ ID NO: 123900 - DNA, 573 bp, Homo sapiens
  Payload ID: 4313
  Gene Symbol: CBS
  Gene Name: cystathionine-beta-synthase
  ENST ID: ENST00000451248
  CDS Start-End: 1-448
gggcctgtcagccccgctgaccgtgctcccgaccatcacctgtgggcacaccatcgagatcctccgggagaagggcttcgaccaggcgcccgtggtggatgaggcgggggtaatcctgggaatggtgacgcttgggaacatgctctcgtccctgcttgccgggaaggtgcagccgtcagaccaagttggcaaagtcatctacaagcagttcaaacagatccgcctcacggacacgctgggcaggctctcgcacatcctggagatggaccacttcgccctggtggtgcacgagcagatccagtcgcaggaccaggcctgggcaggcgtggtgggggggcctgcagaccacagcaccgggaagtccagtcagcggcagatggtgttcggggtggtcaccgccattgacttgctgaacttcgtggccgcccaggagcgggaccagaagtgaagtccggagcgctgggcggtgcggagcgggcccgccacccttgcccacttctccttcgctttcctgagccctaaacacacgcgtgattggtaactgcctggcctggcaccgttatccctgcacac

SEQ ID NO: 123901 - DNA, 828 bp, Homo sapiens
  Payload ID: 4313
  Gene Symbol: CBS
  Gene Name: cystathionine-beta-synthase
  ENST ID: ENST00000430013
  CDS Start-End: 1-674
gtggcagtgctggcagcacggtggcggtggccgtgaaggccgcgcaggagctgcaggagggccagcgctgcgtggtcattctgcccgactcagtgcggaactacatgaccaagttcctgagcgacaggtggatgctgcagaagggctttctgaaggaggaggacctcacggagaagaagccctggtggtggcacctccgtgttcaggagctgggcctgtcagccccgctgaccgtgctcccgaccatcacctgtgggcacaccatcgagatcctccgggagaagggcttcgaccaggcgcccgtggtggatgaggcgggggtaatcctgggaatggtgacgcttgggaacatgctctcgtccctgcttgccgggaaggtgcagccgtcagaccaagttggcaaagtcatctacaagcagttcaaacagatccgcctcacggacacgctgggcaggctctcgcacatcctggagatggaccacttcgccctggtggtgcacgagcagatccagtcgcaggaccaggcctgggcaggcgtggtgggggggcctgcagggtccccaaatcaagtcttcctggagcatgtccacgcttgtcaccaccgtctgtggctgctttcaagcacgtcagggctgcgtgctcataacagagacggcacggcccccaagacctaaaataccaccagctggcccttgtcggaaagtcccctggctggccctagtccattgactctgggccgagctgccagggccacagaagcctgcggcactcagggctcccagggctcccttctccaacagttgctgtgcctccgtttccccaaaatgc

SEQ ID NO: 123902 - DNA, 676 bp, Homo sapiens
  Payload ID: 4313
  Gene Symbol: CBS
  Gene Name: cystathionine-beta-synthase
  ENST ID: ENST00000458223
  CDS Start-End: 1-479
gtgttcaggagctgggcctgtcagccccgctgaccgtgctcccgaccatcacctgtgggcacaccatcgagatcctccgggagaagggcttcgaccaggcgcccgtggtggatgaggcgggggtaatcctgggaatggtgacgcttgggaacatgctctcgtccctgcttgccgggaaggtgcagccgtcagaccaagttggcaaagtcatctacaagcagttcaaacagatccgcctcacggacacgctgggcaggctctcgcacatcctggagatggaccacttcgccctggtggtgcacgagcagatccagtcgcaggaccaggcctgggcaggcgtggtgggggggcctgcagaaaaaaaaaaagatgcaaattccaatgtcagggtccccaaatcaagtcttcctggagcatgtccacgcttgtcaccaccgtctgtggctgctttcaagcacgtcagggctgcgtgctcataacagagacggcacggcccccaagacctaaaataccaccagctggcccttgtcggaaagtcccctggctggccctagtccattgactctgggccgagctgccagggccacagaagcctgcggcactcagggctcccagggctcccttctccaacagttgctgtgcctccgtttccccaaaatgcaaggagctgatctca

SEQ ID NO: 123903 - DNA, 2514 bp, Homo sapiens
  Payload ID: 4314
  Gene Symbol: CBSL
  Gene Name: cystathionine-beta-synthase like
  Uniprot ID: P35520
  ENST ID: ENST00000398168
  CDS Start-End: 170-1825
gcgaggccgccaccccggggtcgccgtctccgcctcgccgcagtcggggcagccgctcgcccctcttttccatgtatccgtccaggatcccatgacagattctgttgtcacgtctccttacagagtttgagcggtgctgaactgtcagcaccatctgtccggtcccagcatgccttctgagaccccccaggcagaagtggggcccacaggctgcccccaccgctcagggccacactcggcgaaggggagcctggagaaggggtccccagaggataaggaagccaaggagcccctgtggatccggcccgatgctccgagcaggtgcacctggcagctgggccggcctgcctccgagtccccacatcaccacactgccccggcaaaatctccaaaaatcttgccagatattctgaagaaaatcggggacacccctatggtcagaatcaacaagattgggaagaagttcggcctgaagtgtgagctcttggccaagtgtgagttcttcaacgcgggcgggagcgtgaaggaccgcatcagcctgcggatgattgaggatgctgagcgcgacgggacgctgaagcccggggacacgattatcgagccgacatccgggaacaccgggatcgggctggccctggctgcggcagtgaggggctatcgctgcatcatcgtgatgccagagaagatgagctccgagaaggtggacgtgctgcgggcactgggggctgagattgtgaggacgcccaccaatgccaggttcgactccccggagtcacacgtgggggtggcctggcggctgaagaacgaaatccccaattctcacatcctagaccagtaccgcaacgccagcaaccccctggctcactatgacaccaccgctgatgagatcctgcagcagtgtgatgggaagctggacatgctggtggcttcagtgggcacgggcggcaccatcacgggcattgccaggaagctgaaggagaagtgtcctggatgcaggatcattggggtggatcccgaagggtccatcctcgcagagccggaggagctgaaccagacggagcagacaacctacgaggtggaagggatcggctacgacttcatccccacggtgctggacaggacggtggtggacaagtggttcaagagcaacgatgaggaggcgttcacctttgcccgcatgctgatcgcgcaagaggggctgctgtgcggtggcagtgctggcagcacggtggcggtggccgtgaaggccgcgcaggagctgcaggagggccagcgctgcgtggtcattctgcccgactcagtgcggaactacatgaccaagttcctgagcgacaggtggatgctgcagaagggctttctgaaggaggaggacctcacggagaagaagccctggtggtggcacctccgtgttcaggagctgggcctgtcagccccgctgaccgtgctcccgaccatcacctgtgggcacaccatcgagatcctccgggagaagggcttcgaccaggcgcccgtggtggatgaggcgggggtaatcctgggaatggtgacgcttgggaacatgctctcgtccctgcttgccgggaaggtgcagccgtcagaccaagttggcaaagtcatctacaagcagttcaaacagatccgcctcacggacacgctgggcaggctctcgcacatcctggagatggaccacttcgccctggtggtgcacgagcagatccagtaccacagcaccgggaagtccagtcagcggcagatggtgttcggggtggtcaccgccattgacttgctgaacttcgtggccgcccaggagcgggaccagaagtgaagtccggagcgctgggcggtgcggagcgggcccgccacccttgcccacttctccttcgctttcctgagccctaaacacacgcgtgattggtaactgcctggcctggcaccgttatccctgcacacggcacagagcatccgtctcccctcgttaacacatggcttcctaaatggccctgtttacggcctatgagatgaaatatgtgattttctctaatgtaacttcctcttaggatgtttcaccaaggaaatattgagagagaagtcggccaggtaggatgaacacaggcaatgactgcgcagagtggattaaaggcaaaagagagaagagtccaggaaggggcggggagaagcctgggtggctcagcatcctccacgggctgcgccgtctgctcggggctgagctggcgggagcagtttgcgtgtttgggttttttaattgagatgaaattcaaataacctaaaaatcaatcacttgaaagtgaacaatcagcggcatttagtacatccagaaagttgtgtaggcaccacctctgtcacgttctggaacattctgtcatcaccccgtgaagcaatcatttcccctcccgtcttcctcctcccctggcaactgctgatcgactttgtgtctctgttgtctaaaataggttttccctgttctggacatttcatataaatggaatcacacaa

SEQ ID NO: 123904 - DNA, 2353 bp, Homo sapiens
  Payload ID: 4314
  Gene Symbol: CBSL
  Gene Name: cystathionine-beta-synthase like
  Uniprot ID: P35520
  ENST ID: ENST00000618024
  CDS Start-End: 223-1878
cacgccctcggggtcggtcctcgaggacgcgcagggccccccacccaccaggacgcacgtttcaagctcatcagtaaaggttccttaaattcccgaagggcaagaagttaaccaagtaaaacagcatcggaacaccaggatcccatgacagattctgttgtcacgtctccttacagagtttgagcggtgctgaactgtcagcaccatctgtccggtcccagcatgccttctgagaccccccaggcagaagtggggcccacaggctgcccccaccgctcagggccacactcggcgaaggggagcctggagaaggggtccccagaggataaggaagccaaggagcccctgtggatccggcccgatgctccgagcaggtgcacctggcagctgggccggcctgcctccgagtccccacatcaccacactgccccggcaaaatctccaaaaatcttgccagatattctgaagaaaatcggggacacccctatggtcagaatcaacaagattgggaagaagttcggcctgaagtgtgagctcttggccaagtgtgagttcttcaacgcgggcgggagcgtgaaggaccgcatcagcctgcggatgattgaggatgctgagcgcgacgggacgctgaagcccggggacacgattatcgagccgacatccgggaacaccgggatcgggctggccctggctgcggcagtgaggggctatcgctgcatcatcgtgatgccagagaagatgagctccgagaaggtggacgtgctgcgggcactgggggctgagattgtgaggacgcccaccaatgccaggttcgactccccggagtcacacgtgggggtggcctggcggctgaagaacgaaatccccaattctcacatcctagaccagtaccgcaacgccagcaaccccctggctcactatgacaccaccgctgatgagatcctgcagcagtgtgatgggaagctggacatgctggtggcttcagtgggcacgggcggcaccatcacgggcattgccaggaagctgaaggagaagtgtcctggatgcaggatcattggggtggatcccgaagggtccatcctcgcagagccggaggagctgaaccagacggagcagacaacctacgaggtggaagggatcggctacgacttcatccccacggtgctggacaggacggtggtggacaagtggttcaagagcaacgatgaggaggcgttcacctttgcccgcatgctgatcgcgcaagaggggctgctgtgcggtggcagtgctggcagcacggtggcggtggccgtgaaggccgcgcaggagctgcaggagggccagcgctgcgtggtcattctgcccgactcagtgcggaactacatgaccaagttcctgagcgacaggtggatgctgcagaagggctttctgaaggaggaggacctcacggagaagaagccctggtggtggcacctccgtgttcaggagctgggcctgtcagccccgctgaccgtgctcccgaccatcacctgtgggcacaccatcgagatcctccgggagaagggcttcgaccaggcgcccgtggtggatgaggcgggggtaatcctgggaatggtgacgcttgggaacatgctctcgtccctgcttgccgggaaggtgcagccgtcagaccaagttggcaaagtcatctacaagcagttcaaacagatccgcctcacggacacgctgggcaggctctcgcacatcctggagatggaccacttcgccctggtggtgcacgagcagatccagtaccacagcaccgggaagtccagtcagcggcagatggtgttcggggtggtcaccgccattgacttgctgaacttcgtggccgcccaggagcgggaccagaagtgaagtccggagcgctgggcggatgtttcaccaaggaaatattgagagagaagtcggccaggtaggatgaacacaggcaatgactgcgcagagtggattaaaggcaaaagagagaagagtccaggaaggggcggggagaagcctgggtggctcagcatcctccacgggctgcgccgtctgctcggggctgagctggcgggagcagtttgcgtgtttgggttttttaattgagatgaaattcaaataacctaaaaatcaatcacttgaaagtgaacaatcagcggcatttagtacatccagaaagttgtgtaggcaccacctctgtcacgttctggaacattctgtcatcaccccgtgaagcaatcatttcccctcccgtcttcctcctcccctggcaactgctgatcgactttgtgtctctgttgtctaaaataggttttccctgttctggacatttcatataaatggaatcacacaa

SEQ ID NO: 123905 - DNA, 2563 bp, Homo sapiens
  Payload ID: 4314
  Gene Symbol: CBSL
  Gene Name: cystathionine-beta-synthase like
  Uniprot ID: P35520
  ENST ID: ENST00000617706
  CDS Start-End: 223-1878
cacgccctcggggtcggtcctcgaggacgcgcagggccccccacccaccaggacgcacgtttcaagctcatcagtaaaggttccttaaattcccgaagggcaagaagttaaccaagtaaaacagcatcggaacaccaggatcccatgacagattctgttgtcacgtctccttacagagtttgagcggtgctgaactgtcagcaccatctgtccggtcccagcatgccttctgagaccccccaggcagaagtggggcccacaggctgcccccaccgctcagggccacactcggcgaaggggagcctggagaaggggtccccagaggataaggaagccaaggagcccctgtggatccggcccgatgctccgagcaggtgcacctggcagctgggccggcctgcctccgagtccccacatcaccacactgccccggcaaaatctccaaaaatcttgccagatattctgaagaaaatcggggacacccctatggtcagaatcaacaagattgggaagaagttcggcctgaagtgtgagctcttggccaagtgtgagttcttcaacgcgggcgggagcgtgaaggaccgcatcagcctgcggatgattgaggatgctgagcgcgacgggacgctgaagcccggggacacgattatcgagccgacatccgggaacaccgggatcgggctggccctggctgcggcagtgaggggctatcgctgcatcatcgtgatgccagagaagatgagctccgagaaggtggacgtgctgcgggcactgggggctgagattgtgaggacgcccaccaatgccaggttcgactccccggagtcacacgtgggggtggcctggcggctgaagaacgaaatccccaattctcacatcctagaccagtaccgcaacgccagcaaccccctggctcactatgacaccaccgctgatgagatcctgcagcagtgtgatgggaagctggacatgctggtggcttcagtgggcacgggcggcaccatcacgggcattgccaggaagctgaaggagaagtgtcctggatgcaggatcattggggtggatcccgaagggtccatcctcgcagagccggaggagctgaaccagacggagcagacaacctacgaggtggaagggatcggctacgacttcatccccacggtgctggacaggacggtggtggacaagtggttcaagagcaacgatgaggaggcgttcacctttgcccgcatgctgatcgcgcaagaggggctgctgtgcggtggcagtgctggcagcacggtggcggtggccgtgaaggccgcgcaggagctgcaggagggccagcgctgcgtggtcattctgcccgactcagtgcggaactacatgaccaagttcctgagcgacaggtggatgctgcagaagggctttctgaaggaggaggacctcacggagaagaagccctggtggtggcacctccgtgttcaggagctgggcctgtcagccccgctgaccgtgctcccgaccatcacctgtgggcacaccatcgagatcctccgggagaagggcttcgaccaggcgcccgtggtggatgaggcgggggtaatcctgggaatggtgacgcttgggaacatgctctcgtccctgcttgccgggaaggtgcagccgtcagaccaagttggcaaagtcatctacaagcagttcaaacagatccgcctcacggacacgctgggcaggctctcgcacatcctggagatggaccacttcgccctggtggtgcacgagcagatccagtaccacagcaccgggaagtccagtcagcggcagatggtgttcggggtggtcaccgccattgacttgctgaacttcgtggccgcccaggagcgggaccagaagtgaagtccggagcgctgggcggtgcggagcgggcccgccacccttgcccacttctccttcgctttcctgagccctaaacacacgcgtgattggtaactgcctggcctggcaccgttatccctgcacacggcacagagcatccgtctcccctcgttaacacatggcttcctaaatggccctgtttacggcctatgagatgaaatatgtgattttctctaatgtaacttcctcttaggatgtttcaccaaggaaatattgagagagaagtcggccaggtaggatgaacacaggcaatgactgcgcagagtggattaaaggcaaaagagagaagagtccaggaaggggcggggagaagcctgggtggctcagcatcctccacgggctgcgccgtctgctcggggctgagctggcgggagcagtttgcgtgtttgggttttttaattgagatgaaattcaaataacctaaaaatcaatcacttgaaagtgaacaatcagcggcatttagtacatccagaaagttgtgtaggcaccacctctgtcacgttctggaacattctgtcatcaccccgtgaagcaatcatttcccctcccgtcttcctcctcccctggcaactgctgatcgactttgtgtctctgttgtctaaaataggttttccctgttctggacatttcatataaatggaatcac

SEQ ID NO: 123906 - DNA, 1992 bp, Homo sapiens
  Payload ID: 4314
  Gene Symbol: CBSL
  Gene Name: cystathionine-beta-synthase like
  Uniprot ID: P35520
  ENST ID: ENST00000624934
  CDS Start-End: 170-1867
gcgaggccgccaccccggggtcgccgtctccgcctcgccgcagtcggggcagccgctcgcccctcttttccatgtatccgtccaggatcccatgacagattctgttgtcacgtctccttacagagtttgagcggtgctgaactgtcagcaccatctgtccggtcccagcatgccttctgagaccccccaggcagaagtggggcccacaggctgcccccaccgctcagggccacactcggcgaaggggagcctggagaaggggtccccagaggataaggaagccaaggagcccctgtggatccggcccgatgctccgagcaggtgcacctggcagctgggccggcctgcctccgagtccccacatcaccacactgccccggcaaaatctccaaaaatcttgccagatattctgaagaaaatcggggacacccctatggtcagaatcaacaagattgggaagaagttcggcctgaagtgtgagctcttggccaagtgtgagttcttcaacgcgggcgggagcgtgaaggaccgcatcagcctgcggatgattgaggatgctgagcgcgacgggacgctgaagcccggggacacgattatcgagccgacatccgggaacaccgggatcgggctggccctggctgcggcagtgaggggctatcgctgcatcatcgtgatgccagagaagatgagctccgagaaggtggacgtgctgcgggcactgggggctgagattgtgaggacgcccaccaatgccaggttcgactccccggagtcacacgtgggggtggcctggcggctgaagaacgaaatccccaattctcacatcctagaccagtaccgcaacgccagcaaccccctggctcactatgacaccaccgctgatgagatcctgcagcagtgtgatgggaagctggacatgctggtggcttcagtgggcacgggcggcaccatcacgggcattgccaggaagctgaaggagaagtgtcctggatgcaggatcattggggtggatcccgaagggtccatcctcgcagagccggaggagctgaaccagacggagcagacaacctacgaggtggaagggatcggctacgacttcatccccacggtgctggacaggacggtggtggacaagtggttcaagagcaacgatgaggaggcgttcacctttgcccgcatgctgatcgcgcaagaggggctgctgtgcggtggcagtgctggcagcacggtggcggtggccgtgaaggccgcgcaggagctgcaggagggccagcgctgcgtggtcattctgcccgactcagtgcggaactacatgaccaagttcctgagcgacaggtggatgctgcagaagggctttctgaaggaggaggacctcacggagaagaagccctggtggtggcacctccgtgttcaggagctgggcctgtcagccccgctgaccgtgctcccgaccatcacctgtgggcacaccatcgagatcctccgggagaagggcttcgaccaggcgcccgtggtggatgaggcgggggtaatcctgggaatggtgacgcttgggaacatgctctcgtccctgcttgccgggaaggtgcagccgtcagaccaagttggcaaagtcatctacaagcagttcaaacagatccgcctcacggacacgctgggcaggctctcgcacatcctggagatggaccacttcgccctggtggtgcacgagcagatccagtcgcaggaccaggcctgggcaggcgtggtgggggggcctgcagaccacagcaccgggaagtccagtcagcggcagatggtgttcggggtggtcaccgccattgacttgctgaacttcgtggccgcccaggagcgggaccagaagtgaagtccggagcgctgggcggtgcggagcgggcccgccacccttgcccacttctccttcgctttcctgagccctaaacacacgcgtgattggtaactgcctggcctggcaccgttatccctgcacac

SEQ ID NO: 123907 - DNA, 2453 bp, Homo sapiens
  Payload ID: 4314
  Gene Symbol: CBSL
  Gene Name: cystathionine-beta-synthase like
  Uniprot ID: P35520
  ENST ID: ENST00000624406
  CDS Start-End: 109-1764
ccgtctccgcctcgccgcagtcggggcagccgctcgcccctcttttccatgtatccgtccagagtttgagcggtgctgaactgtcagcaccatctgtccggtcccagcatgccttctgagaccccccaggcagaagtggggcccacaggctgcccccaccgctcagggccacactcggcgaaggggagcctggagaaggggtccccagaggataaggaagccaaggagcccctgtggatccggcccgatgctccgagcaggtgcacctggcagctgggccggcctgcctccgagtccccacatcaccacactgccccggcaaaatctccaaaaatcttgccagatattctgaagaaaatcggggacacccctatggtcagaatcaacaagattgggaagaagttcggcctgaagtgtgagctcttggccaagtgtgagttcttcaacgcgggcgggagcgtgaaggaccgcatcagcctgcggatgattgaggatgctgagcgcgacgggacgctgaagcccggggacacgattatcgagccgacatccgggaacaccgggatcgggctggccctggctgcggcagtgaggggctatcgctgcatcatcgtgatgccagagaagatgagctccgagaaggtggacgtgctgcgggcactgggggctgagattgtgaggacgcccaccaatgccaggttcgactccccggagtcacacgtgggggtggcctggcggctgaagaacgaaatccccaattctcacatcctagaccagtaccgcaacgccagcaaccccctggctcactatgacaccaccgctgatgagatcctgcagcagtgtgatgggaagctggacatgctggtggcttcagtgggcacgggcggcaccatcacgggcattgccaggaagctgaaggagaagtgtcctggatgcaggatcattggggtggatcccgaagggtccatcctcgcagagccggaggagctgaaccagacggagcagacaacctacgaggtggaagggatcggctacgacttcatccccacggtgctggacaggacggtggtggacaagtggttcaagagcaacgatgaggaggcgttcacctttgcccgcatgctgatcgcgcaagaggggctgctgtgcggtggcagtgctggcagcacggtggcggtggccgtgaaggccgcgcaggagctgcaggagggccagcgctgcgtggtcattctgcccgactcagtgcggaactacatgaccaagttcctgagcgacaggtggatgctgcagaagggctttctgaaggaggaggacctcacggagaagaagccctggtggtggcacctccgtgttcaggagctgggcctgtcagccccgctgaccgtgctcccgaccatcacctgtgggcacaccatcgagatcctccgggagaagggcttcgaccaggcgcccgtggtggatgaggcgggggtaatcctgggaatggtgacgcttgggaacatgctctcgtccctgcttgccgggaaggtgcagccgtcagaccaagttggcaaagtcatctacaagcagttcaaacagatccgcctcacggacacgctgggcaggctctcgcacatcctggagatggaccacttcgccctggtggtgcacgagcagatccagtaccacagcaccgggaagtccagtcagcggcagatggtgttcggggtggtcaccgccattgacttgctgaacttcgtggccgcccaggagcgggaccagaagtgaagtccggagcgctgggcggtgcggagcgggcccgccacccttgcccacttctccttcgctttcctgagccctaaacacacgcgtgattggtaactgcctggcctggcaccgttatccctgcacacggcacagagcatccgtctcccctcgttaacacatggcttcctaaatggccctgtttacggcctatgagatgaaatatgtgattttctctaatgtaacttcctcttaggatgtttcaccaaggaaatattgagagagaagtcggccaggtaggatgaacacaggcaatgactgcgcagagtggattaaaggcaaaagagagaagagtccaggaaggggcggggagaagcctgggtggctcagcatcctccacgggctgcgccgtctgctcggggctgagctggcgggagcagtttgcgtgtttgggttttttaattgagatgaaattcaaataacctaaaaatcaatcacttgaaagtgaacaatcagcggcatttagtacatccagaaagttgtgtaggcaccacctctgtcacgttctggaacattctgtcatcaccccgtgaagcaatcatttcccctcccgtcttcctcctcccctggcaactgctgatcgactttgtgtctctgttgtctaaaataggttttccctgttctggacatttcatataaatggaatcacacaa

SEQ ID NO: 123908 - DNA, 461 bp, Homo sapiens
  Payload ID: 4315
  Gene Symbol: CST11
  Gene Name: cystatin 11
  Uniprot ID: Q9H112
  ENST ID: ENST00000377007
  CDS Start-End: 47-358
ctgaggagtacagagaacactcttcctgttcctctgcagctgaaggatgatggctgagccctggcaggccctacagctcctgttggccattctattgactctgatggccctcccctaccaagcaaggaagaaaacctttctaagcgtccatgaagtgatggcagtagaaaactatgcgaaggacagcttgcagtggatcaccgaccagtataacaaggaaagtgatgacaagtaccacttcaggatcttccgagtccttaaagtccagaggcagcaagtcaactgcttcttctcagtgtttgctgtaccctggtttgaacagtacaaaattttgaacaaaagctgcagcagtgactaggtgtcctggagtgtacaactgcggccactgcatgtgagagaatcctgcaatgggcaataatccttaatataggcaataaatgtttgtcaacatattctcttaa

SEQ ID NO: 123909 - DNA, 554 bp, Homo sapiens
  Payload ID: 4315
  Gene Symbol: CST11
  Gene Name: cystatin 11
  Uniprot ID: Q9H112
  ENST ID: ENST00000377009
  CDS Start-End: 35-451
gagaacactcttcctgttcctctgcagctgaaggatgatggctgagccctggcaggccctacagctcctgttggccattctattgactctgatggccctcccctaccaagcaaggaagaaaacctttctaagcgtccatgaagtgatggcagtagaaaactatgcgaaggacagcttgcagtggatcaccgaccagtataacaaggaaagtgatgacaagtaccacttcaggatcttccgagtccttaaagtccagaggcaggtcactgaccacctggagtatcacctgaatgtggaaatgcagtggaccacctgccaaaagccagagaccacgaactgtgtcccccaggaaagggagcttcacaagcaagtcaactgcttcttctcagtgtttgctgtaccctggtttgaacagtacaaaattttgaacaaaagctgcagcagtgactaggtgtcctggagtgtacaactgcggccactgcatgtgagagaatcctgcaatgggcaataatccttaatataggcaataaatgtttgtcaacatattctcttaa

SEQ ID NO: 123910 - DNA, 890 bp, Homo sapiens
  Payload ID: 4316
  Gene Symbol: CST8
  Gene Name: cystatin 8 (cystatin-related epididymal specific)
  Uniprot ID: O60676
  ENST ID: ENST00000246012
  CDS Start-End: 358-786
ctgggccacaggcatgaactaagagtgctgaagacctaggagaaccactggtcaggtcagctcccagctccacagggagtaagaaggagctgcaggcacagcaggctgaaagtccaccaagggctgaggccacaaggcctctggggcagccacagttttcatgatcacatcatacaggactgagaagcagataacaagagtgacgctcacagggctgggctgacgctaacaggaggcagtgtgtggctcgaagattcttgaacccacagcagcagctgcggccaccccatcctgcccacagctccagccctgagacgacgaggaggagagtcgactttgcctcttgcccaagggaccatgcccaggtgccggtggctctccctgatcctcctcaccattcccctggccctggtggccaggaaagacccaaaaaagaatgagacaggggtgctgaggaaattaaaacccgtcaatgcctcaaatgccaacgtgaagcagtgtctgtggtttgccatgcaagaatacaacaaagagagcgaggacaagtatgtcttcctggtggtcaagacactgcaagcccagcttcaggtcacaaatcttctggaataccttattgatgtagaaattgcccgcagcgattgcagaaagcctttaagcactaatgaaatctgcgccattcaagaaaactccaagctgaaaaggaaattaagctgcagctttttggtaggagcacttccctggaatggtgaattcactgtgatggagaaaaagtgtgaagatgcttaatggtgttttgaggcatccctccaacctctgtgactactttatccatgaaaatgaagcaatggcaggtgggaggctcttcccaatgtgctttcttcatgcatgcc

SEQ ID NO: 123911 - DNA, 630 bp, Homo sapiens
  Payload ID: 4316
  Gene Symbol: CST8
  Gene Name: cystatin 8 (cystatin-related epididymal specific)
  ENST ID: ENST00000449810
  CDS Start-End: 227-630
gcagaccaggacccacagagacccttgactgggccacaggcatgaactaagagtgctgaagacctaggagaaccactggtcagctgggctgacgctaacaggaggcagtgtgtggctcgaagattcttgaacccacagcagcagctgcggccaccccatcctgcccacagctccagccctgagacgacgaggaggagagtcgactttgcctcttgcccaagggaccatgcccaggtgccggtggctctccctgatcctcctcaccattcccctggccctggtggccaggaaagacccaaaaaagaatgagacaggggtgctgaggaaattaaaacccgtcaatgcctcaaatgccaacgtgaagcagtgtctgtggtttgccatgcaagaatacaacaaagagagcgaggacaagtatgtcttcctggtggtcaagacactgcaagcccagcttcaggtcacaaatcttctggaataccttattgatgtagaaattgcccgcagcgattgcagaaagcctttaagcactaatgaaatctgcgccattcaagaaaactccaagctgaaaaggaaattaagctgcagctttttggtaggagcacttccctggaatggtgaattcactgtgat

SEQ ID NO: 123912 - DNA, 1592 bp, Homo sapiens
  Payload ID: 4317
  Gene Symbol: CST9
  Gene Name: cystatin 9 (testatin)
  Uniprot ID: Q5W186
  ENST ID: ENST00000376971
  CDS Start-End: 13-492
ggagcctgcatcatgtcgagtccgcagaggaggaaggctatgccctgggcactgtcactgcttctcatgggcttccagctcctggtgacttatgcctggtgttctgaagaggaaatgggtggtaataataaaatagtccaggatcctatgttcctcgccacagtggagtttgccttgaacactttcaacgtgcagagcaaggaggagcatgcctacaggctgttgcgcgtcctgagttcatggagggaggatagcatggacagaaagtggcgaggtaagatggtgttctccatgaatctgcaactgcgccaaaccgtatgtaggaaatttgaagatgacattgacaactgcccttttcaagaaagcctggagctgaacaacgtaagacagggcatcagctttcctcaggtccacagctgtggatgctgcatggggtgtggtgtgggcacaggagcagctgacaaagccattccgagggacaaagggaagtgagcccacagcaggctgtaccaggctgccctgcttgtgccttagtgggaagcccagtgaggcattaagcccaggggttcactttcaggcccctggccaatctgagtttcctgattctgccctctgacaccattgcagctgcctgcacctgggccacatggccttcagaaccttctctctggtcttcctccccacttcttccctgccttctagagaaagagcctggagacaatggtgacaatgtctgtgggtacttttctcagggtttccctaccctgccctagacccaaaagtggtggaggctgagaagaagccccactgccctcgctcctaggccctgctgagctgcagcacctgctctaggggacgagctccaagcaaagcctggctctgggaaaacttcccattcttagtcaacccccttattgtaagattaacaaataggtaactaattgcctaagtctgggaactgcttccactgggacaaaacattctcctgctgctcttggatgcagggatcacaccaggacagcctggggttcccctgaggggcacgggctggaggaggaggcatggcacaagtgaccctggctaaggagggagggagcctcaaatcacgttgtagttcaggattggcctcaggctcaggctagacctgaaggccagagccacgtggcacaattgctggccccaggaatgggcaaggtggagatggaacctgtgttgagggcagatgccacaagattcccgaacctccccaaaccccgccctactgtctcttcctgtttgttccctcggaccttcagctgcttcttcactgttgaaaccatgccctggaagacatattttgaactcctgaacaagacctgctcagaggggctctcctgagtggaagccactcacatgcctggccacatgctgccccctcccccgtggacaccagctgttcccaggagttgacatatcagtggctgagcagctccgtgcatatttgttctcttattttgcaagtgtctgaggttttatgacttggcattttagaaaatcctcactgtccaggttcctcaagtagaataggtcattaaacatcagcatttgcagaa

SEQ ID NO: 123913 - DNA, 959 bp, Homo sapiens
  Payload ID: 4318
  Gene Symbol: CST9L
  Gene Name: cystatin 9-like
  Uniprot ID: Q9H4G1
  ENST ID: ENST00000376979
  CDS Start-End: 300-743
agccttcaaagctagtggcagagggtagctcccctcctgcctgtggcttgtgctggcctagagagtatagggcagaaggatggcagatgagtgactccacatccagagctgcctccctttaatccaggatcctgtccttcctgtcctgtaggagtgcctgttgccagtgtggggtgagacaagtttgtcccacagggctgtctgagcagataagattaagggctgggtctgtgctcaattaactcctgtgggcacgggggctgggaagagcaaagtcagcggtgcctacagtcagcaccatgctgggcctgccgtggaagggaggtctgtcctgggcgctgctgctgcttctcttaggctcccagatcctgctgatctatgcctggcatttccacgagcaaagggactgtgatgaacacaatgtcatggctcgttacctccctgccacagtggagtttgctgtccacacattcaaccaacagagcaaggactactatgcctacagactggggcacatcttgaattcctggaaggagcaggtggagtccaagactgtattctcaatggagctactgctggggagaactaggtgtgggaaatttgaagacgacattgacaactgccatttccaagaaagcacagagctgaacaatactttcacctgcttcttcaccatcagcaccaggccctggatgactcagttcagcctcctgaacaagacctgcttggagggattccactgagtgaaacccactcacaggcttgtccatgtgctgctcccacattccgtggacatcagcactactctcctgaggactcttcagtggctgagcagctttggacttgtttgttatcctattttgcatgtgtttgagatctcagatcagtgttttagaaaatccacacatcttgagcctaatcatgtagtgtagatcattaaacatcagcattttaagaaa

SEQ ID NO: 123914 - DNA, 751 bp, Homo sapiens
  Payload ID: 4319
  Gene Symbol: CSTA
  Gene Name: cystatin A (stefin A)
  Uniprot ID: P01040
  ENST ID: ENST00000264474
  CDS Start-End: 50-346
gttcactttggttccagcatcctgtccagcaaagaagcaatcagccaaaatgatacctggaggcttatctgaggccaaacccgccactccagaaatccaggagattgttgataaggttaaaccacagcttgaagaaaaaacaaatgagacttacggaaaattggaagctgtgcagtataaaactcaagttgttgctggaacaaattactacattaaggtacgagcaggtgataataaatatatgcacttgaaagtattcaaaagtcttcccggacaaaatgaggacttggtacttactggataccaggttgacaaaaacaaggatgacgagctgacgggcttttagcagcatgtacccaaagtgttctgattccttcaactggctactgagtcatgatccttgctgataaatataaccatcaataaagaagcattcttttccaaagaaattatttcttcaattatttctcatttattgtattaagcagaaattaccttttctttctcaaaatcagtgttattgctttagagtataaactccatataaattgatggcaattggaaatcttataaaaactagtcaagcctaatgcaactggctaaaggatagtaccaccctcacccccaccataggcaggctggatcgtggactatcaattcaccagcctccttgttccctgtggctgctgataacccaacattccatctctaccctcatacttcaaaattaaatcaagtattttacaaagtg

SEQ ID NO: 123915 - DNA, 821 bp, Homo sapiens
  Payload ID: 4319
  Gene Symbol: CSTA
  Gene Name: cystatin A (stefin A)
  ENST ID: ENST00000479204
  CDS Start-End: 32-223
atcctgtccagcaaagaagcaatcagccaaaatgatacctggaggcttatctgaggccaaacccgccactccagaaatccaggagattgttgataaggttaaaccacagcttgaagaaaaaacaaatgagacttacggaaaattggaagctgtgcagtataaaactcaagttgttgctggaacaaattactacattaaggttagagttcagcacctactttagcgccaaaagatgtatttctcattttatgtaaaatattccctgatttccctaccacataattccttccttacggttgtcctaaattaagatgcccagcatgattccttccaagtggtggactctcaaatttggtagatgatgtgacaccattttttttcttgtgaattcagaaagttttattacattgattcttgatttctggaaattgtatagaaaaagatttcataacagttcagggcatgctggatttgtggctgtgctgctgcttaggtaaggagggaggatcacgtctcatctgcctgaaggtgtggggctggaccacatggtatcttgaagctgattctacctcaaagctgtatgattctctatgtctaaattaaataaattaaagtaacgactcaaatcattagctgggaaaataatttaaaccttttttgcccttcaattaatataatgtaaatactattttgtaactcaaattagatttaacttgtggcactctaggcatagtttaaaagagtggagtatttaaaatagtttaaaagttaattttatagctctgtcaaaaaattacacaatgcattgatcgagttctaat

SEQ ID NO: 123916 - DNA, 2163 bp, Homo sapiens
  Payload ID: 4320
  Gene Symbol: CSTB
  Gene Name: cystatin B (stefin B)
  Uniprot ID: P04080
  ENST ID: ENST00000291568
  CDS Start-End: 177-473
cgcgtcccttcttgcggggccaccgcgaccccgcaggggactccgaagccaaagtgcctcctccccgccccttggttccgcccgcgcgtcacgtgaccccagcgcctacttgggctgaggagccgccgcgtcccctcgccgagtcccctcgccagattccctccgtcgccgccaagatgatgtgcggggcgccctccgccacgcagccggccaccgccgagacccagcacatcgccgaccaggtgaggtcccagcttgaagagaaagaaaacaagaagttccctgtgtttaaggccgtgtcattcaagagccaggtggtcgcggggacaaactacttcatcaaggtgcacgtcggcgacgaggacttcgtacacctgcgagtgttccaatctctccctcatgaaaacaagcccttgaccttatctaactaccagaccaacaaagccaagcatgatgagctgacctatttctgatcctgactttggacaaggcccttcagccagaagactgacaaagtcatcctccgtctaccagagcgtgcacttgtgatcctaaaataagcttcatctccgggctgtgccccttggggtggaaggggcaggattctgcagctgcttttgcatttctcttcctaaatttcattgtgttgatttctttccttcccaataggtgatcttaattactttcagaatattttcaaaatagatatatttttaaaatccttacagattgcctcctttgttttagacttttttcttcgtctgaaccaccccgggcaggtccttcccctcgggggcatggagggcggagagactgcctggctcacacagcaagcaggtggtggacccaggattcacacctgcccactccggcccgcgttcctaaccaccactctttacatgttggtgctttgactcttaggtcctggccccaagcttcagtttctcccataaaataaaagagtgtgagtaaatccaattccagagcataactggctccagatctcagatacattcacgcactttatgctctggtacggagaggcagccacacagtgtcgtgcacgtgcagaatagcctgcagcctcactgagtgccctgtggtgcgggaggcttcccatggagccacgtgggcttctaaagggaggtatcttaggagagcgtggctgtttttaaaaacaccttctagttttcaacagggattacttcccattcatggaattggtccggtgccttcccaactgtgattctatgttaaataggacagaagagggagcatcatacatgataagagctaagactgggggtgaaagtctctgtgcaccggggtcatgatgtgaacgtgttcctgagggtgtcctgagctgcgctttgcctccgaggcgtccggcagcgtatgccagaactgcagctgcagggttcaggctgtccagatcgtgggggatctgtgaagactaaggagggatctaccagtgagtccacagagctttgaaagtgatgttaggaaattctgaatcaggccgggcgcggtggctcacacctagaatcccaacactttgggaggccaaggtgggtggatcactctgaggtcaggagttctaggccagcctgacccacatggtgaaaccctgtctctactaataataaaaaaattagctgggcgttgtggcaggcgcctgtaatcccagctacttgggaggctgagacgggaggatcacttggactcgggaggtggtgggtgcagtgagccgagatcgtacctctgcactccagcctgggtgggtgacagagtgagatcctatctcaaaaaaaaaccaaaaagaaaactgaatcatggactgtgtgtattctacactcttaacatgaactctgagactaagcttttataacatgcaaaacagaatcaagcagttttgcattgaaaggaaaacccgttgtatttcccacttgagaatttccagcggaaggcaggtgggggaggggctgtttaggggaccacgcagcgggagagccatccccaacaggaagggagcggttgtctgcaggagcagtgaccaggaactcctatggggcacctgggttgggggaagctggatttagggttagaagcttgtgtgtaaacaggaaatatcagtgtaaaacagaaaataaaatatgtaattaa

SEQ ID NO: 123917 - DNA, 873 bp, Homo sapiens
  Payload ID: 4321
  Gene Symbol: CST3
  Gene Name: cystatin C
  Uniprot ID: P01034
  ENST ID: ENST00000376925
  CDS Start-End: 165-605
gcaggccgcggtggggtggggcggcgaaggccggaagggataaaaccgcagtcgccggcctcgcggggctcacggcctcgcctcggtatcgcagcgggtcctctctatctagctccagcctctcgcctgcgccccactccccgcgtcccgcgtcctagccgaccatggccgggcccctgcgcgccccgctgctcctgctggccatcctggccgtggccctggccgtgagccccgcggccggctccagtcccggcaagccgccgcgcctagtgggaggccccatggacgccagcgtggaggaggagggtgtgcggcgtgcactggactttgccgtcggcgagtacaacaaagccagcaacgacatgtaccacagccgcgcgctgcaggtggtgcgcgcccgcaagcagatcgtagctggggtgaactacttcttggacgtggagctgggccgaaccacgtgtaccaagacccagcccaacttggacaactgccccttccatgaccagccacatctgaaaaggaaagcattctgctctttccagatctacgctgtgccttggcagggcacaatgaccttgtcgaaatccacctgtcaggacgcctaggggtctgtaccgggctggcctgtgcctatcacctcttatgcacacctcccaccccctgtattcccacccctggactggtggcccctgccttggggaaggtctccccatgtgcctgcaccaggagacagacagagaaggcagcaggcggcctttgttgctcagcaaggggctctgccctccctccttccttcttgcttctcatagccccggtgtgcggtgcatacacccccacctcctgcaataaaatagtagcatcggctccctctga

SEQ ID NO: 123918 - DNA, 832 bp, Homo sapiens
  Payload ID: 4321
  Gene Symbol: CST3
  Gene Name: cystatin C
  Uniprot ID: P01034
  ENST ID: ENST00000398409
  CDS Start-End: 133-573
ggaaagggacagaggagaaggagcctgaagagtggcggcatggaggggcccgaagtggggagcgggtcctctctatctagctccagcctctcgcctgcgccccactccccgcgtcccgcgtcctagccgaccatggccgggcccctgcgcgccccgctgctcctgctggccatcctggccgtggccctggccgtgagccccgcggccggctccagtcccggcaagccgccgcgcctagtgggaggccccatggacgccagcgtggaggaggagggtgtgcggcgtgcactggactttgccgtcggcgagtacaacaaagccagcaacgacatgtaccacagccgcgcgctgcaggtggtgcgcgcccgcaagcagatcgtagctggggtgaactacttcttggacgtggagctgggccgaaccacgtgtaccaagacccagcccaacttggacaactgccccttccatgaccagccacatctgaaaaggaaagcattctgctctttccagatctacgctgtgccttggcagggcacaatgaccttgtcgaaatccacctgtcaggacgcctaggggtctgtaccgggctggcctgtgcctatcacctcttatgcacacctcccaccccctgtattcccacccctggactggtggcccctgccttggggaaggtctccccatgtgcctgcaccaggagacagacagagaaggcagcaggcggcctttgttgctcagcaaggggctctgccctccctccttccttcttgcttctcatagccccggtgtgcggtgcatacacccccacctcctgcaataaaatagtagcatcggc

SEQ ID NO: 123919 - DNA, 3286 bp, Homo sapiens
  Payload ID: 4321
  Gene Symbol: CST3
  Gene Name: cystatin C
  Uniprot ID: P01034
  ENST ID: ENST00000398411
  CDS Start-End: 84-524
ctcggtatcgcagcgggtcctctctatctagctccagcctctcgcctgcgccccactccccgcgtcccgcgtcctagccgaccatggccgggcccctgcgcgccccgctgctcctgctggccatcctggccgtggccctggccgtgagccccgcggccggctccagtcccggcaagccgccgcgcctagtgggaggccccatggacgccagcgtggaggaggagggtgtgcggcgtgcactggactttgccgtcggcgagtacaacaaagccagcaacgacatgtaccacagccgcgcgctgcaggtggtgcgcgcccgcaagcagatcgtagctggggtgaactacttcttggacgtggagctgggccgaaccacgtgtaccaagacccagcccaacttggacaactgccccttccatgaccagccacatctgaaaaggaaagcattctgctctttccagatctacgctgtgccttggcagggcacaatgaccttgtcgaaatccacctgtcaggacgcctaggggaccctgatgaaaagactgaggaaaatgctgcctttcctgaatggctaccaggcagggaatgatgctgggaagtgtttaccccacaggctctgtgccttctctgactgggcagctcatgctgtatgcatggaggcatcattaccaaacacacctctgaggccagcggccagcgtctgactcacaagccatgactgccccaccttcttacaacaacaatagcagtttccccgtgaggattcacccctcctcccctctcactccgcctttttccagggaagctgactctaccctttggaccacagcttggagcacttgaccctggctaagctggtcagggcagcgggtctccctcccctgaagcctcatgattggcatgaggacaacacgtgacctatgtgtggctgcccaggacccacataggcttaacggtgggattttgtttgactgtgtgataagtgggttcttccttccctgctgagtgtgaagataaaaaagacttgaggtctggggcccacttggagcctgtttgagaatgaagccaagttatgggaagcaacaaaactgaagagacagcaaggaaaccaggcctggtggtgcactcccagctattctggaggctgacgcgggaggactgcgtgagctcagcagtttgaggctgcaatgagccatgatttcactactgaactccagcctgggcaaaagagcgagaccctgtgtctcagaaaaagagagagagaaacagagagcaaggagcaggtgggttataatggagtccctgcaccaagcagagcctgatgcccgcccttgctctgaacttcctagttatgtgaaccaaccaccaggccagttgggttgggtttccagccctgtgctcttgtctgtcctcactgacagacaaaaataactcatcagtcggttctcagacccacagtcccatgacatttcttgactgtttcagaagtaatgcctcaaggaccagcttgcagaaagtggaggacctgccccctggaccttacaagtagcaggccactcttaaaaatgcaaggaccacagatgtcaccatgactgaaaaatagaggctggccctgcctctgaagatgctgcaatggacttgtgttcaaggagaaattggctgtaacttcccttattgagatataatcgggctcatcgttaagctgtggtcagccagaagtgtagctgtgcccctgggattgaaatcagcaatcaatctggacatcctttttctatcttcatgaggcacctccccagtaccaaccaaatttcttggggatcccccgggacttctcataaatggaattgatttgaactcaggaaaccctcaaataggccagaacaactcactaattaaattcatcccctcccaaaaacaaaaacaaaaacaaaaaaaaacaacacacatgataggaaaaaaattttgcaaattatatatctgatatagaacttgtattcagaacatataatgaactcttacaactcaataagactggtaacccaattaaaaattctttttaaaaaaaccaatttaaaaataaaggcaaataacctaatttttatataactcaaagtttttaaagaaacaaaccaatttaaaagttccaaaggatttgaataaacgtttttccaaagaagatatgtaaatagccaataaacgcataaaaacgtgcataacaccattagctattaggaaaaggcaaatcaaaaccacagtaaaaagcagcttcaaagccactacatggttgtggtcaaagagaccacaaataacaaattggaatctttatacatagctggtgggaatgtaaaatggtgcagctgctttggaaaacagtttcacaagttttcaaaaggttagacctaccatataacctagcaactctactcatatttatatgtcagctacaaataaaaacattaagttcaccaaaatatttacacatgaaagttcatagcatcattattaaaatcagaaaaaaatatattaaaaaaaacctcaaatgtccatcaactgacgaatggataatcaagatatagtgttagtctattcatacaatggaaaatgaacgggcataaaagagaatgacatgacccgtgctacaatgtggagcaatcttgaaaatgtgctaagtgaaagaagccagcaagccatgctgaaacaagtcagcattcatacaatatgattcaatttatatgaaatacccagaacagaaaaatgtatagagacaggctgtagattagtggttgtctagggctgggggcaatagaaggcagagtgactgctaataggaagtttccttggagggatcatgaaaatgttctaaaatcagattatacgtccatttgcacaattttgtgaatatactcggaaccactgaattgtatactttaagtgggtgaggtatgtgaaaattaaatgtcagtaaagctgtttaaaaaagtttcatcccaaagctacattttacctaaggcaaatgtttactaccgcttctctttcagtcccaaataatttccagccatatgttccagtcaagcctcgacaaaattaaacaacaccacaacttactccagttacaagccaatgtgcaaatgccccaaacttgaccataaatttaccacccaacccccatcgtctcattcccaggaaaaactaaacacaagatcaactccccttgcaagttgaagtcctgacattgaagtctaaagaaatcacagcccacaataaaattcttaaagtgtacaaacaa

SEQ ID NO: 123920 - DNA, 756 bp, Homo sapiens
  Payload ID: 4322
  Gene Symbol: CST5
  Gene Name: cystatin D
  Uniprot ID: P28325
  ENST ID: ENST00000304710
  CDS Start-End: 75-503
gggcttcctgcctcagccttctgctgctttgctctctgggagatccagctccttgctctgtgtcccagtagaacatgatgtggcccatgcacaccccactgctgctgctgactgccttgatggtggccgtggccgggagtgcctcggcccaatctaggaccttggcaggtggcatccatgccacagacctcaatgacaagagtgtgcagtgtgccctggactttgccatcagcgagtacaacaaggtcattaataaggatgagtactacagccgccctctgcaggtgatggctgcctaccagcagatcgtgggtggggtgaactactacttcaatgtgaagttcggtcgaaccacatgcaccaagtcccagcccaacttggacaactgtcccttcaatgaccagccaaaactgaaagaggaagagttctgctctttccagatcaatgaagttccctgggaggataaaatttccattctgaactacaagtgccggaaagtctaggggtctgtgcaaggcctgtcacactgaccacctcctactcccaccccctgtagtgctcccacccctggactggtggcccccaccctgggggaggtctcctcatgcgcctgcaccaggagacagacacagaaggtggcaggaggcctttgttgctcagcaggaggctctgcccttgctccttccttcttgcttctcatagccccagtgtgcagtgcacactctcccacctcctgcaattaaacagtagcattgc

SEQ ID NO: 123921 - DNA, 759 bp, Homo sapiens
  Payload ID: 4323
  Gene Symbol: CST6
  Gene Name: cystatin E/M
  Uniprot ID: Q15828
  ENST ID: ENST00000312134
  CDS Start-End: 205-654
cgtcttggcacgcgggtgcgcgccgccccctcggcctcctgggctccctgaacctcgcaggaccccggcaacttcgagccccgccccagctccaggccgcgggggcgcatcgcgggcgtcgggcggggcggcccagcgggtaaaagctgcgcggccgcaagctcggcactcacggctctgagggctccgacggcactgacggccatggcgcgttcgaacctcccgctggcgctgggcctggccctggtcgcattctgcctcctggcgctgccacgcgacgcccgggcccggccgcaggagcgcatggtcggagaactccgggacctgtcgcccgacgacccgcaggtgcagaaggcggcgcaggcggccgtggccagctacaacatgggcagcaacagcatctactacttccgagacacgcacatcatcaaggcgcagagccagctggtggccggcatcaagtacttcctgacgatggagatggggagcacagactgccgcaagaccagggtcactggagaccacgtcgacctcaccacttgccccctggcagcaggggcgcagcaggagaagctgcgctgtgactttgaggtccttgtggttccctggcagaactcctctcagctcctaaagcacaactgtgtgcagatgtgataagtccccgagggcgaaggccattgggtttggggccatggtggagggcacttcaggtccgtgggccgtatctgtcacaataaatggccagtgctgcttcttgca

SEQ ID NO: 123922 - DNA, 930 bp, Homo sapiens
  Payload ID: 4324
  Gene Symbol: CST7
  Gene Name: cystatin F (leukocystatin)
  Uniprot ID: O76096
  ENST ID: ENST00000480798
  CDS Start-End: 277-714
gctgtggccctggcacctgcccctgggctgggacagcccactgttccatgctgcccaagaaggctcagcacaggcacaaaccattgcccggcactggcccgtgctgcctgagaaggattggcacgggcacagaccactgcccccacctgccctgcgccatctacccaagaaggctcggcacgggcaccaaccactgcctccaactgccccatgctgcctgagaaggcactgcacggccacccccaactgccccgcactgtccctacccgggcagccatgcgagcggctggaactctgctggccttctgctgcctggtcttgagcaccactgggggcccttccccagatacttgttcccaggaccttaactcacgtgtgaagccaggatttcctaaaacaataaagaccaatgacccaggagtcctccaagcagccagatacagtgttgaaaagttcaacaactgcacgaacgacatgttcttgttcaaggagtcccgcatcacaagggccctagttcagatagtgaaaggcctgaaatatatgctggaggtggaaattggcagaactacctgcaagaaaaaccagcacctgcgtctggatgactgtgacttccaaaccaaccacaccttgaagcagactctgagctgctactctgaagtctgggtcgtgccctggctccagcacttcgaggtgcctgttctccgttgtcactgacccccgcctcttcagcaagaccacagccatgacaaacaccaggatgcatgctccttgtcccctcccacccgcctcatgacccagcctcacagaccctctcaggcctctgacgagtgagcgggtgaagtgccactgggtcaccgcagggcagctggaatggcagcatggtagcacctcctaacagattaaatagatcacatttgcttctaaaattaa

SEQ ID NO: 123923 - DNA, 751 bp, Homo sapiens
  Payload ID: 4325
  Gene Symbol: CST4
  Gene Name: cystatin S
  Uniprot ID: P01036
  ENST ID: ENST00000217423
  CDS Start-End: 72-497
gggctccctgcctcgggctctcaccctcctctcctgcagctccagctttgtgctctgcctctgaggagaccatggcccggcctctgtgtaccctgctactcctgatggctaccctggctggggctctggcctcgagctccaaggaggagaataggataatcccaggtggcatctatgatgcagacctcaatgatgagtgggtacagcgtgcccttcacttcgccatcagcgagtacaacaaggccaccgaagatgagtactacagacgcccgctgcaggtgctgcgagccagggagcagacctttgggggggtgaattacttcttcgacgtagaggtgggccgcaccatatgtaccaagtcccagcccaacttggacacctgtgccttccatgaacagccagaactgcagaagaaacagttgtgctctttcgagatctacgaagttccctgggaggacagaatgtccctggtgaattccaggtgtcaagaagcctaggggtctgtgccaggccagtcacaccgaccaccacccactcccacccactgtagtgctcccacccctggactggtggcccccaccctgcgggaggcctccccatgtgcctgtgccaagagacagacagagaaggctgcaggagtcctttgttgctcagcagggcgctctgccctccctccttccttcttgcttctaatagacctggtacatggtacacacacccccacctcctgcaattaaacagtagcatcgcc

SEQ ID NO: 123924 - DNA, 748 bp, Homo sapiens
  Payload ID: 4326
  Gene Symbol: CST2
  Gene Name: cystatin SA
  Uniprot ID: P09228
  ENST ID: ENST00000304725
  CDS Start-End: 72-497
gggatccccgcctcaggctctcaacctcctctcctgcagctccagctctgtgctctgcctccgaggagaccatggcctggcccctgtgcaccctgctgctcctgctggccacccaggctgtggccctggcctggagcccccaggaggaggacaggataatcgagggtggcatctatgatgcagacctcaatgatgagcgggtacagcgtgcccttcactttgtcatcagcgagtataacaaggccactgaagatgagtactacagacgcctgctgcgggtgctacgagccagggagcagatcgtgggcggggtgaattacttcttcgacatagaggtgggccgaaccatatgtaccaagtcccagcccaacttggacacctgtgccttccatgaacagccagaactgcagaagaaacagttgtgctctttccagatctacgaagttccctgggaggacagaatgtccctggtgaattccaggtgtcaagaagcctagggatctgtgccagggagtcacactgaccacctcctactcccaccccttgtagtgctcccacccctggactggtggcccccaccctgtgggaggtctccccatgcacctgcagcaggagaagacagagaaggctgcaggaggcctttgttgctcagcaggggactctgccctccctccttccttttgcttctcatagccctggtacatggtacacacacccccacctcctgcaattaaacagtagcatcacc

SEQ ID NO: 123925 - DNA, 760 bp, Homo sapiens
  Payload ID: 4327
  Gene Symbol: CST1
  Gene Name: cystatin SN
  Uniprot ID: P01037
  ENST ID: ENST00000304749
  CDS Start-End: 72-497
gggctccctgcctcgggctctcaccctcctctcctgcagctccagctttgtgctctgcctctgaggagaccatggcccagtatctgagtaccctgctgctcctgctggccaccctagctgtggccctggcctggagccccaaggaggaggataggataatcccgggtggcatctataacgcagacctcaatgatgagtgggtacagcgtgcccttcacttcgccatcagcgagtataacaaggccaccaaagatgactactacagacgtccgctgcgggtactaagagccaggcaacagaccgttgggggggtgaattacttcttcgacgtagaggtgggccgcaccatatgtaccaagtcccagcccaacttggacacctgtgccttccatgaacagccagaactgcagaagaaacagttgtgctctttcgagatctacgaagttccctgggagaacagaaggtccctggtgaaatccaggtgtcaagaatcctagggatctgtgccaggccattcgcaccagccaccacccactcccaccccctgtagtgctcccacccctggactggtggcccccaccctgcgggaggcctccccatgtgcctgcgccaagagacagacagagaaggctgcaggagtcctttgttgctcagcagggcgctctgccctccctccttccttcttgcttctaatagccctggtacatggtacacacccccccacctcctgcaattaaacagtagcatcgcctccctctga

SEQ ID NO: 123926 - DNA, 655 bp, Homo sapiens
  Payload ID: 4327
  Gene Symbol: CST1
  Gene Name: cystatin SN
  Uniprot ID: P01037
  ENST ID: ENST00000398402
  CDS Start-End: 145-570
caggaagtcacatagctttcacagtcaaaggaccagtgtcacctctgtggagacctgggtgactcaagcttgggagcactggggaagagaggcatggctcggggaggctgcactccagctttgtgctctgcctctgaggagaccatggcccagtatctgagtaccctgctgctcctgctggccaccctagctgtggccctggcctggagccccaaggaggaggataggataatcccgggtggcatctataacgcagacctcaatgatgagtgggtacagcgtgcccttcacttcgccatcagcgagtataacaaggccaccaaagatgactactacagacgtccgctgcgggtactaagagccaggcaacagaccgttgggggggtgaattacttcttcgacgtagaggtgggccgcaccatatgtaccaagtcccagcccaacttggacacctgtgccttccatgaacagccagaactgcagaagaaacagttgtgctctttcgagatctacgaagttccctgggagaacagaaggtccctggtgaaatccaggtgtcaagaatcctagggatctgtgccaggccattcgcaccagccaccacccactcccaccccctgtagtgctcccacccctggactggtggcccccaccc

SEQ ID NO: 123927 - DNA, 510 bp, Homo sapiens
  Payload ID: 4328
  Gene Symbol: CSTL1
  Gene Name: cystatin-like 1
  Uniprot ID: Q9H114
  ENST ID: ENST00000246020
  CDS Start-End: 21-458
aagtttctgaggctgtagacatggggatcggatgctggagaaaccccctgctgctgctgattgccctggtcctgtcagccaagctgggtcacttccaaaggtgggagggcttccagcagaagctcatgagcaagaagaacatgaattcaacactcaacttcttcattcaatcctacaacaatgccagcaacgacacctacttatatcgagtccagaggctaattcgaagtcagatgcagctgacgacgggagtggagtatatagtcactgtgaagattggctggaccaaatgcaagaggaatgacacgagcaattcttcctgccccctgcaaagcaagaagctgagaaagagtttaatttgcgagtctttgatatacaccatgccctggataaactatttccagctctggaacaattcctgtctggaggccgagcatgtgggcagaaacctcagatgagggctcatatgattgagttgtgcactggctgttattaaactgtaaaggatca

SEQ ID NO: 123928 - DNA, 736 bp, Homo sapiens
  Payload ID: 4328
  Gene Symbol: CSTL1
  Gene Name: cystatin-like 1
  Uniprot ID: Q9H114
  ENST ID: ENST00000347397
  CDS Start-End: 247-684
agggggatcctgcaagcagaaatctgtggtgggcgggcggcaggtgagcaaggagaacgtgtctgtaaaggaagcacagggaacaggtggtggctttgtaagacagttggaacccaaggaaggcaggccatcccccaggaaagcctatgttggtgagggttatgatgggagaatgagtgaactgcagcctggcaccaccacaccctggaaggtgcagttgggaagaaagtttctgaggctgtagacatggggatcggatgctggagaaaccccctgctgctgctgattgccctggtcctgtcagccaagctgggtcacttccaaaggtgggagggcttccagcagaagctcatgagcaagaagaacatgaattcaacactcaacttcttcattcaatcctacaacaatgccagcaacgacacctacttatatcgagtccagaggctaattcgaagtcagatgcagctgacgacgggagtggagtatatagtcactgtgaagattggctggaccaaatgcaagaggaatgacacgagcaattcttcctgccccctgcaaagcaagaagctgagaaagagtttaatttgcgagtctttgatatacaccatgccctggataaactatttccagctctggaacaattcctgtctggaggccgagcatgtgggcagaaacctcagatgagggctcatatgattgagttgtgcactggctgttattaaactgtaaaggatca

SEQ ID NO: 123929 - DNA, 477 bp, Homo sapiens
  Payload ID: 4328
  Gene Symbol: CSTL1
  Gene Name: cystatin-like 1
  ENST ID: ENST00000619238
  CDS Start-End: 367-477
agggggatcctgcaagcagaaatctgtggtgggcgggcggcaggtgagcaaggagaacgtgtctgtaaaggaagcacagggaacaggtggtggctttgtaagacagttggaacccaaggaaggcaggccatcccccaggaaagcctatgttggtgagggttatgatgggagaatgagtgaactgcagcctggcaccaccacaccctggaaggtgcagttgggaagaaagtttctgaggctgtagacatggggatcggatgctggagaaaccccctgctgctgctgattgccctggtcctgtcagccaagctgggtcacttccaaaggtgggagggcttccagcagaagctcatgagcaagaagaacatgaattcaacactcaacttcttcattcaatcctacaacaatgccagcaacgacacctacttatatcgagtccagaggctaattcgaagtcagatgcagcaggtacattgt

SEQ ID NO: 123930 - DNA, 1952 bp, Homo sapiens
  Payload ID: 4329
  Gene Symbol: CSRP1
  Gene Name: cysteine and glycine-rich protein 1
  Uniprot ID: P21291
  ENST ID: ENST00000340006
  CDS Start-End: 192-773
ggagggcagcaccgccgggcttcgcgccatgacatcagccctggagtggtgcagtgtgcaaagcccactggttggcgtggcccgggacacgccttccgcggagcggaacaaaacggcgcgcaggccgggcgcacccagccgccacttccgagagcgcctgccgcccctgcgccgccgagccagctgccagaatgccgaactggggaggaggcaagaaatgtggggtgtgtcagaagacggtttactttgccgaagaggttcagtgcgaaggcaacagcttccataaatcctgcttcctgtgcatggtctgcaagaagaatctggacagtaccactgtggccgtgcatggtgaggagatttactgcaagtcctgctacggcaagaagtatgggcccaaaggctatggctacgggcagggcgcaggcaccctcagcactgacaagggggagtcgctgggtatcaagcacgaggaagcccctggccacaggcccaccaccaaccccaatgcatccaaatttgcccagaagattggtggctccgagcgctgcccccgatgcagccaggcagtctatgctgcggagaaggtgattggtgctgggaagtcctggcataaggcctgctttcgatgtgccaagtgtggcaaaggccttgagtcaaccaccctggcagacaaggatggcgagatttactgcaaaggatgttatgctaaaaacttcgggcccaagggctttggttttgggcaaggagctggggccttggtccactctgagtgaggccaccatcacccaccacaccctgcccactcctgcgcttttcatcgccattccattcccagcagctttggagacctccaggattatttctctgtcagccctgccacatatcactaatgacttgaacttgggcatctggctccctttggtttgggggtctgcctgaggtcccaccccactaaagggctccccaggcctgggatctgacaccatcaccagtaggagacctcagtgttttgggtctaggtgagagcaggcccctctccccacacctcgccccacagagctctgttcttagcctcctgtgctgcgtgtccatcatcagctgaccaagacacctgaggacacatcttggcacccagaggagcagcagcaacaggctggagggagagggaagcaagaccaagatgaggaggggggaaggctgggttttttggatctcagagattctcctctgtgggaaagaggttgagcttcctggtgtccctcagagtaagcctgaggagtcccagcttagggagtcactattggaggcagagaggcatgcaggcagggtcctaggagcccctgcttctccaggcctcttgcctttgagtctttgtggaatggatagcctcccactaggactgggaggagaataacccaggtcttaaggaccccaaagtcaggatgttgtttgatcttctcaaacatctagttccctgcttgatgggaggatcctaatgaaatacctgaaacatatattggcatttatcaatggctcaaatcttcatttatctctggccttaaccctggctcctgaggctgcggccagcagagcccaggccagggctctgttcttgccacacctgcttgatcctcagatgtggagggaggtaggcactgcctcagtcttcatccaaacacctttccctttgccctgagacctcagaatcttccctttaacccaagaccctgcctcttccactccacccttctccagggacccttagatcacatcactccacccctgccaggccccaggttaggaatagtggtgggaggaaggggaaagggctgggcctcaccgctcccagcaactgaaaggacaacactatctggagccacccactgaaagggctgcaggcatgggctgtacccaagctgatttctcatctggtcaataaagctgtttagacc

SEQ ID NO: 123931 - DNA, 2129 bp, Homo sapiens
  Payload ID: 4329
  Gene Symbol: CSRP1
  Gene Name: cysteine and glycine-rich protein 1
  Uniprot ID: P21291
  ENST ID: ENST00000367306
  CDS Start-End: 365-946
ggcttgttcctgtttgcatgacaggaaactcctgaaatgcccctcgcacgtgcaagacgttttccgcggtggcggcgacagggcgcacagtgggaccgcagcacgagctcggagcacccccagagtcggcgactcctgcccccgcccctgccggccggccttcccggggcctaggagggcagcaccgccgggcttcgcgccatgacatcagccctggagtggtgcagtgtgcaaagcccactggttggcgtggcccgggacacgccttccgcggagcggaacaaaacggcgcgcaggccgggcgcacccagccgccacttccgagagcgcctgccgcccctgcgccgccgagccagctgccagaatgccgaactggggaggaggcaagaaatgtggggtgtgtcagaagacggtttactttgccgaagaggttcagtgcgaaggcaacagcttccataaatcctgcttcctgtgcatggtctgcaagaagaatctggacagtaccactgtggccgtgcatggtgaggagatttactgcaagtcctgctacggcaagaagtatgggcccaaaggctatggctacgggcagggcgcaggcaccctcagcactgacaagggggagtcgctgggtatcaagcacgaggaagcccctggccacaggcccaccaccaaccccaatgcatccaaatttgcccagaagattggtggctccgagcgctgcccccgatgcagccaggcagtctatgctgcggagaaggtgattggtgctgggaagtcctggcataaggcctgctttcgatgtgccaagtgtggcaaaggccttgagtcaaccaccctggcagacaaggatggcgagatttactgcaaaggatgttatgctaaaaacttcgggcccaagggctttggttttgggcaaggagctggggccttggtccactctgagtgaggccaccatcacccaccacaccctgcccactcctgcgcttttcatcgccattccattcccagcagctttggagacctccaggattatttctctgtcagccctgccacatatcactaatgacttgaacttgggcatctggctccctttggtttgggggtctgcctgaggtcccaccccactaaagggctccccaggcctgggatctgacaccatcaccagtaggagacctcagtgttttgggtctaggtgagagcaggcccctctccccacacctcgccccacagagctctgttcttagcctcctgtgctgcgtgtccatcatcagctgaccaagacacctgaggacacatcttggcacccagaggagcagcagcaacaggctggagggagagggaagcaagaccaagatgaggaggggggaaggctgggttttttggatctcagagattctcctctgtgggaaagaggttgagcttcctggtgtccctcagagtaagcctgaggagtcccagcttagggagtcactattggaggcagagaggcatgcaggcagggtcctaggagcccctgcttctccaggcctcttgcctttgagtctttgtggaatggatagcctcccactaggactgggaggagaataacccaggtcttaaggaccccaaagtcaggatgttgtttgatcttctcaaacatctagttccctgcttgatgggaggatcctaatgaaatacctgaaacatatattggcatttatcaatggctcaaatcttcatttatctctggccttaaccctggctcctgaggctgcggccagcagagcccaggccagggctctgttcttgccacacctgcttgatcctcagatgtggagggaggtaggcactgcctcagtcttcatccaaacacctttccctttgccctgagacctcagaatcttccctttaacccaagaccctgcctcttccactccacccttctccagggacccttagatcacatcactccacccctgccaggccccaggttaggaatagtggtgggaggaaggggaaagggctgggcctcaccgctcccagcaactgaaaggacaacactatctggagccacccactgaaagggctgcaggcatgggctgtacccaagctgatttctcatctggtcaataaagctgtttagaccagaa

SEQ ID NO: 123932 - DNA, 890 bp, Homo sapiens
  Payload ID: 4329
  Gene Symbol: CSRP1
  Gene Name: cysteine and glycine-rich protein 1
  ENST ID: ENST00000531916
  CDS Start-End: 365-826
ggcttgttcctgtttgcatgacaggaaactcctgaaatgcccctcgcacgtgcaagacgttttccgcggtggcggcgacagggcgcacagtgggaccgcagcacgagctcggagcacccccagagtcggcgactcctgcccccgcccctgccggccggccttcccggggcctaggagggcagcaccgccgggcttcgcgccatgacatcagccctggagtggtgcagtgtgcaaagcccactggttggcgtggcccgggacacgccttccgcggagcggaacaaaacggcgcgcaggccgggcgcacccagccgccacttccgagagcgcctgccgcccctgcgccgccgagccagctgccagaatgccgaactggggaggaggcaagaaatgtggggtgtgtcagaagacggtttactttgccgaagaggttcagtgcgaaggcaacagcttccataaatcctgcttcctgtgcatggtctgcaagaagaatctggacagtaccactgtggccgtgcatggtgaggagatttactgcaagtcctgctacggcaagaagtatgggcccaaaggctatggctacgggcagggcgcaggcaccctcagcactgacaagggggagtcgctgggtatcaagcacgaggaagcccctggccacaggcccaccaccaaccccaatgcatccaaatttgcccagaagattggtggctccgagcgctgcccccgatgcagccaggcagtctatgctgcggagaaggaccccaaagtcaggatgttgtttgatcttctcaaacatctagttccctgcttgatgggaggatcctaatgaaatacctgaaacatatattggcatttatcaatggctcaaatcttcatttatctctggcctt

SEQ ID NO: 123933 - DNA, 1469 bp, Homo sapiens
  Payload ID: 4329
  Gene Symbol: CSRP1
  Gene Name: cysteine and glycine-rich protein 1
  Uniprot ID: P21291
  ENST ID: ENST00000532460
  CDS Start-End: 154-735
atcctttagagtgcctagcacagggctgaaaatgcagcagctgctctgtaaagacctgttgattagattggggggaggaaatccccgagaacgtgcgaggctgctgtcgagagctagcagaaagtgctctgccaggcctggtggccccccagaatgccgaactggggaggaggcaagaaatgtggggtgtgtcagaagacggtttactttgccgaagaggttcagtgcgaaggcaacagcttccataaatcctgcttcctgtgcatggtctgcaagaagaatctggacagtaccactgtggccgtgcatggtgaggagatttactgcaagtcctgctacggcaagaagtatgggcccaaaggctatggctacgggcagggcgcaggcaccctcagcactgacaagggggagtcgctgggtatcaagcacgaggaagcccctggccacaggcccaccaccaaccccaatgcatccaaatttgcccagaagattggtggctccgagcgctgcccccgatgcagccaggcagtctatgctgcggagaaggtgattggtgctgggaagtcctggcataaggcctgctttcgatgtgccaagtgtggcaaaggccttgagtcaaccaccctggcagacaaggatggcgagatttactgcaaaggatgttatgctaaaaacttcgggcccaagggctttggttttgggcaaggagctggggccttggtccactctgagtgaggccaccatcacccaccacaccctgcccactcctgcgcttttcatcgccattccattcccagcagctttggagacctccaggattatttctctgtcagccctgccacatatcactaatgacttgaacttgggcatctggctccctttggtttgggggtctgcctgaggtcccaccccactaaagggctccccaggcctgggatctgacaccatcaccagtaggagacctcagtgttttgggtctaggtgagagcaggcccctctccccacacctcgccccacagagctctgttcttagcctcctgtgctgcgtgtccatcatcagctgaccaagacacctgaggacacatcttggcacccagaggagcagcagcaacaggctggagggagagggaagcaagaccaagatgaggaggggggaaggctgggttttttggatctcagagattctcctctgtgggaaagaggttgagcttcctggtgtccctcagagtaagcctgaggagtcccagcttagggagtcactattggaggcagagaggcatgcaggcagggtcctaggagcccctgcttctccaggcctcttgcctttgagtctttgtggaatggatagcctcccactaggactgggaggagaataacccaggtcttaaggaccccaaagtcaggatgttgtttgatcttctcaaacatctagttccctgcttgatgggaggatcctaatgaaatacctg

SEQ ID NO: 123934 - DNA, 574 bp, Homo sapiens
  Payload ID: 4329
  Gene Symbol: CSRP1
  Gene Name: cysteine and glycine-rich protein 1
  ENST ID: ENST00000526723
  CDS Start-End: 56-538
agccgccacttccgagagcgcctgccgcccctgcgccgccgagccagctgccagaatgccgaactggggaggaggcaagaaatgtggggtgtgtcagaagacggtttactttgccgaagagatttactgcaagtcctgctacggcaagaagtatgggcccaaaggctatggctacgggcagggcgcaggcaccctcagcactgacaagggggagtcgctgggtatcaagcacgaggaagcccctggccacaggcccaccaccaaccccaatgcatccaaatttgcccagaagattggtggctccgagcgctgcccccgatgcagccaggcagtctatgctgcggagaaggtgattggtgctgggaagtcctggcataaggcctgctttcgatgtgccaagtgtggcaaaggccttgagtcaaccaccctggcagacaaggatggcgagatttactgcaaaggatgttatgctaaaaacttcgggcccaagggctttggttttgggcaaggagctggggccttggtccactctgagtgaggccaccatcacccaccacaccctgcccactcctgc

SEQ ID NO: 123935 - DNA, 1149 bp, Homo sapiens
  Payload ID: 4329
  Gene Symbol: CSRP1
  Gene Name: cysteine and glycine-rich protein 1
  Uniprot ID: P21291
  ENST ID: ENST00000533432
  CDS Start-End: 218-799
gtgcgtgacccagggcgacccggctccccgcaaccgcctgcaagtcgggcagaacaatcggcgattctgcgcgccactgacgctcattgtatggcagagagatgagggcatccgtgccaccccctccctcaccctcctgctggggagaaaatgcccgcgggcggggtggggcaaacatctgggcctgaccttggacatctgtgtccctgagcgcagaatgccgaactggggaggaggcaagaaatgtggggtgtgtcagaagacggtttactttgccgaagaggttcagtgcgaaggcaacagcttccataaatcctgcttcctgtgcatggtctgcaagaagaatctggacagtaccactgtggccgtgcatggtgaggagatttactgcaagtcctgctacggcaagaagtatgggcccaaaggctatggctacgggcagggcgcaggcaccctcagcactgacaagggggagtcgctgggtatcaagcacgaggaagcccctggccacaggcccaccaccaaccccaatgcatccaaatttgcccagaagattggtggctccgagcgctgcccccgatgcagccaggcagtctatgctgcggagaaggtgattggtgctgggaagtcctggcataaggcctgctttcgatgtgccaagtgtggcaaaggccttgagtcaaccaccctggcagacaaggatggcgagatttactgcaaaggatgttatgctaaaaacttcgggcccaagggctttggttttgggcaaggagctggggccttggtccactctgagtgaggccaccatcacccaccacaccctgcccactcctgcgcttttcatcgccattccattcccagcagctttggagacctccaggattatttctctgtcagccctgccacatatcactaatgacttgaacttgggcatctggctccctttggtttgggggtctgcctgaggtcccaccccactaaagggctccccaggcctgggatctgacaccatcaccagtaggagacctcagtgttttgggtctaggtgagagcaggcccctctccccacacctcgccccacagagctctgttcttagcctcctgtgctgcgtgtccatcatcagctgaccaagacacctgaggacacat

SEQ ID NO: 123936 - DNA, 582 bp, Homo sapiens
  Payload ID: 4329
  Gene Symbol: CSRP1
  Gene Name: cysteine and glycine-rich protein 1
  ENST ID: ENST00000524951
  CDS Start-End: 124-582
agccgccacttccgagagcgcctgccgcccctgcgccgccgagccagctgccagaagacggtttactttgccgaagaggttcagtgcgaaggcaacagcttccataaatcctgcttcctgtgcatggtctgcaagaagaatctggacagtaccactgtggccgtgcatggtgaggagatttactgcaagtcctgctacggcaagaagtatgggcccaaaggctatggctacgggcagggcgcaggcaccctcagcactgacaagggggagtcgctgggtatcaagcacgaggaagcccctggccacaggcccaccaccaaccccaatgcatccaaatttgcccagaagattggtggctccgagcgctgcccccgatgcagccaggcagtctatgctgcggagaaggtgattggtgctgggaagtcctggcataaggcctgctttcgatgtgccaagtgtggcaaaggccttgagtcaaccaccctggcagacaaggatggcgagatttactgcaaaggatgttatgctaaaaacttcgggcccaagggctttggttttgggcaaggagctggggccttggtc

SEQ ID NO: 123937 - DNA, 582 bp, Homo sapiens
  Payload ID: 4329
  Gene Symbol: CSRP1
  Gene Name: cysteine and glycine-rich protein 1
  ENST ID: ENST00000526256
  CDS Start-End: 56-109
agccgccacttccgagagcgcctgccgcccctgcgccgccgagccagctgccagaatgccgaactggggaggaggcaagaaatctggggccttggtccactctgagtgaggccaccatcacccaccacaccctgcccactcctgcgcttttcatcgccattccattcccagcagctttggagacctccaggattatttctctgtcagccctgccacatatcactaatgacttgaacttgggcatctggctccctttggtttgggggtctgcctgaggtcccaccccactaaagggctccccaggcctgggatctgacaccatcaccagtaggagacctcagtgttttgggtctaggtgagagcaggcccctctccccacacctcgccccacagagctctgttcttagcctcctgtgctgcgtgtccatcatcagctgaccaagacacctgaggacacatcttggcacccagaggagcagcagcaacaggctggagggagagggaagcaagaccaagatgaggaggggggaaggctgggttttttggatctcagagattctcctctgtgggaaagaggttgag

SEQ ID NO: 123938 - DNA, 943 bp, Homo sapiens
  Payload ID: 4330
  Gene Symbol: CSRP2
  Gene Name: cysteine and glycine-rich protein 2
  Uniprot ID: Q16527
  ENST ID: ENST00000311083
  CDS Start-End: 125-706
caccgagcgctctttaaaaggcaccggcgcgcgcttcgcctgggatctcggactccctggaccctccctccagcccagcctcgctagctccgcctgcggtacgtgctcccgcctccgactcaaaatgcctgtctggggaggtggaaacaagtgtggggcctgtgggaggaccgtgtaccacgcagaagaggtgcagtgtgatggcaggagcttccaccgctgctgctttctctgcatggtttgcaggaaaaatttagatagcacaacagtggcaattcacgatgaagagatctactgcaaatcctgctacggaaagaagtatgggccaaaaggctacggttatggccagggcgctggcacgcttaacatggaccgtggcgagaggctgggcatcaaaccagagagtgttcagcctcacaggcctacaacaaatccaaacacttctaaatttgctcagaaatatggaggtgctgagaagtgttccagatgtggggattctgtatatgctgccgagaagataattggagctggaaagccctggcacaaaaactgtttccgatgtgcaaagtgtgggaagagtcttgaatcaacaactctgactgaaaaagaaggtgaaatctattgtaaaggatgctatgcaaagaactttgggcccaagggatttggctatggccaaggagcaggggctcttgttcatgcccagtaagatgtaaaccctgaactaaacatcacacactgagaatctcttcataatctaggcacagataatctttaacactaaactactgtgaaattctaccagcattaagtactgtatatcgccctgtacttggataggctggctaactcgtaggaagagagcactgtatggtatccttttgctttattcaccagcattttgggggaacatttcttttacattttaaataaaacttcagcttga

SEQ ID NO: 123939 - DNA, 910 bp, Homo sapiens
  Payload ID: 4330
  Gene Symbol: CSRP2
  Gene Name: cysteine and glycine-rich protein 2
  ENST ID: ENST00000552330
  CDS Start-End: 56-787
ccagcccagcctcgctagctccgcctgcggtacgtgctcccgcctccgactcaaaatgcctgtctggggaggtggaaacaagtgtggggcctgtgggaggaccgtgtaccacgcagaagaggtgcagtgtgatggcaggagcttccaccgctgctgctttctctgcatggtttgcaggaaaaatttagatagcacaacagtggcaattcacgatgaagagatctactgcaaatcctgctacggaaagaagtatgggccaaaaggctacggttatggccagggcgctggcacgcttaacatggaccgtggcgagaggctgggcatcaaaccagagagcattccaagctgtatcaaggagtcgtgttctcaaaagcaagtgatttgtatttacttcaatttcacagcaccttggagaccggatgtcatgaaattaaatggtagagaaatgtgctgtgtgaatcatgagaggtgtttctcatgtgcaattgttcagcctcacaggcctacaacaaatccaaacacttctaaatttgctcagaaatatggaggtgctgagaagtgttccagatgtggggattctgtatatgctgccgagaagataattggagctggaaagccctggcacaaaaactgtttccgatgtgcaaagtgtgggaagagtcttgaatcaacaactctgactgaaaaagaaggtgaaatctattgtaaaggatgctatgcaaagaactttgggcccaagggatttggctatggccaaggagcaggggctcttgttcatgcccagtaagatgtaaaccctgaactaaacatcacacactgagaatctcttcataatctaggcacagataatctttaacactaaactactgtgaaattctaccagcattaagtactgtatatcgccctgtac

SEQ ID NO: 123940 - DNA, 754 bp, Homo sapiens
  Payload ID: 4330
  Gene Symbol: CSRP2
  Gene Name: cysteine and glycine-rich protein 2
  Uniprot ID: Q16527
  ENST ID: ENST00000546966
  CDS Start-End: 63-644
gcctgggatctcggactccctggaccctccctccagcccagcctcgctagctccgcctgcgaatgcctgtctggggaggtggaaacaagtgtggggcctgtgggaggaccgtgtaccacgcagaagaggtgcagtgtgatggcaggagcttccaccgctgctgctttctctgcatggtttgcaggaaaaatttagatagcacaacagtggcaattcacgatgaagagatctactgcaaatcctgctacggaaagaagtatgggccaaaaggctacggttatggccagggcgctggcacgcttaacatggaccgtggcgagaggctgggcatcaaaccagagagtgttcagcctcacaggcctacaacaaatccaaacacttctaaatttgctcagaaatatggaggtgctgagaagtgttccagatgtggggattctgtatatgctgccgagaagataattggagctggaaagccctggcacaaaaactgtttccgatgtgcaaagtgtgggaagagtcttgaatcaacaactctgactgaaaaagaaggtgaaatctattgtaaaggatgctatgcaaagaactttgggcccaagggatttggctatggccaaggagcaggggctcttgttcatgcccagtaagatgtaaaccctgaactaaacatcacacactgagaatctcttcataatctaggcacagataatctttaacactaaactactgtgaaattctaccagcattaagtactgta

SEQ ID NO: 123941 - DNA, 632 bp, Homo sapiens
  Payload ID: 4330
  Gene Symbol: CSRP2
  Gene Name: cysteine and glycine-rich protein 2
  ENST ID: ENST00000547435
  CDS Start-End: 50-613
cagcctcgctagctccgcctgcggtacgtgctcccgcctccgactcaaaatgcctgtctggggaggtggaaacaagtgtggggcctgtgggaggaccgtgtaccacgcagaagaggtgcagtgtgatggcaggagcttccaccgctgctgctttctctgcatggtttgcaggaaaaatttagatagcacaacagtggcaattcacgatgaagagatctactgcaaatcctgctacggaaagaagtatgggccaaaaggctacggttatggccagggcgctggcacgcttaacatggaccgtggcgagaggctgggcatcaaaccagagagtgttcagcctcacaggcctacaacaaatccaaacacttctaaatttgctcagaaatatggaggtgctgagaagtgttccagatgtggggattctgtatatgctgccgagaagataattggagctggaaagccctggcacaaaaactgtttccgatgtgcaaagtgtgggaagagtcttgaatcaacaactctgactgaaaaagaaggtgaaatctattgtaaaggtaaaattcatttcagttactgctgtccatatgaatattccacactggttcttgtttaatgaaatgtcactggcatta

SEQ ID NO: 123942 - DNA, 1342 bp, Homo sapiens
  Payload ID: 4331
  Gene Symbol: CSRP3
  Gene Name: cysteine and glycine-rich protein 3 (cardiac LIM protein)
  Uniprot ID: P50461
  ENST ID: ENST00000265968
  CDS Start-End: 118-702
caggccaaggctggtgacagccttcatatatttaaagaggacaagagcccctcagactcagttgagctgaacggagtccacacaggcagacttgaccttgaccagatagtcttcaagatgccaaactggggcggaggcgcaaaatgtggagcctgtgaaaagaccgtctaccatgcagaagaaatccagtgcaatggaaggagtttccacaagacgtgtttccactgcatggcctgcaggaaggctcttgacagcacgacagtcgcggctcatgagtcggagatctactgcaaggtgtgctatgggcgcagatatggccccaaagggatcgggtatggacaaggcgctggctgtctcagcacagacacgggcgagcatctcggcctgcagttccaacagtccccaaagccggcacgctcagttaccaccagcaacccttccaaattcactgcgaagtttggagagtccgagaagtgccctcgatgtggcaagtcagtctatgctgctgagaaggttatgggaggtggcaagccttggcacaagacctgtttccgctgtgccatctgtgggaagagtctggagtccacaaatgtcactgacaaagatggggaactttattgcaaagtttgctatgccaaaaattttggccccacgggtattgggtttggaggccttacacaacaagtggaaaagaaagaatgaagaggtgcgccgtttctcagattttttgcgagcctaaaacacttgccaagtaatcctgcacagatcgatacctttccccaaatagcctctcctttgtagtcgtacattatgtgtttctcctcagaagtgatcaggtctttactgaatgttagaagaggcctttggaagaaaattatgtaaagtttaatctataacaaatgctttattatttataatgcttggaatgggagaggcaataaataaatgttttagtgctatcttgtatggctctagatcttttctttgagatagaaattttcaaaaacataaagctagttcaaaaaacgagttgcagagcatataataaatttggatgtcaactgagaaaggagtgagaaggaagaaacaatgcgcaaaggaaagcagtctttcagaatctgtcagccaagtgtctttctagttactgctaatggagaagaaaacagggggtctgggagaaaatagagaacatgatagcaaaatctaaaaggaaaatcaaaactaataaaattgctgaagagttgatccctttgtcctatcgtggggctttgtaatgttacacatctcgtgaaaactcagaaatgacaataaagcgtggcatttgcctctgtattataaatga

SEQ ID NO: 123943 - DNA, 1456 bp, Homo sapiens
  Payload ID: 4331
  Gene Symbol: CSRP3
  Gene Name: cysteine and glycine-rich protein 3 (cardiac LIM protein)
  Uniprot ID: P50461
  ENST ID: ENST00000533783
  CDS Start-End: 242-826
gcagtgagccgagatcgcgccactacactccagactgggcgacagagccagactccgtctcaaaaaaaaaaaaaaaaaaagagagagagcaccttaggaatcatctgcctcacacgaatattctcaggccaaggctggtgacagccttcatatatttaaagaggacaagagcccctcagactcagttgagctgaacggagtccacacaggcagacttgaccttgaccagatagtcttcaagatgccaaactggggcggaggcgcaaaatgtggagcctgtgaaaagaccgtctaccatgcagaagaaatccagtgcaatggaaggagtttccacaagacgtgtttccactgcatggcctgcaggaaggctcttgacagcacgacagtcgcggctcatgagtcggagatctactgcaaggtgtgctatgggcgcagatatggccccaaagggatcgggtatggacaaggcgctggctgtctcagcacagacacgggcgagcatctcggcctgcagttccaacagtccccaaagccggcacgctcagttaccaccagcaacccttccaaattcactgcgaagtttggagagtccgagaagtgccctcgatgtggcaagtcagtctatgctgctgagaaggttatgggaggtggcaagccttggcacaagacctgtttccgctgtgccatctgtgggaagagtctggagtccacaaatgtcactgacaaagatggggaactttattgcaaagtttgctatgccaaaaattttggccccacgggtattgggtttggaggccttacacaacaagtggaaaagaaagaatgaagaggtgcgccgtttctcagattttttgcgagcctaaaacacttgccaagtaatcctgcacagatcgatacctttccccaaatagcctctcctttgtagtcgtacattatgtgtttctcctcagaagtgatcaggtctttactgaatgttagaagaggcctttggaagaaaattatgtaaagtttaatctataacaaatgctttattatttataatgcttggaatgggagaggcaataaataaatgttttagtgctatcttgtatggctctagatcttttctttgagatagaaattttcaaaaacataaagctagttcaaaaaacgagttgcagagcatataataaatttggatgtcaactgagaaaggagtgagaaggaagaaacaatgcgcaaaggaaagcagtctttcagaatctgtcagccaagtgtctttctagttactgctaatggagaagaaaacagggggtctgggagaaaatagagaacatgatagcaaaatctaaaaggaaaatcaaaactaataaaattgctgaagagttgatccctttgtcctatcgtggggctttgtaatgttacacatctcgtgaaaactcagaaatgacaataaagcgtggcatttgcctctgta

SEQ ID NO: 123944 - DNA, 2654 bp, Homo sapiens
  Payload ID: 4332
  Gene Symbol: CHORDC1
  Gene Name: cysteine and histidine-rich domain (CHORD) containing 1
  Uniprot ID: Q9UHD1
  ENST ID: ENST00000320585
  CDS Start-End: 411-1409
atgagagggcggggcggccactttgctgcaggagatacccaaagccagttagcactgaggaagtcagaagagaattgtcagtctctcggacaccttcattttctgccccggaaatttctcctccgctgttgtctgggctccacttccgacccccagttgctaccagctgtagtccgacctatcgtggcccgggctagtgccagcctcccgccgctacctccgcctcgtcccttctcctctgcgcctgcgcgaccggaaaattcgcgaaggttcctgaaacgcaacggatcgtttccggaagccggtagccgcctcagtcgtcagaccggtgctagcgacacgggagtggcaaacgcatcctcttgccgttcccggtgtttgggccttgcctgtgacggtgggaaaagaaaatggccttgctgtgctacaaccggggctgcggtcagcgcttcgatcctgagaccaattccgacgatgcttgcacataccacccaggtgttccggtctttcacgatgcattaaagggttggtcttgctgtaagagaagaacaactgatttttctgatttcttaagcattgtaggctgtacaaaaggtagacataatagtgagaagccacctgagccagtcaaacctgaagtcaagactactgagaagaaggagctatgtgaattaaaacccaaatttcaggaacacatcattcaagcccctaagccagtagaagcaataaaaagaccaagcccagatgaaccaatgacaaatttggaattaaaaatatctgcctccctaaaacaagcacttgataaacttaaactgtcatcagggaatgaagaaaataagaaagaagaagacaatgatgaaattaagattgggacctcatgtaagaatggagggtgttcaaagacataccagggtctagagagtctagaagaagtctgtgtatatcattctggagtacctattttccatgaggggatgaaatactggagctgttgtagaagaaaaacttctgattttaatacattcttagcccaagagggctgtacaaaagggaaacacatgtggactaaaaaagatgctgggaaaaaagttgttccatgtagacatgactggcatcagactggaggtgaagttaccatttcagtatatgctaaaaactcacttccagaacttagccgagtagaagcaaatagcacattgttaaatgtgcatattgtatttgaaggagagaaggaatttgatcaaaatgtgaaattatggggtgtgattgatgtaaagcgaagttatgtaactatgactgcaacaaagattgaaatcactatgagaaaagctgaaccgatgcagtgggcaagccttgaactgcctgcagctaaaaagcaggaaaaacaaaaagatgccacaacagattgagtgggagatggaaggaaggctattacattatttccgaatttttaatactgtgtgaagtggtggcttgctgctgtaatcttttgttttgttgttgtgttactgaatgtggcatttcagggttaacattaggttcttaaaagccaaagtcagtttgtctttttgtgcctctcatctttcttttgtgttatgtaagattgattattcatttctccctactggtaggaaccatagttgtgtcctatacttgaagaggctggaaagtagcccataaccataattgcagtatttctttgtatttctctgttaagcaaagaaatattaaggaacattttttttatgtttttgtattattccataattagtaaagcaagatgaaatgtcaaattttaatcagttttttcatggatttgtgttcttacagtacttgaaaatatttaaggaagagatgaagctctgcagttttttctatgtgggatgattacttttttaaggaggattaattctgaggtagtatagtaactaaaggggaatatatgaattgtttaacaaattagaatttgtttacaactacttgaatttttaaattatgtcaaaacttacattacttgccaagcagtatgatgttataggaaacataaataagattacagaggtatcaatttggttaaaattcaccattttataagactaagcaataatcttaacaacctctttcctgaatatttaaatgtgtttgtatggtgttatgactaattgttactgatttagagactaagccctcttaaaacctttagttaaatataaaaagaaattatatatatcttgcctccctgatggaaaactatataaaattgtagacttaaaaggtttgtggaaatacattaggatatcagaaaactaaatatatggagttgctttatgactattacatgttaaataaaaatagcttaattgttttggagtttttttttaaagtcatgaagagcttcacaattctagtgatacaatgttgactatatattgtactttatattaaatataggtaatacagaattagatcgtttggataggttttgagttagtgcagaactcaagaagaaaaattaggaaatattctgaaggccagaactctggaagaacttagaaagtttgggaataaattaaacttatgtagatttaaaattaaaaggggtttatttcccaaaccccttgagtcttttcttttccttggtatttatggaattc

SEQ ID NO: 123945 - DNA, 2003 bp, Homo sapiens
  Payload ID: 4332
  Gene Symbol: CHORDC1
  Gene Name: cysteine and histidine-rich domain (CHORD) containing 1
  Uniprot ID: Q9UHD1
  ENST ID: ENST00000457199
  CDS Start-End: 106-1047
tagccgcctcagtcgtcagaccggtgctagcgacacgggagtggcaaacgcatcctcttgccgttcccggtgtttgggccttgcctgtgacggtgggaaaagaaaatggccttgctgtgctacaaccggggctgcggtcagcgcttcgatcctgagaccaattccgacgatgcttgcacataccacccaggtgttccggtctttcacgatgcattaaagggctgtacaaaaggtagacataatagtgagaagccacctgagccagtcaaacctgaagtcaagactactgagaagaaggagctatgtgaattaaaacccaaatttcaggaacacatcattcaagcccctaagccagtagaagcaataaaaagaccaagcccagatgaaccaatgacaaatttggaattaaaaatatctgcctccctaaaacaagcacttgataaacttaaactgtcatcagggaatgaagaaaataagaaagaagaagacaatgatgaaattaagattgggacctcatgtaagaatggagggtgttcaaagacataccagggtctagagagtctagaagaagtctgtgtatatcattctggagtacctattttccatgaggggatgaaatactggagctgttgtagaagaaaaacttctgattttaatacattcttagcccaagagggctgtacaaaagggaaacacatgtggactaaaaaagatgctgggaaaaaagttgttccatgtagacatgactggcatcagactggaggtgaagttaccatttcagtatatgctaaaaactcacttccagaacttagccgagtagaagcaaatagcacattgttaaatgtgcatattgtatttgaaggagagaaggaatttgatcaaaatgtgaaattatggggtgtgattgatgtaaagcgaagttatgtaactatgactgcaacaaagattgaaatcactatgagaaaagctgaaccgatgcagtgggcaagccttgaactgcctgcagctaaaaagcaggaaaaacaaaaagatgccacaacagattgagtgggagatggaaggaaggctattacattatttccgaatttttaatactgtgtgaagtggtggcttgctgctgtaatcttttgttttgttgttgtgttactgaatgtggcatttcagggttaacattaggttcttaaaagccaaagtcagtttgtctttttgtgcctctcatctttcttttgtgttatgtaagattgattattcatttctccctactggtaggaaccatagttgtgtcctatacttgaagaggctggaaagtagcccataaccataattgcagtatttctttgtatttctctgttaagcaaagaaatattaaggaacattttttttatgtttttgtattattccataattagtaaagcaagatgaaatgtcaaattttaatcagttttttcatggatttgtgttcttacagtacttgaaaatatttaaggaagagatgaagctctgcagttttttctatgtgggatgattacttttttaaggaggattaattctgaggtagtatagtaactaaaggggaatatatgaattgtttaacaaattagaatttgtttacaactacttgaatttttaaattatgtcaaaacttacattacttgccaagcagtatgatgttataggaaacataaataagattacagaggtatcaatttggttaaaattcaccattttataagactaagcaataatcttaacaacctctttcctgaatatttaaatgtgtttgtatggtgttatgactaattgttactgatttagagactaagccctcttaaaacctttagttaaatataaaaagaaattatatatatcttgcctccctgatggaaaactatataaaattgtagacttaaaaggtttgtggaaatacattaggatatcagaaaactaaatatatggagttgctttatgactattacatgttaaataaaaatagcttaattgtt

SEQ ID NO: 123946 - DNA, 564 bp, Homo sapiens
  Payload ID: 4332
  Gene Symbol: CHORDC1
  Gene Name: cysteine and histidine-rich domain (CHORD) containing 1
  ENST ID: ENST00000530765
  CDS Start-End: 124-474
atcgtttccggaagccggtagccgcctcagtcgtcagaccggtgctagcgacacgggagtggcaaacgcatcctcttgccgttcccggtgtttgggccttgcctgtgacggtgggaaaagaaaatggccttgctgtgctacaaccggggctgcggtcagcgcttcgatcctgagaccaattccgacgatgcttgcacataccacccaggtgttccggtctttcacgatgcattaaagggttggtcttgctgtaagagaagaacaactgatttttctgatttcttaagcattgtaggctgtacaaaaggtagacataatagtgagaagccacctgagccagtcaaacctgaagtcaagactactgagaagaaggagctatgtgaattaaaacccaaatttcaggaacacatcattcaagcccctaagccagtagaagcaataaaaagaccaaggtcttcttcgtgctacacttgagtactaaattgttttagaagcaaactacaggacttaaaaaaaggtgatttttttttttttttttggctgcaagtaggcacttattgtaat

SEQ ID NO: 123947 - DNA, 809 bp, Homo sapiens
  Payload ID: 4332
  Gene Symbol: CHORDC1
  Gene Name: cysteine and histidine-rich domain (CHORD) containing 1
  ENST ID: ENST00000529402
  CDS Start-End: 119-472
ttccggaagccggtagccgcctcagtcgtcagaccggtgctagcgacacgggagtggcaaacgcatcctcttgccgttcccggtgtttgggccttgcctgtgacggtgggaaaagaaaatggccttgctgtgctacaaccggggctgcggtcagcgcttcgatcctgagaccaattccgacggtaagaggaacgcgccgccagccctccctcccctccacctcatcagcaggggaggccctttgggccggagggtgtccgcggatctcctgcagccgtcctcgcgcggccccaggtccatgcccctcctgggcctcccttggctgcccgcgcagcccgccggccgcccctctgttgcgccgcgttcccttggcgagcgcccggccccggcgcctgactgtcctctgccactgcggagagagacgctcccatggatccacgtgtttcccccgtcgtccccgcactccttttaagtcgcctggaatttagaacgaacacgtttctcctctggccctccagtctctggggaagcaaaaattaacgagatgcttgcacataccacccaggtgttccggtctttcacgatgcattaaagggttggtcttgctgtaagagaagaacaactgatttttctgatttcttaagcattgtaggctgtacaaaaggtagacataatagtgagaagccacctgagccagtcaaacctgaagtcaagactactgagaagaaggagctatgtgaattaaaacccaaatttcaggaacacatcattcaagcccctaagccagtagaagcaataaaaagaccaag

SEQ ID NO: 123948 - DNA, 575 bp, Homo sapiens
  Payload ID: 4332
  Gene Symbol: CHORDC1
  Gene Name: cysteine and histidine-rich domain (CHORD) containing 1
  ENST ID: ENST00000533062
  CDS Start-End: 118-237
tccggaagccggtagccgcctcagtcgtcagaccggtgctagcgacacgggagtggcaaacgcatcctcttgccgttcccggtgtttgggccttgcctgtgacggtgggaaaagaaaatggccttgctgtgctacaaccggggctgcggtcagcgcttcgatcctgagaccaattccgacgatgcttgcacataccacccaggtgttccggtctttcacgatgcattaaagtcctagactttccaagattattggatttcacagtccagaagatttcagacaaaatgcgtatacatcaatacagggatactagttgaccaaggttggtcttgctgtaagagaagaacaactgatttttctgatttcttaagcattgtaggctgtacaaaaggtagacataatagtgagaagccacctgagccagtcaaacctgaagtcaagactactgagaagaaggagctatgtgaattaaaacccaaatttcaggaacacatcattcaagcccctaagccagtagaagcaataaaaagaccaaggtatactttatacagttacatatttttgtcacacttgaa

SEQ ID NO: 123949 - DNA, 1698 bp, Homo sapiens
  Payload ID: 4332
  Gene Symbol: CHORDC1
  Gene Name: cysteine and histidine-rich domain (CHORD) containing 1
  ENST ID: ENST00000529987
  CDS Start-End: 303-737
cctcaaaagaagaagaaatgtgtcatatatcaatttggggatataagcaaatcctagtcacagtcgttttctaaaaagtattgttttctggaaaaacctagtttttaagaatgatgccacagcgaagttctattttaactttttaatttgatttttttttctttgttacagaagaagacaatgatgaaattaagattgggacctcatgtaagaatggagggtgttcaaagacataccagggtctagagagtctagaagaagtctgtgtatatcattctggagtacctattttccatgaggggatgaaatactggagctgttgtagaagaaaaacttctgattttaatacattcttagcccaagagggctgtacaaaagggaaacacatgtggactaaaaaagatgctgggaaaaaagttgttccatgtagacatgactggcatcagactggaggtgaagttaccatttcagtatatgctaaaaactcacttccagaacttagccgagtagaagcaaatagcacattgttaaatgtgcatattgtatttgaaggagagaaggaatttgatcaaaatgtgaaattatggggtgtgattgatgtaaagcgaagttatgtaactatgactgcaacaaagattgaaatcactatgagaaaagctgaaccgatgcagtgggcaagccttgaactgcctgcagctaaaaagcaggaaaaacaaaaagatgccacaacagattgagtgggagatggaaggaaggctattacattatttccgaatttttaatactgtgtgaagtggtggcttgctgctgtaatcttttgttttgttgttgtgttactgaatgtggcatttcagggttaacattaggttcttaaaagccaaagtcagtttgtctttttgtgcctctcatctttcttttgtgttatgtaagattgattattcatttctccctactggtaggaaccatagttgtgtcctatacttgaagaggctggaaagtagcccataaccataattgcagtatttctttgtatttctctgttaagcaaagaaatattaaggaacattttttttatgtttttgtattattccataattagtaaagcaagatgaaatgtcaaattttaatcagttttttcatggatttgtgttcttacagtacttgaaaatatttaaggaagagatgaagctctgcagttttttctatgtgggatgattacttttttaaggaggattaattctgaggtagtatagtaactaaaggggaatatatgaattgtttaacaaattagaatttgtttacaactacttgaatttttaaattatgtcaaaacttacattacttgccaagcagtatgatgttataggaaacataaataagattacagaggtatcaatttggttaaaattcaccattttataagactaagcaataatcttaacaacctctttcctgaatatttaaatgtgtttgtatggtgttatgactaattgttactgatttagagactaagccctcttaaaacctttagttaaatataaaaagaaattatatatatcttgcctccctgatggaaaactatataaaattgtagacttaaaaggtttgtggaaatacattaggatatcagaaaactaaatatatggagttgctttatgactattacatgttaaataaaaatagcttaattgttttgga

SEQ ID NO: 123950 - DNA, 566 bp, Homo sapiens
  Payload ID: 4332
  Gene Symbol: CHORDC1
  Gene Name: cysteine and histidine-rich domain (CHORD) containing 1
  ENST ID: ENST00000533772
  CDS Start-End: 96-458
agtcgtcagaccggtgctagcgacacgggagtggcaaacgcatcctcttgccgttcccggtgtttgggccttgcctgtgacggtgggaaaagaaaatggccttgctgtgctacaaccggggctgcggtcagcgcttcgatcctgagaccaattccgacgatgcttgcacataccacccaggtgttccggtctttcacgatgcattaaagggttggtcttgctgtaagagaagaacaactgatttttctgatttcttaagcattgtaggctgtacaaaaggtagacataatagtgagaagccacctgagccagtcaaacctgaagtcaagactactgagaagaaggagctatgtgaattaaaacccaaatttcaggaacacatcattcaagcccctaagccagtagaagcaataaaaagaccaaggtttcaaaattctccagcccagatgaaccaatgacaaatttggaattaaaaatatctgcctccctaaaacaagcacttgataaacttaaactgtcatcagggaatgaagaaaataagaaagaagacaatgatgaaattaaga

SEQ ID NO: 123951 - DNA, 4805 bp, Homo sapiens
  Payload ID: 4332
  Gene Symbol: CHORDC1
  Gene Name: cysteine and histidine-rich domain (CHORD) containing 1
  ENST ID: ENST00000529726
  CDS Start-End: 3915-4349
agtgcgtgtagaatgaatgatagaatttgaaagtacagaaagtacagatggttccgaacttaccatggtgtaacttaagatttttttgacttaacaatggtattatcaggctataaccacattgtaagcaaaggagcatctgcctgtattagcaggatttgctaatggattcgatgtgaagggaattcaagcatctgggtgattggtgacaccattaaccaacaaggtgaaaatggggtgggggcaggtttatactttttcctcatgttaaattttagatcacttaaggaatggagatacaattgtatttacatgtatatgaggtagaagtagtagataaaagggaattagtaattactggattggggaaggcagtgcaaatggtagggtaatagaggaagatcaaggagaaggtatcagatgtgttttgaaaagtgaatgacagggaaaacagagaaagggtatttcaagcgtaagtaatagcacaagtatagagaaaattatgtaatggtacaaatttgctgctgtggaattgagattaatagagataagtagacctggccagatcctaaaagggtttagtgatgcagggaagttagattgtacgttagagtgtggaggccattgaaattgaagaattttttagtctttttcattgaaatataacattgaagtttgttaaaggatatacaaatataaatttgtagctcaagggattttcacaaaattaaacacaccagcaatgcagagcactccttatgtgttttctcattcattatcttcctcaaatgtttttctgtcagtcaacatatgttttttctgtttctgagtttaatgtaaaaataaccatagaatatgtacttgtttttgtcgtcttctgcataataatgcttgttttatttatctttgttgcatgtagctttagttttgtttttttatttctttaaggtatgtcattatttgaatgtgccacaactaatttctactttatattgtcctttaattttaaaaaattgtttttaataatgctattatgaacattctttttgagatggagtttcactcttgtaacccaccctggagtacaatggtaggctctcggctcactacaacctccgcctcccgggttcaagcgattcttctgtttcagcctcctgagtagctgggtttacaggtgcccaccacgcctgactaatttttgtatttttactagagacaaggtttcaccatgttggccaggctggtctcaaactcctgaacctcaggtgatccacccgcctcggcctcccaaagtgctggaattacaggcgtgaagccaccgcagccggcctattatgaacattcttgtgcatgacttttgtgacacatatacacatttccatttctagtattttggatttttttttttaaattttggcatatgtgcattatacttatcagttagttcagcatccctaatctgaaatgctccaatgagcattttctttaactgtcatgttggctctcaaaaagttaacagatttttggagcatttgagattttggattaggtatgcccacctgtatatctttagcattaacagatacttccacatagttttccaaggtggttgtatttgtttacgtttctaccagcagtatgtgaggctagttcaacttgtcctatggtttcttaacattttgttatacgagttttttttgtttttttttttttttttgtattttaaccattctagtgtgtgtatagtgttttgtcatggttttgatttgtacttccctaatgatgactgcttttttgtatgtttattagccatttgtatatcctcttgtgaagtgtgcagaatcttttacctatctctaatgtctcttgcttaccagtttgtaagaattctttatatattttagctgtgactcttatcagaaattctatgctttttcactgtcttaatgacgactttgataaactttttatcaaattgctttttaacaaaatccaatttgtccatcattttgtttatgactagtgctttccatgttctatttaagaaatcgttgcttacttcagggctgtgagtgttttctcatatggaggcacatttaaatatgtaaatgacctggaactgattattgtataaggtgtgacatggatgtaattaaagaactttaaacaaaagggtgatagtaatttgataattagtagaaaatagaagtcgaaggctgagaaatagtagaaacctgttagtatagtctgattgcttaaaatctgctagcttatgaggaagattaacaaattaatatattcaagtcaaattgatgagatttcattatagactgcctatgggtggagggagaggagatgctgaagaggaacgaatggattttgctttgagaaactgagtctgtacggtgccatcaaataatatggggaaaagaatggactgtgggggcaatagcattaagtttagtagatgctaacatactgagttttatgttcttgtgaaatatcttaaggagaaatacacatctaatactgtactttggatttataaaagataaacacagaattttattttctgtttgtaggtagtgctataaatacaaaaatagaaaatatactactggctacatccatgttttattaacataattttttgtgaattcatctgtagagcctccatctacagcagcaatggggcccggatcttccagacaaaccctggatatatatataggtctgcagctcattttaccctttatagggataagaaatcaccatcactctagaacttccagaattgcttattagatttctcatattatttgacaatacttacatggagtttactgtacacataagtcatgcagtaactgtatttttattgagagtattaatcccttggtttcaacattgtttttgaaattagtaactaagtaagtacttgaatatgattggatgggatctcatactcaaaaggctgaaagcatcttaatatgactttctcaaaggaacctaaaacttaaccaagtccaaaagggaatcatttttcattttttaacagaatggcgtgggatggatttatgaattttctaggtaattgtcatttaagtattttgcaaagttcgtagaggtcaccaatactgcaaatatgtatgagatgtaactgtaagatacgcagctaattttttttctctttgtttcctttttagacataccagggtctagagagtctagaagaagtctgtgtatatcattctggagtacctattttccatgaggggtaacttatgcatgacttattaaaatagtttatggtagaatttagaaagttaaacctttctgtctttaaacattgtttgccatgcagtgttattaggcattttacttacattgccattaacatcttcacaatagcctacacaaacacaggggtttgtatgttgtgtgtttatacatgagaaaacagaaacaaggttacagttcttaagtggtcattgtgatataaactgcctgtttttcttcatattctgtatttaaaagtgatgctatttgggctaaatgttttgtttgaaggactgtcctacacattgcagggcatttagaattttgggccctggggcactaagacaacattatcccaagacgacccatacttttccgcatcctgcagttgagagcctctcttctgtattatgctctagtttatagaaatgcagcactgtgtaaaaatcttccactctgtttccacattcttcctgatatactgtacattcatttttagtaacttagacacttgtaaaatgctagagtttgtacacttactggcttattaaaaatcagatttatccctaaaatacttgtggatttaattggttgtgagattttatttctgaagtttttctgtgataatttaaaggatgaaatactggagctgttgtagaagaaaaacttctgattttaatacattcttagcccaagagggctgtacaaaagggaaacacatgtggactaaaaaagatgctgggaaaaaagttgttccatgtagacatgactggcatcagactggaggtgaagttaccatttcagtatatgctaaaaactcacttccagaacttagccgagtagaagcaaatagcacattgttaaatgtgcatattgtatttgaaggagagaaggaatttgatcaaaatgtgaaattatggggtgtgattgatgtaaagcgaagttatgtaactatgactgcaacaaagattgaaatcactatgagaaaagctgaaccgatgcagtgggcaagccttgaactgcctgcagctaaaaagcaggaaaaacaaaaagatgccacaacagattgagtgggagatggaaggaaggctattacattatttccgaatttttaatactgtgtgaagtggtggcttgctgctgtaatcttttgttttgttgttgtgttactgaatgtggcatttcagggttaacattaggttcttaaaagccaaagtcagtttgtctttttgtgcctctcatctttcttttgtgttatgtaagattgattattcatttctccctactggtaggaaccatagttgtgtcctatacttgaagaggctggaaagtagcccataaccataattgcagtatttctttgtatttctctgttaagcaaagaaatattaaggaacattttttttatgtttttgtattattccataattagtaaagcaagatgaaatgtcaaattttaatcagttttttcatggatttgtgttcttacagtacttgaaaatatttaaggaagagatgaagctctg

SEQ ID NO: 123952 - DNA, 1136 bp, Homo sapiens
  Payload ID: 4332
  Gene Symbol: CHORDC1
  Gene Name: cysteine and histidine-rich domain (CHORD) containing 1
  ENST ID: ENST00000525317
  CDS Start-End: 77-631
gcgacacgggagtggcaaacgcatcctcttgccgttcccggtgtttgggccttgcctgtgacggtgggaaaagaaaatggccttgctgtgctacaaccggggctgcggtcagcgcttcgatcctgagaccaattccgacgatgcttgcacataccacccaggtgttccggtctttcacgatgcattaaagggttggtcttgctgtaagagaagaacaactgatttttctgatttcttaagcattgtaggctgtacaaaaggtagacataatagtgagaagccacctgagccagtcaaacctgaagtcaagactactgagaagaaggagctatgtgaattaaaacccaaatttcaggaacacatcattcaagcccctaagccagtagaagcaataaaaagaccaagcccagatgaaccaatgacaaatttggaattaaaaatatctgcctccctaaaacaagcacttgataaacttaaactgtcatcagggaatgaagaaaataagaaagaagaagacaatgatgaaattaagattgggacctcatgtaagaatggagggtgttcaaagagcctccatctacagcagcaatggggcccggatcttccagacaaaccctggatatatatatagacataccagggtctagagagtctagaagaagtctgtgtatatcattctggagtacctattttccatgaggggatgaaatactggagctgttgtagaagaaaaacttctgattttaatacattcttagcccaagagggctgtacaaaagggaaacacatgtggactaaaaaagatgctgggaaaaaagttgttccatgtagacatgactggcatcagactggaggtgaagttaccatttcagtatatgctaaaaactcacttccagaacttagccgagtagaagcaaatagcacattgttaaatgtgcatattgtatttgaaggagagaaggaatttgatcaaaatgtgaaattatggggtgtgattgatgtaaagcgaagttatgtaactatgactgcaacaaagattgaaatcactatgagaaaagctgaaccgatgcagtgggcaagccttgaactgcctgcagctaaaaagcaggaaaaacaaaaagatgccacaacagatt

SEQ ID NO: 123953 - DNA, 2070 bp, Homo sapiens
  Payload ID: 4333
  Gene Symbol: CCBL2
  Gene Name: cysteine conjugate-beta lyase 2
  Uniprot ID: Q6YP21
  ENST ID: ENST00000260508
  CDS Start-End: 339-1703
cgcgatcgcggcggaccccaccgtcatcgcgcgccgtgagtcacactccacagccaatccctggccacatccgggctcgcccccgccccgcccccttgttcccgcaagcccggaactgcccaaatcccgcccctcccctcccaaaaaaacacccctcatccagtctcttccagcctagagatcctggcctacccctccgccaaagcgcgcactgagtgcaaaccccagagtcaatccctgtcccggctccgccccccgcgtccgaatcccgcccagccgggccctcaagcccagtcgggactcgagcctagggaggcgaggttcccgcaccggatagcatgtttttggcccagaggagcctctgctctcttagcggtagagcaaaattcctgaagacaatttcttcttccaaaatcctcggattctctacttctgctaaaatgtcactgaaattcacaaatgcaaaacggattgaaggacttgatagtaatgtgtggattgaatttaccaaattggctgcagacccttctgttgtgaatcttggccaaggctttccagatatatcccctcctacatatgtaaaagaagaattatcaaagattgcagcaatcgatagcctgaatcagtatacacgaggctttggccatccatcacttgtgaaagctctgtcctatctgtatgaaaagctttatcaaaagcaaattgattcaaataaagaaatccttgtgacagtaggagcatatggatctctttttaacaccattcaagcattaattgatgagggagatgaagtcatactaatagtgcctttctatgactgctatgagcccatggtgagaatggctggagcaacacctgtttttattcccctgagatctaaacctgtttatggaaaaagatggtctagttctgactggacattagatcctcaagaactggaaagtaaatttaattccaaaaccaaagctattatactaaatactccacataacccacttggcaaggtgtataacagagaggaactgcaagtaattgctgacctttgcatcaaatatgacacactctgcatcagcgatgaggtttatgaatggcttgtatattctggaaataagcacttaaaaatagctacttttccaggtatgtgggagagaacaataacaataggaagtgctggaaagactttcagtgtaactggctggaagcttggctggtccattggtccaaatcatttgataaaacatttacagacagttcaacaaaacacgatttatacttgtgcaactcctttacaggaagccttggctcaagctttctggattgacatcaagcgcatggatgacccagaatgttactttaattctttgccaaaagagttagaagtaaaaagagatcggatggtacgtttacttgaaagtgttggcctaaaacccatagttcctgatggaggatacttcatcatcgctgatgtgtctttgctagatccagacctctctgatatgaagaataatgagccttatgactataagtttgtgaaatggatgactaaacataagaaactatcagccatccccgtttcagcattctgtaactcagagactaaatcacagtttgagaagtttgtgcgtttttgcttcattaaaaaagacagcacactggatgctgctgaagaaatcatcaaggcatggagtgtacagaagtcttgatttgtgcagaatggattaatgtttctgttagatgacctagtatggaattgttacttagtgctgccacctgctggatgttaaaaggtatttcagtacaactggaatttaaatatttccattgtttttccaaagcagttaacccaactcctaacaacattttcgggggatctgaccttttttttccagttgaaatgtattaacacaccttccacaatcattttataagagtcagcataacatagtggataagaaatgtgagatgtttaacctctcagtaactcggttctctcattataaaataggaataaaatcagtacctgtttcatatgaaggtcgtttctgagaattaaatggactaatgtatgca

SEQ ID NO: 123954 - DNA, 1263 bp, Homo sapiens
  Payload ID: 4333
  Gene Symbol: CCBL2
  Gene Name: cysteine conjugate-beta lyase 2
  ENST ID: ENST00000370485
  CDS Start-End: 66-590
aagcattaattgatgagggagatgaagtcatactaatagtgcctttctatgactgctatgagcccatggtgagaatggctggagcaacacctgtttttattcccctgagatctaaacctgtttatggaaaaagatggtctagttctgactggacattagatcctcaagaactggaaagtaaatttaattccaaaaccaaagctattatactaaatactccacataacccacttggcaaggtgtataacagagaggaactgcaagtaattgctgacctttgcatcaaatatgacacactctgcatcagcgatgaggtttatgaatggcttgtatattctggaaataagcacttaaaaatagctacttttccaggtatgtgggagagaacaataacaataggaagtgctggaaagactttcagtgtaactggctggaagcttggctggtccattggtccaaatcatttgataaaacatttacagacagttcaacaaaacacgatttatacttgtgcaactcctttacaggaagccttggctcaagctttctggattgacatcaagcgcatggatgacccagaaactttaattctttgccaaaagagttagaagtaaaaagagatcggatggtacgtttacttgaaagtgttggcctaaaacccatagttcctgatggaggatacttcatcatcgctgatgtgtctttgctagatccagacctctctgatatgaagaataatgagccttatgactataagtttgtgaaatggatgactaaacataagaaactatcagccatccccgtttcagcattctgtaactcagagactaaatcacagtttgagaagtttgtgcgtttttgcttcattaaaaaagacagcacactggatgctgctgaagaaatcatcaaggcatggagtgtacagaagtcttgatttgtgcagaatggattaatgtttctgttagatgacctagtatggaattgttacttagtgctgccacctgctggatgttaaaaggtatttcagtacaactggaatttaaatatttccattgtttttccaaagcagttaacccaactcctaacaacattttcgggggatctgaccttttttttccagttgaaatgtattaacacaccttccacaatcattttataagagtcagcataacatagtggataagaaatgtgagatgtttaacctctcagtaactcggttctctcattataaaataggaataaaatcagtacctgtttcatatg

SEQ ID NO: 123955 - DNA, 1019 bp, Homo sapiens
  Payload ID: 4333
  Gene Symbol: CCBL2
  Gene Name: cysteine conjugate-beta lyase 2
  ENST ID: ENST00000370486
  CDS Start-End: 233-1019
ccaccccttccctcctccatttccatccattccgcgatcgcggcggaccccaccgtcatcgcgcgcccctagagatcctggcctacccctccgccaaagcgcgcactgagtgcaaaccccagagtcaatccctgtcccggctccgccccccgcgtccgaatcccgcccagccgggccctcaagcccagtcgggactcgagcctagggaggcgaggttcccgcaccggatagcatgtttttggcccagaggagcctctgctctcttagcggtagagcaaaattcctgaagacaatttcttcttccaaaatcctcggattctctacttctgctaaaatgtcactgaaattcacaaatgcaaaacggattgaaggacttgatagtaatgtgtggattgaatttaccaaattggctgcagacccttctgttgtgaatcttggccaaggctttccagatatatcccctcctacatatgtaaaagaagaattatcaaagattgcagcaatcgatagcctgaatcagtatacacgaggctttggccatccatcacttgtgaaagctctgtcctatctgtatgaaaagctttatcaaaagcaaattgattcaaataaagaaatccttgtgacagtaggagcatatggatctctttttaacaccattcaagcattaattgatgagggagatgaagtcatactaatagtgcctttctatgactgctatgagcccatggtgagaatggctggagcaacacctgtttttattcccctgagatctaaacctgtttatggaaaaagatggtctagttctgactggacattagatcctcaagaactggaaagtaaatttaattccaaaaccaaagctattatactaaatactccacataacccacttggcaaggtgtataacagagaggaactgcaagtaattgctgacctttgcatcaaatatgacacactctgcatcagcgatgaggtttatgaatggcttgtatattctggaaataagcacttaaaaatag

SEQ ID NO: 123956 - DNA, 1868 bp, Homo sapiens
  Payload ID: 4333
  Gene Symbol: CCBL2
  Gene Name: cysteine conjugate-beta lyase 2
  Uniprot ID: Q6YP21
  ENST ID: ENST00000370491
  CDS Start-End: 196-1458
aaaacacccctcatccagtctcttccagcctagagatcctggcctacccctccgccaaagcgcgcactgagtgcaaaccccagagtcaatccctgtcccggctccgccccccgcgtccgaatcccgcccagccgggccctcaagcccagtcgggactcgagcctagggaggcgaggttcccgcaccggatagaaaatgtcactgaaattcacaaatgcaaaacggattgaaggacttgatagtaatgtgtggattgaatttaccaaattggctgcagacccttctgttgtgaatcttggccaaggctttccagatatatcccctcctacatatgtaaaagaagaattatcaaagattgcagcaatcgatagcctgaatcagtatacacgaggctttggccatccatcacttgtgaaagctctgtcctatctgtatgaaaagctttatcaaaagcaaattgattcaaataaagaaatccttgtgacagtaggagcatatggatctctttttaacaccattcaagcattaattgatgagggagatgaagtcatactaatagtgcctttctatgactgctatgagcccatggtgagaatggctggagcaacacctgtttttattcccctgagatctaaacctgtttatggaaaaagatggtctagttctgactggacattagatcctcaagaactggaaagtaaatttaattccaaaaccaaagctattatactaaatactccacataacccacttggcaaggtgtataacagagaggaactgcaagtaattgctgacctttgcatcaaatatgacacactctgcatcagcgatgaggtttatgaatggcttgtatattctggaaataagcacttaaaaatagctacttttccaggtatgtgggagagaacaataacaataggaagtgctggaaagactttcagtgtaactggctggaagcttggctggtccattggtccaaatcatttgataaaacatttacagacagttcaacaaaacacgatttatacttgtgcaactcctttacaggaagccttggctcaagctttctggattgacatcaagcgcatggatgacccagaatgttactttaattctttgccaaaagagttagaagtaaaaagagatcggatggtacgtttacttgaaagtgttggcctaaaacccatagttcctgatggaggatacttcatcatcgctgatgtgtctttgctagatccagacctctctgatatgaagaataatgagccttatgactataagtttgtgaaatggatgactaaacataagaaactatcagccatccccgtttcagcattctgtaactcagagactaaatcacagtttgagaagtttgtgcgtttttgcttcattaaaaaagacagcacactggatgctgctgaagaaatcatcaaggcatggagtgtacagaagtcttgatttgtgcagaatggattaatgtttctgttagatgacctagtatggaattgttacttagtgctgccacctgctggatgttaaaaggtatttcagtacaactggaatttaaatatttccattgtttttccaaagcagttaacccaactcctaacaacattttcgggggatctgaccttttttttccagttgaaatgtattaacacaccttccacaatcattttataagagtcagcataacatagtggataagaaatgtgagatgtttaacctctcagtaactcggttctctcattataaaataggaataaaatcagtacctgtttcatatgaaggtcgtttctgagaattaaatggactaatgtatgcaaaaagcctggcaaacaataaacactcatctgactttagccggt

SEQ ID NO: 123957 - DNA, 1903 bp, Homo sapiens
  Payload ID: 4334
  Gene Symbol: CCBL1
  Gene Name: cysteine conjugate-beta lyase, cytoplasmic
  Uniprot ID: Q16773
  ENST ID: ENST00000302586
  CDS Start-End: 164-1432
ttctagcggcgctttctcccgctctcgcctccgcgctagcgccctgctgcttcggggcggaagtagcggagccgggctcggcccccttaaagggacagggactgctgcaacctacggggtgtacttgggaacgaggggtgaagcggcccaggtgaggctcgccatggccaaacagctgcaggcccgaaggctagacgggatcgactacaacccctgggtggagtttgtgaaactggccagtgagcatgacgtcgtgaacttgggccagggcttcccggatttcccaccaccagactttgccgtggaagcctttcagcacgctgtcagtggagacttcatgcttaaccagtacaccaagacatttggttacccaccactgacgaagatcctggcaagtttctttggggagctgctgggtcaggagatagacccgctcaggaatgtgctggtgactgttggtggctatggggccctgttcacagccttccaggccctggtggacgaaggagacgaggtcatcatcatcgaacccttttttgactgctacgagcccatgacaatgatggcagggggtcgtcctgtgtttgtgtccctgaagccgggtcccatccagaatggagaactgggttccagcagcaactggcagctggaccccatggagctggccggcaaattcacatcacgcaccaaagccctggtcctcaacacccccaacaaccccctgggcaaggtgttctccagggaagagctggagctggtggccagcctttgccagcagcatgacgtggtgtgtatcactgatgaagtctaccagtggatggtctacgacgggcaccagcacatcagcattgccagcctccctggcatgtgggaacggaccctgaccatcggcagcgccggcaagaccttcagcgccactggctggaaggtgggctgggtcctgggtccagatcacatcatgaagcacctgcggaccgtgcaccagaactccgtcttccactgccccacgcagagccaggctgcagtagccgagagctttgaacgggagcagctgctcttccgccaacccagcagctactttgtgcagttcccgcaggccatgcagcgctgccgtgaccacatgatacgtagcctacagtcagtgggcctgaagcccatcatccctcagggcagctacttcctcatcacagacatctcagacttcaagaggaagatgcctgacttgcctggagctgtggatgagccctatgacagacgcttcgtcaagtggatgatcaagaacaagggcttggtggccatccctgtctccatcttctatagtgtgccacatcagaagcactttgaccactatatccgcttctgttttgtgaaggatgaagccacgctccaggccatggacgagaagctgcggaagtggaaggtggaactctagccctgaagtcacgccttggccctgacatccccacatgcccgcagagatcctctttgagtgtctgtctttgtccaggtttcagacatttctaggttggggaagatgctattgggaaacctcttctccgtgacacagaatgttctgggtgggagccgcccttcttcatcttagagaaccaagtgcctcctgtctgaaaggtgagggtggcctgacctgggcctctccctgcccctccataggtgggtttgtagggtcttgtgttgcttctggtctctccaggcttggctgagacggacggtagacttccaccatgtaccgatcacatcccagctctgcatggcccctgctaaggctcaggtataacctcaccttccctggctcatcttggccttggggagttgcctttaggcttgagtcctcaagcctctccttttcgtccataataaaatgtttaagttattaagatcctta

SEQ ID NO: 123958 - DNA, 1623 bp, Homo sapiens
  Payload ID: 4334
  Gene Symbol: CCBL1
  Gene Name: cysteine conjugate-beta lyase, cytoplasmic
  Uniprot ID: Q16773
  ENST ID: ENST00000320665
  CDS Start-End: 40-1158
ttgggaacgaggggtgaagcggcccaggtgaggctcgccatggccaaacagctgcaggcccgaaggctagacgggatcgactacaacccctgggtggagtttgtgaaactggccagtgagcatgacgtcgtgaacttgggccagggcttcccggatttcccaccaccagactttgccgtggaagcctttcagcacgctgtcagtggagacttcatgcttaaccagtacaccaagacatttgtcatcatcatcgaacccttttttgactgctacgagcccatgacaatgatggcagggggtcgtcctgtgtttgtgtccctgaagccgggtcccatccagaatggagaactgggttccagcagcaactggcagctggaccccatggagctggccggcaaattcacatcacgcaccaaagccctggtcctcaacacccccaacaaccccctgggcaaggtgttctccagggaagagctggagctggtggccagcctttgccagcagcatgacgtggtgtgtatcactgatgaagtctaccagtggatggtctacgacgggcaccagcacatcagcattgccagcctccctggcatgtgggaacggaccctgaccatcggcagcgccggcaagaccttcagcgccactggctggaaggtgggctgggtcctgggtccagatcacatcatgaagcacctgcggaccgtgcaccagaactccgtcttccactgccccacgcagagccaggctgcagtagccgagagctttgaacgggagcagctgctcttccgccaacccagcagctactttgtgcagttcccgcaggccatgcagcgctgccgtgaccacatgatacgtagcctacagtcagtgggcctgaagcccatcatccctcagggcagctacttcctcatcacagacatctcagacttcaagaggaagatgcctgacttgcctggagctgtggatgagccctatgacagacgcttcgtcaagtggatgatcaagaacaagggcttggtggccatccctgtctccatcttctatagtgtgccacatcagaagcactttgaccactatatccgcttctgttttgtgaaggatgaagccacgctccaggccatggacgagaagctgcggaagtggaaggtggaactctagccctgaagtcacgccttggccctgacatccccacatgcccgcagagatcctctttgagtgtctgtctttgtccaggtttcagacatttctaggttggggaagatgctattgggaaacctcttctccgtgacacagaatgttctgggtgggagccgcccttcttcatcttagagaaccaagtgcctcctgtctgaaaggtgagggtggcctgacctgggcctctccctgcccctccataggtgggtttgtagggtcttgtgttgcttctggtctctccaggcttggctgagacggacggtagacttccaccatgtaccgatcacatcccagctctgcatggcccctgctaaggctcaggtataacctcaccttccctggctcatcttggccttggggagttgcctttaggcttgagtcctcaagcctctccttttcgtccataataaaatgtttaagttattaaga

SEQ ID NO: 123959 - DNA, 847 bp, Homo sapiens
  Payload ID: 4334
  Gene Symbol: CCBL1
  Gene Name: cysteine conjugate-beta lyase, cytoplasmic
  ENST ID: ENST00000451800
  CDS Start-End: 95-847
cacaggggtgcctgggagggggctcgcgcgccgcggagccggcgagaaggtggtgccccggagactccgggcactggggagcccagagctcgccatggccaaacagctgcaggcccgaaggctagacgggatcgactacaacccctgggtggagtttgtgaaactggccagtgagcatgacgtcgtgaacttgggccagggcttcccggatttcccaccaccagactttgccgtggaagcctttcagcacgctgtcagtggagacttcatgcttaaccagtacaccaagacatttggttacccaccactgacgaagatcctggcaagtttctttggggagctgctgggtcaggagatagacccgctcaggaatgtgctggtgactgttggtggctatggggccctgttcacagccttccaggccctggtggacgaaggagacgaggtcatcatcatcgaacccttttttgactgctacgagcccatgacaatgatggcagggggtcgtcctgtgtttgtgtccctgaagccgggtcccatccagaatggagaactgggttccagcagcaactggcagctggaccccatggagctggccggcaaattcacatcacgcaccaaagccctggtcctcaacacccccaacaaccccctgggcaaggtgttctccagggaagagctggagctggtggccagcctttgccagcagcatgacgtggtgtgtatcactgatgaagtctaccagtggatggtctacgacgggcaccagcacatcagcattgccagcctccctggcatgtgggaacggaccctgaccatcggcagcgccggcaagaccttcagcgcc

SEQ ID NO: 123960 - DNA, 477 bp, Homo sapiens
  Payload ID: 4334
  Gene Symbol: CCBL1
  Gene Name: cysteine conjugate-beta lyase, cytoplasmic
  ENST ID: ENST00000427720
  CDS Start-End: 1-477
gccatggccaaacagctgcaggcccgaaggctagacgggatcgactacaacccctgggtggagtttgtgaaactggccagtgagcatgacgtcgtgaacttgggccagggcttcccggatttcccaccaccagactttgccgtggaagcctttcagcacgctgtcagtggagacttcatgcttaaccagtacaccaagacatttgtctcactctgttatccaggctggagtgcaatggtgcgatcatggtccactgcagccttgaccctgccagtctcaagtggtcctcccacctcagcctctggagtaactgggactacaggctggtctcagagctggttggaaagttccttctttgatccaaaaaaaaaaaaaatcatttggggttacccaccactgacgaagatcctggcaagtttctttggggagctgctgggtcaggagatagacccgctcaggaatgtgctggtgactgtt

SEQ ID NO: 123961 - DNA, 2487 bp, Homo sapiens
  Payload ID: 4334
  Gene Symbol: CCBL1
  Gene Name: cysteine conjugate-beta lyase, cytoplasmic
  ENST ID: ENST00000436267
  CDS Start-End: 295-1845
gtcgccatctttatgaggagaattctagcggcgctttctcccgctctcgcctccgcgctagcgccctgctgcttcggggcggaagtagcggagccgggctcggcccccttaaagggacagggactgctgcaacctacggggtgtacttgggaacgaggggtgaagcggcccaggtgaggagctgtgtgtgggggacccaagtcctgagctcggaggcattttctggccagggctgtttcctcccttctcccctgcctctggaaaagtctgcagtgccccaaggctctgggaggcatgttcaggactgcagcagccatctctgtgcacctggtggggccccttcagggaaggaaggctggagccccactcacttggttcttgcaccagactcaggtggctgagaagaatgttggatccccagctccacggcccaccagccatctgggactggcaaacccacaggaacggaaggttcctcagggaccacaaagcccatgtgaggtccctgctgctgaagggattctgaggacaggaggagccaaattacctatccagggtcacccagccaagctcgccatggccaaacagctgcaggcccgaaggctagacgggatcgactacaacccctgggtggagtttgtgaaactggccagtgagcatgacgtcgtgaacttgggccagggcttcccggatttcccaccaccagactttgccgtggaagcctttcagcacgctgtcagtggagacttcatgcttaaccagtacaccaagacatttggttacccaccactgacgaagatcctggcaagtttctttggggagctgctgggtcaggagatagacccgctcaggaatgtgctggtgactgttggtggctatggggccctgttcacagccttccaggccctggtggacgaaggagacgaggtcatcatcatcgaacccttttttgactgctacgagcccatgacaatgatggcagggggtcgtcctgtgtttgtgtccctgaagccgggtcccatccagaatggagaactgggttccagcagcaactggcagctggaccccatggagctggccggcaaattcacatcacgcaccaaagccctggtcctcaacacccccaacaaccccctgggcaaggtgttctccagggaagagctggagctggtggccagcctttgccagcagcatgacgtggtgtgtatcactgatgaagtctaccagtggatggtctacgacgggcaccagcacatcagcattgccagcctccctggcatgtgggaacggaccctgaccatcggcagcgccggcaagaccttcagcgccactggctggaaggtgggctgggtcctgggtccagatcacatcatgaagcacctgcggaccgtgcaccagaactccgtcttccactgccccacgcagagccaggctgcagtagccgagagctttgaacgggagcagctgctcttccgccaacccagcagctactttgtgcagttcccgcaggccatgcagcgctgccgtgaccacatgatacgtagcctacagtcagtgggcctgaagcccatcatccctcagggcagctacttcctcatcacagacatctcagacttcaagaggaagatgcctgacttgcctggagctgtggatgagccctatgacagacgcttcgtcaagtggatgatcaagaacaagggcttggtggccatccctgtctccatcttctatagtgtgccacatcagaagcactttgaccactatatccgcttctgttttgtgaaggatgaagccacgctccaggccatggacgagaagctgcggaagtggaaggtggaactctagccctgaagtcacgccttggccctgacatccccacatgcccgcagagatcctctttgagtgtctgtctttgtccaggtttcagacatttctaggttggggaagatgctattgggaaacctcttctccgtgacacagaatgttctgggtgggagccgcccttcttcatcttagagaaccaagtgcctcctgtctgaaaggtgagggtggcctgacctgggcctctccctgcccctccataggtgggtttgtagggtcttgtgttgcttctggtctctccaggcttggctgagacggacggtagacttccaccatgtaccgatcacatcccagctctgcatggcccctgctaaggctcaggtataacctcaccttccctggctcatcttggccttggggagttgcctttaggcttgagtcctcaagcctctccttttcgtccataataaaatgtttaagttattaagatccttattgacggcttctctctgcttcacactcatgctgatggctgatctaacttgtgaagaatgcccagaagaacctcagacacccccacaactttgtacaaatggttactgtagtcacatagtggcacaaccaggcctagcacccaaggccctcaaatgaattcctcactattaa

SEQ ID NO: 123962 - DNA, 736 bp, Homo sapiens
  Payload ID: 4334
  Gene Symbol: CCBL1
  Gene Name: cysteine conjugate-beta lyase, cytoplasmic
  ENST ID: ENST00000416084
  CDS Start-End: 185-736
ggtggctgagaagaatgttggatccccagctccacggcccaccagccatctgggactggcaaacccacaggaacggaaggttcctcagggaccacaaagcccatgtgaggtccctgctgctgaagggattctgaggacaggaggagccaaattacctatccagggtcacccagccaagctcgccatggccaaacagctgcaggcccgaaggctagacgggatcgactacaacccctgggtggagtttgtgaaactggccagtgagcatgacgtcgtgaacttgggccagggcttcccggatttcccaccaccagactttgccgtggaagcctttcagcacgctgtcagtggagacttcatgcttaaccagtacaccaagacatttggttacccaccactgacgaagatcctggcaagtttctttggggagctgctgggtcaggagatagacccgctcaggaatgtgctggtgactgttggtggctatggggccctgttcacagccttccaggccctggtggacgaaggagacgaggtcatcatcatcgaacccttttttgactgctacgagcccatgacaatgatggcagggggtcgtcctgtgtttgtgtccctgaagccgggtcccatccagaatggagaactgggttccagcagcaactggcagctggaccccatggagctggccggcaaattcacatcacgcaccaaagccctggtcctcaacacccccaac

SEQ ID NO: 123963 - DNA, 1860 bp, Homo sapiens
  Payload ID: 4335
  Gene Symbol: CDO1
  Gene Name: cysteine dioxygenase type 1
  Uniprot ID: Q16878
  ENST ID: ENST00000250535
  CDS Start-End: 558-1160
agcggcggaggtggagcggggagaggcgttaggccgggcggctaaaacgcgccgttaaagtgggggagagattgcgcggagcccacgcgatccctgggacgccggagacaacggggctcttgggaaggcgcggagcccggggaagccggggatgtgcgcgtgagccgtgcccgcagggtctccccgcctccgccacctttcttgggtggctctccgcctcgtcctccctccgagggccgttggtacattcctagtgactccaagcgcttaaaaggggcccgggaggatgaaccccacagatctgaacctgatttgtgtgtgcaccgcgtctccagcgatcccggatccactgcgctgccaggggcctgggggtgggtctcttgctgtctctgcgacgacatccttacgtttcggcactctaatgctgggtttgtgcgtgtgtgtctgcttagcggtctagcgggctgttaggctccctcgcccccagctccttggctcgctcagctcctccaccgcagcccagcagtgagacgcgcgcgcagccagctccccacgagatggaacagaccgaagtgctgaagccacggaccctggctgatctgatccgcatcctgcaccagctctttgccggcgatgaggtcaatgtagaggaggtgcaggccatcatggaagcctacgagagcgaccccaccgagtgggcaatgtacgccaagttcgaccagtacaggtatacccgaaatcttgtggatcaaggaaatggaaaatttaatctgatgattctctgttggggtgaaggacatggcagcagtattcatgatcataccaactcccactgctttctgaagatgctacagggaaatctaaaggagacattatttgcctggcctgacaaaaaatccaatgagatggtcaagaagtctgaaagagtcttgagggaaaaccagtgtgcctacatcaatgattccattggcttacatcgagtagagaacatcagccatacggaacctgctgtgagccttcacttgtacagtccaccttttgatacatgccatgcctttgatcaaagaacaggacataaaaacaaagtcacaatgacattccatagtaaatttggaatcagaactccaaatgcaacttcgggctcgctggagaacaactaaggggcaccaaaccctctgaggttttactttaaggttcgctgtatgtttgccttggacaaaaaggctacctaccacgtgctatccagtaatatacttaaataagccaatacttagatctactgtaaggcagatgctaattataaggcattaagtaagcaaatagtgccctcagctactgcagaagaaaagtcccactgaggaaaagaaagtcttgtgatttttaaaggcaagttttcaagtgctctcatagttctatcctctaattccattaaatccatactaggagcgtcagtgagggttttcatagcttttggaaatactttggtctctgaactgtaattagcaagaagtaaaaacagaaacgtcaaacgtcaaatgtttgctttgttacctggaggactaaatgtagatgtctttagtatactttgtatgttcttaatattggaagataattttgtgaatctgtagattttattttttcagtcttaccttacaaatttcttttctatgaataatagaggaacttacggcactctgccatttgttaatgaaaggaagtgcagaggatttagaaaagtacatgatccccagaccacaacaaaccaaaacataaactcatgtctgtgtcccatggtcatagtcaaagattttgtactgctaaaattaccaaataatttaaataaagtggatttgaacacaa

SEQ ID NO: 123964 - DNA, 5912 bp, Homo sapiens
  Payload ID: 4336
  Gene Symbol: CRIM1
  Gene Name: cysteine rich transmembrane BMP regulator 1 (chordin-like)
  Uniprot ID: Q9NZV1
  ENST ID: ENST00000280527
  CDS Start-End: 368-3478
gccgccggcccgggctggagccgagcgcagcagccaccgccgccgccgcgccagaagtttgggttgaaccggagctgccgggaggaaacttttttcttttttccccctccctcccgggaggaggaggaggaggaggaggggaagctgccgccggcgccaaggctcgtgggctcggggtcggcgcggcccgcagaaggggcgggggcctcgccccgcgaggggaggcgcgccccgggggccccgagaggggcggtgaggaccgcgggctgctggtgcggcggcggcggcgcgtgtgccccgcgcaggggagggcgcccgccccgctcccggcccggctgcgaggaggaggcggcggcggcgcaggaggatgtacttggtggcgggggacagggggttggccggctgcgggcacctcctggtctcgctgctggggctgctgctgctgctggcgcgctccggcacccgggcgctggtctgcctgccctgtgacgagtccaagtgcgaggagcccaggaactgcccggggagcatcgtgcagggcgtctgcggctgctgctacacgtgcgccagccagaggaacgagagctgcggcggcaccttcgggatttacggaacctgcgaccgggggctgcgttgtgtcatccgccccccgctcaatggcgactccctcaccgagtacgaagcgggcgtttgcgaagatgagaactggactgatgaccaactgcttggttttaaaccatgcaatgaaaaccttattgctggctgcaatataatcaatgggaaatgtgaatgtaacaccattcgaacctgcagcaatccctttgagtttccaagtcaggatatgtgcctttcagctttaaagagaattgaagaagagaagccagattgctccaaggcccgctgtgaagtccagttctctccacgttgtcctgaagattctgttctgatcgagggttatgctcctcctggggagtgctgtcccttacccagccgctgcgtgtgcaaccccgcaggctgtctgcgcaaagtctgccagccgggaaacctgaacatactagtgtcaaaagcctcagggaagccgggagagtgctgtgacctctatgagtgcaaaccagttttcggcgtggactgcaggactgtggaatgccctcctgttcagcagaccgcgtgtcccccggacagctatgaaactcaagtcagactaactgcagatggttgctgtactttgccaacaagatgcgagtgtctctctggcttatgtggtttccccgtgtgtgaggtgggatccactccccgcatagtctctcgtggcgatgggacacctggaaagtgctgtgatgtctttgaatgtgttaatgatacaaagccagcctgcgtatttaacaatgtggaatattatgatggagacatgtttcgaatggacaactgtcggttctgtcgatgccaagggggcgttgccatctgcttcaccgcccagtgtggtgagataaactgcgagaggtactacgtgcccgaaggagagtgctgcccagtgtgtgaagatccagtgtatccttttaataatcccgctggctgctatgccaatggcctgatccttgcccacggagaccggtggcgggaagacgactgcacattctgccagtgcgtcaacggtgaacgccactgcgttgcgaccgtctgcggacagacctgcacaaaccctgtgaaagtgcctggggagtgttgccctgtgtgcgaagaaccaaccatcatcacagttgatccacctgcatgtggggagttatcaaactgcactctgacagggaaggactgcattaatggtttcaaacgcgatcacaatggttgtcggacctgtcagtgcataaacaccgaggaactatgttcagaacgtaaacaaggctgcaccttgaactgtcccttcggtttccttactgatgcccaaaactgtgagatctgtgagtgccgcccaaggcccaagaagtgcagacccataatctgtgacaagtattgtccacttggattgctgaagaataagcacggctgtgacatctgtcgctgtaagaaatgtccagagctctcatgcagtaagatctgccccttgggtttccagcaggacagtcacggctgtcttatctgcaagtgcagagaggcctctgcttcagctgggccacccatcctgtcgggcacttgtctcaccgtggatggtcatcatcataaaaatgaggagagctggcacgatgggtgccgggaatgctactgtctcaatggacgggaaatgtgtgccctgatcacctgcccggtgcctgcctgtggcaaccccaccattcaccctggacagtgctgcccatcatgtgcagatgactttgtggtgcagaagccagagctcagtactccctccatttgccacgcccctggaggagaatactttgtggaaggagaaacgtggaacattgactcctgtactcagtgcacctgccacagcggacgggtgctgtgtgagacagaggtgtgcccaccgctgctctgccagaacccctcacgcacccaggattcctgctgcccacagtgtacagatcaaccttttcggccttccttgtcccgcaataacagcgtacctaattactgcaaaaatgatgaaggggatatattcctggcagctgagtcctggaagcctgacgtttgtaccagctgcatctgcattgatagcgtaattagctgtttctctgagtcctgcccttctgtatcctgtgaaagacctgtcttgagaaaaggccagtgttgtccctactgcatagaagacacaattccaaagaaggtggtgtgccacttcagtgggaaggcctatgccgacgaggagcggtgggaccttgacagctgcacccactgctactgcctgcagggccagaccctctgctcgaccgtcagctgcccccctctgccctgtgttgagcccatcaacgtggaaggaagttgctgcccaatgtgtccagaaatgtatgtcccagaaccaaccaatatacccattgagaagacaaaccatcgaggagaggttgacctggaggttcccctgtggcccacgcctagtgaaaatgatatcgtccatctccctagagatatgggtcacctccaggtagattacagagataacaggctgcacccaagtgaagattcttcactggactccattgcctcagttgtggttcccataattatatgcctctctattataatagcattcctattcatcaatcagaagaaacagtggataccactgctttgctggtatcgaacaccaactaagccttcttccttaaataatcagctagtatctgtggactgcaagaaaggaaccagagtccaggtggacagttcccagagaatgctaagaattgcagaaccagatgcaagattcagtggcttctacagcatgcaaaaacagaaccatctacaggcagacaatttctaccaaacagtgtgaagaaaggcaactaggatgaggtttcaaaagacggaagacgactaaatctgctctaaaaagtaaactagaatttgtgcacttgcttagtggattgtattggattgtgacttgatgtacagcgctaagaccttactgggatgggctctgtctacagcaatgtgcagaacaagcattcccacttttcctcaagataactgaccaagtgttttcttagaaccaaagtttttaaagttgctaagatatatttgcctgtaagatagctgtagagatatttggggtggggacagtgagtttggatggggaaatgggtgggagggtggtgttgggaagaaaaattggtcagcttggctcggggagaaacctggtaacataaaagcagttcagtggcccagaggttatttttttcctattgctctgaagactgcactggttgctgcaaagctcaggcctgaatgagcaggaaacaaaaaaggccttgcgacccagctgccataaccaccttagaactaccagacgagcacatcagaaccctttgacagccatcccaggtctaaagccacaagtttcttttctatacagtcacaactgcagtaggcagtgaggaagccagagaaatgcgatagcggcatttctctaaagcgggttattaaggatatatacagttacactttttgctgcttttattttcttccaagccaatcaatcagccagttcctagcagagtcagcacatgaacaagatctaagtcatttcttgatgtgagcactggagcttttttttttttacaacgtgacaggaagaggagggagagggtgacgaacaccaggcatttccaggggctatatttcactgtttgttgttgctttgttctgttatattgttggttgttcatagtttttgttgaagctctagcttaagaagaaactttttttaaaaagactgtttggggattctttttccttattatatactgattctacaaaatagaaactacttcattttaattgtatattattcaagcacctttgttgaagctcaaaaaaaatgatgcctctttaaactttagcaattataggagtatttatgtaactatcttatgcttcaaaaaacaaaagtatttgtgtgcatgtgtatataatatatatatatacatatatatttatacacatacaatttatgttttcctgttgaatgtatttttatgagattttaaccagaacaaaggcagataaacaggcattccatagcagtgcttttgatcacttacaaattttttgaataacacaaaatctcattctacctgcagtttaattggaaagatgtgtgtgtgagagtatgtatgtgtgtgtgtgtgtgtgtgtgtgtgcgcgcgcacgcacgccttgagcagtcagcattgcacctgctatggagaagggtattcctttattaaaatcttcctcatttggatttgctttcagttggttttcaatttgctcactggccagagacattgatggcagttcttatctgcatcactaatcagctcctggattttttttttttttttttcaaacaatggtttgaaacaactactggaatattgtccacaataagctggaagtttgttgtagtatgcctcaaatataactgactgtatactatagtggtaacttttcaaacagcccttagcacttttatactaattaacccatttgtgcattgagttttcttttaaaaatgcttgttgtgaaagacacagatacccagtatgcttaacgtgaaaagaaaatgtgttctgttttgtaaaggaactttcaagtattgttgtaaatacttggacagaggttgctgaactttaaaaaaaattaatttattattataatgacctaatttattaatctgaagattaaccatttttttgtcttagaatatcaaaaagaaaaagaaaaaggtgttctagctgtttgcatcaaaggaaaaaaagatttattatcaaggggcaatatttttatcttttccaaaataaatttgttaatgatacattacaaaaatagattgacatcagcctgattagtataaattttgttggtaattaatccattcctggcataaaaagtctttatcaaaaaaaattgtagatgcttgctttttgttttttcaatcatggccatattatgaaaatactaacaggatataggacaaggtgtaaatttttttattattattttaaagatatgatttatcctgagtgctgtatctattactcttttactttggttcctgttgtgctcttgtaaaagaaaaatataatttcctgaagaataaaatagatatatggcacttggagtgcatcatagttctacagtttgtttttgttttcttcaaaaaagctgtaagagaattatctgcaacttgattcttggcaggaaataaacattttgagttgaaatca

SEQ ID NO: 123965 - DNA, 874 bp, Homo sapiens
  Payload ID: 4336
  Gene Symbol: CRIM1
  Gene Name: cysteine rich transmembrane BMP regulator 1 (chordin-like)
  ENST ID: ENST00000413985
  CDS Start-End: 1-528
gccctgatcacctgcccggtgcctgcctgtggcaaccccaccattcaccctggacagtgctgcccatcatgtgcagatgactttgtggtgcagaagccagagctcagtactccctccatttgccacgcccctggaggagaatactttgtggaaggagaaacgtggaacattgactcctgtactcagtgcacctgccacagcggacgggtgctgtgtgagacagaggtgtgcccaccgctgctctgccagaacccctcacgcacccaggattcctgctgcccacagtgtacagatcaaccttttcggccttccttgtcccgcaataacagcgtacctaattactgcaaaaatgatgaaggggatatattcctggcagctgagtcctggaagcctgacgtttgtaccagctgcatctgcattgatagcgtaattagctgtttctctgagtcctgcccttctgtatcctgtgaaagacctgtcttgagaaaaggccagtgttgtccctactgcataggaggccaaacctgattttgtaccctctagtggtcaaggatatgggggaagaccccatcacaagagggcccacctgataagaaccctctggagactgctggcagagtcttcttaacaggacttggactgtgaccagataaaacatcttctataggtgcagaaactggccaatctggaaggtccaatggcttctacgttaaggttttcttaacaagatggtataccccgacttttacatggattgcttcttttaagtcctaaaagaagttgtatttcttcctccttatttgggccaccttgatctttagttgtttctgcctgccttttaaaatgacatttttatatttccaaaatgatttat

SEQ ID NO: 123966 - DNA, 667 bp, Homo sapiens
  Payload ID: 4336
  Gene Symbol: CRIM1
  Gene Name: cysteine rich transmembrane BMP regulator 1 (chordin-like)
  ENST ID: ENST00000426856
  CDS Start-End: 1-667
tgcccggggagcatcgtgcagggcgtctgcggctgctgctacacgtgcgccagccagaggaacgagagctgcggcggcaccttcgggatttacggaacctgcgaccgggggctgcgttgtgtcatccgccccccgctcaatggcgactccctcaccgagtacgaagcgggcgtttgcgaagaagagaagccagattgctccaaggcccgctgtgaagtccagttctctccacgttgtcctgaagattctgttctgatcgagggttatgctcctcctggggagtgctgtcccttacccagccgctgcgtgtgcaaccccgcaggctgtctgcgcaaagtctgccagccgggaaacctgaacatactagtgtcaaaagcctcagggaagccgggagagtgctgtgacctctatgagtgcaaaccagttttcggcgtggactgcaggactgtggaatgccctcctgttcagcagaccgcgtgtcccccggacagctatgaaactcaagtcagactaactgcagatggttgctgtactttgccaacaagatgcgagtgtctctctggcttatgtggtttccccgtgtgtgaggtgggatccactccccgcatagtctctcgtggcgatgggacacctggaaagtgctgtgatgtctttgaatgtgttaatg

SEQ ID NO: 123967 - DNA, 700 bp, Homo sapiens
  Payload ID: 4336
  Gene Symbol: CRIM1
  Gene Name: cysteine rich transmembrane BMP regulator 1 (chordin-like)
  ENST ID: ENST00000428774
  CDS Start-End: 1-167
gcggctgctgctacacgtgcgccagccagaggaacgagagctgcggcggcaccttcgggatttacggaacctgcgaccgggggctgcgttgtgtcatccgccccccgctcaatggcgactccctcaccgagtacgaagcgggcgtttgcgaagctgcggggtattgaatttgaggctgctctcagcattactgctcatctcaaagaggaacaaatggtcccccaaatggtccagatgcaacagtagggaaaggagtgccaccattcattctgaggtgcctgggccatactctggatgaagctcacagctctaacgtaaggcggtaagtcattttttttttaaacttaaggaagttaatttgaaagtttatgctgatgccatttcatatgacagagactaaagggtatacgtccttgtgttctcttggtggggactgctgtcctaaaggtaaaagattttgatccagaggttggattgttcctcgtgtggcaacagtcctctgacctcagtcattttcaaagtctaatgtctttttggctaacaaaagacatcaagctagagattaaaatttgcagaagatgggagtttttttgttgttttcggttttttttttttttttttttgagacggagtctcactctgtcacccaggctggagtgcaggtgatcatatctacaaaggtgacaagaacatgaacctg

SEQ ID NO: 123968 - DNA, 698 bp, Homo sapiens
  Payload ID: 4336
  Gene Symbol: CRIM1
  Gene Name: cysteine rich transmembrane BMP regulator 1 (chordin-like)
  ENST ID: ENST00000619935
  CDS Start-End: 368-698
gccgccggcccgggctggagccgagcgcagcagccaccgccgccgccgcgccagaagtttgggttgaaccggagctgccgggaggaaacttttttcttttttccccctccctcccgggaggaggaggaggaggaggaggggaagctgccgccggcgccaaggctcgtgggctcggggtcggcgcggcccgcagaaggggcgggggcctcgccccgcgaggggaggcgcgccccgggggccccgagaggggcggtgaggaccgcgggctgctggtgcggcggcggcggcgcgtgtgccccgcgcaggggagggcgcccgccccgctcccggcccggctgcgaggaggaggcggcggcggcgcaggaggatgtacttggtggcgggggacagggggttggccggctgcgggcacctcctggtctcgctgctggggctgctgctgctgctggcgcgctccggcacccgggcgctggtctgcctgccctgtgacgagtccaagtgcgaggagcccaggaactgcccggggagcatcgtgcagggcgtctgcggctgctgctacacgtgcgccagccagaggaacgagagctgcggcggcaccttcgggatttacggaacctgcgaccgggggctgcgttgtgtcatccgccccccgctcaatggcgactccctcaccgagtacgaagcgggcgtttgcgaag

SEQ ID NO: 123969 - DNA, 181 bp, Homo sapiens
  Payload ID: 4336
  Gene Symbol: CRIM1
  Gene Name: cysteine rich transmembrane BMP regulator 1 (chordin-like)
  ENST ID: ENST00000613124
  CDS Start-End: 1-181
tgcccggggagcatcgtgcagggcgtctgcggctgctgctacacgtgcgccagccagaggaacgagagctgcggcggcaccttcgggatttacggaacctgcgaccgggggctgcgttgtgtcatccgccccccgctcaatggcgactccctcaccgagtacgaagcgggcgtttgcgaag

SEQ ID NO: 123970 - DNA, 153 bp, Homo sapiens
  Payload ID: 4336
  Gene Symbol: CRIM1
  Gene Name: cysteine rich transmembrane BMP regulator 1 (chordin-like)
  ENST ID: ENST00000619072
  CDS Start-End: 1-153
gcggctgctgctacacgtgcgccagccagaggaacgagagctgcggcggcaccttcgggatttacggaacctgcgaccgggggctgcgttgtgtcatccgccccccgctcaatggcgactccctcaccgagtacgaagcgggcgtttgcgaag

SEQ ID NO: 123971 - DNA, 2645 bp, Homo sapiens
  Payload ID: 4337
  Gene Symbol: CSAD
  Gene Name: cysteine sulfinic acid decarboxylase
  Uniprot ID: Q9Y600
  ENST ID: ENST00000267085
  CDS Start-End: 235-1797
gcttggggacgcacggagaggtgcagctgggccgtccagcatcaaacactagcctccacacgtggaaaagaccctgactcccacagtagactagtcttatgggagtcctggctcttgggccaggctgcattaggaaaatggaaaccagactgtcttcaaattcttctgcctagccttagccattagagagaggtcctgctaaagatggactgcaaatgcgcttgatggaaggagatgtcaattccactgaagtcctcatttctgctgagctacctgtgcaccctgcctccggctctcctgagcagagagatcctgatggctgactcagaagcactcccctcccttgctggggacccagtggctgtggaagccttgctccgggccgtgtttggggttgttgtggatgaggccattcagaaaggaaccagtgtctcccagaaggtctgtgagtggaaggagcctgaggagctgaagcagctgctggatttggagctgcggagccagggcgagtcacagaagcagatcctggagcggtgtcgggctgtgattcgctacagtgtcaagactggtcaccctcggttcttcaaccagctcttctctgggttggatccccatgctctggccgggcgcattatcactgagagcctcaacaccagccagtacacatatgaaatcgcccccgtgtttgtgctcatggaagaggaggtgctgaggaaactgcgggccctggtgggctggagctctggggacggaatcttctgccctggtggctccatctccaacatgtatgctgtaaatctggcccgctatcagcgctacccggattgcaagcagaggggcctccgcacactgccgcccctggccctattcacatcgaaggagtgtcactactccatccagaagggagctgcgtttctgggacttggcaccgacagtgtccgagtggtcaaggctgatgagagagggaaaatggtccccgaggatctggagaggcagattggtatggccgaggctgagggtgctgtgccgttcctggtcagtgccacctctggcaccactgtgctaggggcctttgaccccctggaggcaattgctgatgtgtgccagcgtcatgggctatggctgcatgtggatgctgcctggggtgggagcgtcctgctgtcacagacacacaggcatctcctggatgggatccagagggctgactctgtggcctggaatccccacaagctcctcgcagcaggcctgcaatgctctgcacttcttctccaggatacctcgaacctgctcaagcgctgccatgggtcccaggccagctaccttttccagcaggacaagttctacgatgtggctctggacacgggagacaaggtggtgcagtgtggccgccgtgtggactgtctgaagctgtggctcatgtggaaggcacagggcgatcaagggctggagcggcgcatcgaccaggcctttgtccttgcccggtacctggtggaggaaatgaagaagcgggaagggtttgagctagtcatggagcctgagtttgtcaatgtgtgtttctggttcgtaccccccagcctgcgagggaagcaggagagtccagattaccacgaaaggctgtcaaaggtggcccccgtgctcaaggagcgcatggtgaaggagggctccatgatgattggctaccagccccacgggacccggggcaacttcttccgtgtggttgtggccaactctgcactgacctgtgctgatatggacttcctcctcaacgagctggagcggctaggccaggacctgtgagccttctctgtcttgctgccggccttgataccacccctcacccgcagagtcactgcattccctcccagcctttgaggccgggtgcagtggctcacgcctgtaatcccagcactttgggaggccgaggcgggtggatcacttgaggtcaggagttcgagaccagcctggccaataaggtgaaaccctgtctctactaaaaatacaaaaattagccgagcatggtggcctgtgcctgtaaacccagctactcaggaggttggggcagaattgcttgaacccagggggcagaggttgcagtgagccgagattgcacccctgcactccaggctgggcaacagtacgagactctgttccaaaaaaaataaaaaagaacagcctttttaggccacagtgacctgcgcaatgtttatatgctttgacctactaactttctcctaactaaatatttgattttaggagagtgtttaaataaattacagtatgtctatatgatgaaatgttattttgccattaaaattttgtttacaaagataatttttattgacataaaaataactttaatgtaatttatgttgaaaaagctgaatacaagtctttatatagagtaatatttgagctgtgttcaaaaatacataggaaaagactgataaaatgaaatatggcaaaatgttaatagttttccctggaataggataataggcaattttaaaacagactcctttaaaaaaacaaacaaacaaaaaaaacatagacttctttatatcttttgagctccctcccttttattatgtaatgaatatgtgttgcttttgtaataggaaaataataaagttaaaatttcaactgca

SEQ ID NO: 123972 - DNA, 2086 bp, Homo sapiens
  Payload ID: 4337
  Gene Symbol: CSAD
  Gene Name: cysteine sulfinic acid decarboxylase
  ENST ID: ENST00000379843
  CDS Start-End: 55-858
ctgaggagctacctgtgcaccctgcctccggctctcctgagcagagagatcctgatggctgactcagaagcactcccctcccttgctggggacccagtggctgtggaagccttgctccgggccgtgtttggggttgttgtggatgaggccattcagaaaggaaccagtgtctcccagaaggtctgtgagtggaaggagcctgaggagctgaagcagctgctggatttggagctgcggagccagggcgagtcacagaagcagatcctggagcggtgtcgggctgtgattcgctacagtgtcaagactggtcaccctcggttcttcaaccagctcttctctgggttggatccccatgctctggccgggcgcattatcactgagagcctcaacaccagccagtacacatatgaaatcgcccccgtgtttgtgctcatggaagaggaggtgctgaggaaactgcgggccctggtgggctggagctctggggacggaatcttctgccctggtggctccatctccaacatgtatgctgtaaatctggcccgctatcagcgctacccggattgcaagcagaggggcctccgcacactgccgcccctggccctattcacatcgaaggaggtggggaagaggcacaggcccaaccctgggctcctgattctaatctccagccatgtcactactccatccagaagggagctgcgtttctgggacttggcaccgacagtgtccgagtggtcaaggctgatgagagagggaaaatggtccccgaggatctggagaggcagattggtatggccgaggctgagggtgctgtgccgttcctggtcagtgccacctctggcaccactgtgctaggggcctttgaccccctggaggcaattgctgatgtgtgccagcgtcatgggctatggctgcatgtggatggctgactctgtggcctggaatccccacaagctcctcgcagcaggcctgcaatgctctgcacttcttctccaggatacctcgaacctgctcaagcgctgccatgggtcccaggccagctaccttttccagcaggacaagttctacgatgtggctctggacacgggagacaaggtggtgcagtgtggccgccgtgtggactgtctgaagctgtggctcatgtggaaggcacagggcgatcaagggctggagcggcgcatcgaccaggcctttgtccttgcccggtacctggtggaggaaatgaagaagcgggaagggtttgagctagtcatggagcctgagtttgtcaatgtgtgtttctggttcgtaccccccagcctgcgagggaagcaggagagtccagattaccacgaaaggctgtcaaaggtggctcacgcctgtaatcccagcactttgggaggccgaggcgggtggatcacttgaggtcaggagttcgagaccagcctggccaataaggtgaaaccctgtctctactaaaaatacaaaaattagccgagcatggtggcctgtgcctgtaaacccagctactcaggaggttggggcagaattgcttgaacccagggggcagaggttgcagtgagccgagattgcacccctgcactccaggctgggcaacagtacgagactctgttccaaaaaaaataaaaaagaacagcctttttaggccacagtgacctgcgcaatgtttatatgctttgacctactaactttctcctaactaaatatttgattttaggagagtgtttaaataaattacagtatgtctatatgatgaaatgttattttgccattaaaattttgtttacaaagataatttttattgacataaaaataactttaatgtaatttatgttgaaaaagctgaatacaagtctttatatagagtaatatttgagctgtgttcaaaaatacataggaaaagactgataaaatgaaatatggcaaaatgttaatagttttccctggaataggataataggcaattttaaaacagactcctttaaaaaaacaaacaaacaaaaaaaacatagacttctttatatcttttgagctccctcccttttattatgtaatgaatatgtgttgcttttgtaataggaaa

SEQ ID NO: 123973 - DNA, 1962 bp, Homo sapiens
  Payload ID: 4337
  Gene Symbol: CSAD
  Gene Name: cysteine sulfinic acid decarboxylase
  Uniprot ID: Q9Y600
  ENST ID: ENST00000379846
  CDS Start-End: 105-1145
gcttggggacgcacggagaggtgcagctggggtggctcacacctgtaatcccagcacgttgggaagccgaggtggggaatgactctgctctgccacagatcctgatggctgactcagaagcactcccctcccttgctggggacccagtggctgtggaagccttgctccgggccgtgtttggggttgttgtggatgaggccattcagaaaggaaccagtgtctcccagaagtgtcactactccatccagaagggagctgcgtttctgggacttggcaccgacagtgtccgagtggtcaaggctgatgagagagggaaaatggtccccgaggatctggagaggcagattggtatggccgaggctgagggtgctgtgccgttcctggtcagtgccacctctggcaccactgtgctaggggcctttgaccccctggaggcaattgctgatgtgtgccagcgtcatgggctatggctgcatgtggatgctgcctggggtgggagcgtcctgctgtcacagacacacaggcatctcctggatgggatccagagggctgactctgtggcctggaatccccacaagctcctcgcagcaggcctgcaatgctctgcacttcttctccaggatacctcgaacctgctcaagcgctgccatgggtcccaggccagctaccttttccagcaggacaagttctacgatgtggctctggacacgggagacaaggtggtgcagtgtggccgccgtgtggactgtctgaagctgtggctcatgtggaaggcacagggcgatcaagggctggagcggcgcatcgaccaggcctttgtccttgcccggtacctggtggaggaaatgaagaagcgggaagggtttgagctagtcatggagcctgagtttgtcaatgtgtgtttctggttcgtaccccccagcctgcgagggaagcaggagagtccagattaccacgaaaggctgtcaaaggtggcccccgtgctcaaggagcgcatggtgaaggagggctccatgatgattggctaccagccccacgggacccggggcaacttcttccgtgtggttgtggccaactctgcactgacctgtgctgatatggacttcctcctcaacgagctggagcggctaggccaggacctgtgagccttctctgtcttgctgccggccttgataccacccctcacccgcagagtcactgcattccctcccagcctttgaggccgggtgcagtggctcacgcctgtaatcccagcactttgggaggccgaggcgggtggatcacttgaggtcaggagttcgagaccagcctggccaataaggtgaaaccctgtctctactaaaaatacaaaaattagccgagcatggtggcctgtgcctgtaaacccagctactcaggaggttggggcagaattgcttgaacccagggggcagaggttgcagtgagccgagattgcacccctgcactccaggctgggcaacagtacgagactctgttccaaaaaaaataaaaaagaacagcctttttaggccacagtgacctgcgcaatgtttatatgctttgacctactaactttctcctaactaaatatttgattttaggagagtgtttaaataaattacagtatgtctatatgatgaaatgttattttgccattaaaattttgtttacaaagataatttttattgacataaaaataactttaatgtaatttatgttgaaaaagctgaatacaagtctttatatagagtaatatttgagctgtgttcaaaaatacataggaaaagactgataaaatgaaatatggcaaaatgttaatagttttccctggaataggataataggcaattttaaaacagactcctttaaaaaaacaaacaaacaaaaaaaacatagacttctttatatcttttgagctccctcccttttattatgtaatgaatatgtgttgcttttgtaata

SEQ ID NO: 123974 - DNA, 2379 bp, Homo sapiens
  Payload ID: 4337
  Gene Symbol: CSAD
  Gene Name: cysteine sulfinic acid decarboxylase
  ENST ID: ENST00000379850
  CDS Start-End: 1-1558
gcttggggacgcacggagaggtgcagctggctacctgtgcaccctgcctccggctctcctgagcagagagatcctgatggctgactcagaagcactcccctcccttgctggggacccagtggctgtggaagccttgctccgggccgtgtttggggttgttgtggatgaggccattcagaaaggaaccagtgtctcccagaaggtctgtgagtggaaggagcctgaggagctgaagcagctgctggatttggagctgcggagccagggcgagtcacagaagcagatcctggagcggtgtcgggctgtgattcgctacagtgtcaagactggtcaccctcggttcttcaaccagctcttctctgggttggatccccatgctctggccgggcgcattatcactgagagcctcaacaccagccagtacacatatgaaatcgcccccgtgtttgtgctcatggaagaggaggtgctgaggaaactgcgggccctggtgggctggagctctggggacggaatcttctgccctggtggctccatctccaacatgtatgctgtaaatctggcccgctatcagcgctacccggattgcaagcagaggggcctccgcacactgccgcccctggccctattcacatcgaaggagtgtcactactccatccagaagggagctgcgtttctgggacttggcaccgacagtgtccgagtggtcaaggctgatgagagagggaaaatggtccccgaggatctggagaggcagattggtatggccgaggctgagggtgctgtgccgttcctggtcagtgccacctctggcaccactgtgctaggggcctttgaccccctggaggcaattgctgatgtgtgccagcgtcatgggctatggctgcatgtggatgctgcctggggtgggagcgtcctgctgtcacagacacacaggcatctcctggatgggatccagagggctgactctgtggcctggaatccccacaagctcctcgcagcaggcctgcaatgctctgcacttcttctccaggatacctcgaacctgctcaagcgctgccatgggtcccaggccagctaccttttccagcaggacaagttctacgatgtggctctggacacgggagacaaggtggtgcagtgtggccgccgtgtggactgtctgaagctgtggctcatgtggaaggcacagggcgatcaagggctggagcggcgcatcgaccaggcctttgtccttgcccggtacctggtggaggaaatgaagaagcgggaagggtttgagctagtcatggagcctgagtttgtcaatgtgtgtttctggttcgtaccccccagcctgcgagggaagcaggagagtccagattaccacgaaaggctgtcaaaggtggcccccgtgctcaaggagcgcatggtgaaggagggctccatgatgattggctaccagccccacgggacccggggcaacttcttccgtgtggttgtggccaactctgcactgacctgtgctgatatggacttcctcctcaacgagctggagcggctaggccaggacctgtgagccttctctgtcttgctgccggccttgataccacccctcacccgcagagtcactgcattccctcccagcctttgaggccgggtgcagtggctcacgcctgtaatcccagcactttgggaggccgaggcgggtggatcacttgaggtcaggagttcgagaccagcctggccaataaggtgaaaccctgtctctactaaaaatacaaaaattagccgagcatggtggcctgtgcctgtaaacccagctactcaggaggttggggcagaattgcttgaacccagggggcagaggttgcagtgagccgagattgcacccctgcactccaggctgggcaacagtacgagactctgttccaaaaaaaataaaaaagaacagcctttttaggccacagtgacctgcgcaatgtttatatgctttgacctactaactttctcctaactaaatatttgattttaggagagtgtttaaataaattacagtatgtctatatgatgaaatgttattttgccattaaaattttgtttacaaagataatttttattgacataaaaataactttaatgtaatttatgttgaaaaagctgaatacaagtctttatatagagtaatatttgagctgtgttcaaaaatacataggaaaagactgataaaatgaaatatggcaaaatgttaatagttttccctggaataggataataggcaattttaaaacagactcctttaaaaaaacaaacaaacaaaaaaaacatagacttctttatatcttttgagctccctcccttttattatgtaatgaatatgtgttgcttttgtaataggaa

SEQ ID NO: 123975 - DNA, 558 bp, Homo sapiens
  Payload ID: 4337
  Gene Symbol: CSAD
  Gene Name: cysteine sulfinic acid decarboxylase
  ENST ID: ENST00000424845
  CDS Start-End: 70-207
cttggtcctgctgtcctgaggagctacctgtgcaccctgcctccggctctcctgagcagagagatcctgatggctgactcagaagcactcccctcccttgctggggacccagtggctgtggaagccttgctccgggccgtgtttggggttgttgtggatgaggccattcagaaaggaaccagtgtctcccagaaggtacacatatgaaatcgcccccgtgtttgtgctcatggaagaggaggtgctgaggaaactgcgggccctggtgggctggagctctggggacggaatcttctgccctggtttgtggctccatctccaacatgtatgctgtaaatctggcccgctatcagcgctacccggattgcaagcagaggggcctccgcacactgccgcccctggccctattcacatcgaaggagtgtcactactccatccagaagggagctgcgtttctgggacttggcaccgacagtgtccgagtggtcaaggctgatgagagagggaaaatggtccccgaggatctggagaggcagattggtatggccgaggctgagg

SEQ ID NO: 123976 - DNA, 565 bp, Homo sapiens
  Payload ID: 4337
  Gene Symbol: CSAD
  Gene Name: cysteine sulfinic acid decarboxylase
  ENST ID: ENST00000424990
  CDS Start-End: 128-565
gagcttggggacgcacggagaggtgcagctggacagatttcatttccctgagccactccatgatttgggccattgaaagagctacctgtgcaccctgcctccggctctcctgagcagagagatcctgatggctgactcagaagcactcccctcccttgctggggacccagtggctgtggaagccttgctccgggccgtgtttggggttgttgtggatgaggccattcagaaaggaaccagtgtctcccagaaggtctgtgagtggaaggagcctgaggagctgaagcagctgctggatttggagctgcggagccagggcgagtcacagaagcagatcctggagcggtgtcgggctgtgattcgctacagtgtcaagactggtcaccctcggttcttcaaccagctcttctctgggttggatccccatgctctggccgggcgcattatcactgagagcctcaacaccagccagtacacatatgaaatcgcccccgtgtttgtgctcatggaagaggaggtgctgaggaaactgcgggccctggtgggctggagctctggggacgga

SEQ ID NO: 123977 - DNA, 1774 bp, Homo sapiens
  Payload ID: 4337
  Gene Symbol: CSAD
  Gene Name: cysteine sulfinic acid decarboxylase
  Uniprot ID: Q9Y600
  ENST ID: ENST00000453446
  CDS Start-End: 293-1774
acttccgggctcggcagctagactagcgggggcagcctcagagcgggccgtccagcatcaaacactagcctccacacgtggaaaagaccctgactcccacagtagactagtcttatgggagtcctggctcttgggccaggctgcattaggaaaatggaaaccagactgtcttcaaattcttctgcctagccttagccattagagagaggtcctgctaaagatggactgcaaatgcgcttgatggaaggagatgtcaattccactgaagtcctcatttctgctgtagatcctgatggctgactcagaagcactcccctcccttgctggggacccagtggctgtggaagccttgctccgggccgtgtttggggttgttgtggatgaggccattcagaaaggaaccagtgtctcccagaaggtctgtgagtggaaggagcctgaggagctgaagcagctgctggatttggagctgcggagccagggcgagtcacagaagcagatcctggagcggtgtcgggctgtgattcgctacagtgtcaagactggtcaccctcggttcttcaaccagctcttctctgggttggatccccatgctctggccgggcgcattatcactgagagcctcaacaccagccagtacacatatgaaatcgcccccgtgtttgtgctcatggaagaggaggtgctgaggaaactgcgggccctggtgggctggagctctggggacggaatcttctgccctggtggctccatctccaacatgtatgctgtaaatctggcccgctatcagcgctacccggattgcaagcagaggggcctccgcacactgccgcccctggccctattcacatcgaaggagtgtcactactccatccagaagggagctgcgtttctgggacttggcaccgacagtgtccgagtggtcaaggctgatgagagagggaaaatggtccccgaggatctggagaggcagattggtatggccgaggctgagggtgctgtgccgttcctggtcagtgccacctctggcaccactgtgctaggggcctttgaccccctggaggcaattgctgatgtgtgccagcgtcatgggctatggctgcatgtggatgctgcctggggtgggagcgtcctgctgtcacagacacacaggcatctcctggatgggatccagagggctgactctgtggcctggaatccccacaagctcctcgcagcaggcctgcaatgctctgcacttcttctccaggatacctcgaacctgctcaagcgctgccatgggtcccaggccagctaccttttccagcaggacaagttctacgatgtggctctggacacgggagacaaggtggtgcagtgtggccgccgtgtggactgtctgaagctgtggctcatgtggaaggcacagggcgatcaagggctggagcggcgcatcgaccaggcctttgtccttgcccggtacctggtggaggaaatgaagaagcgggaagggtttgagctagtcatggagcctgagtttgtcaatgtgtgtttctggttcgtaccccccagcctgcgagggaagcaggagagtccagattaccacgaaaggctgtcaaaggtggcccccgtgctcaaggagcgcatggtgaaggagggctccatgatgattggctaccagccccacgggacccggggcaacttcttccgtgtggttgtggccaactctgcactgacctgtgctgatatggacttcctcctcaacgagctggagcggctaggccaggacctgtga

SEQ ID NO: 123978 - DNA, 581 bp, Homo sapiens
  Payload ID: 4337
  Gene Symbol: CSAD
  Gene Name: cysteine sulfinic acid decarboxylase
  ENST ID: ENST00000437073
  CDS Start-End: 93-581
acttccgggctcggcagctagactagcgggggcagcctcagagcggctacctgtgcaccctgcctccggctctcctgagcagagagatcctgatggctgactcagaagcactcccctcccttgctggggacccagtggctgtggaagccttgctccgggccgtgtttggggttgttgtggatgaggccattcagaaaggaaccagtgtctcccagaaggtctgtgagtggaaggagcctgaggagctgaagcagctgctggatttggagctgcggagccagggcgagtcacagaagcagatcctggagcggtgtcgggctgtgattcgctacagtgtcaagactggtcaccctcggttcttcaaccagctcttctctgggttggatccccatgctctggccgggcgcattatcactgagagcctcaacaccagccagtacacatatgaaatcgcccccgtgtttgtgctcatggaagaggaggtgctgaggaaactgcgggccctggtgggctggagctctggggacggaatcttctgccctggtggctccatctccaacatgtatgctgtaaatctggcc

SEQ ID NO: 123979 - DNA, 2122 bp, Homo sapiens
  Payload ID: 4337
  Gene Symbol: CSAD
  Gene Name: cysteine sulfinic acid decarboxylase
  Uniprot ID: Q9Y600
  ENST ID: ENST00000444623
  CDS Start-End: 269-1750
ccacggcttgcgagctactgaagcgctgccgtctgtacggacgacgctgcggtctttggggcttgctcctacctgccaggcgcggcctcccgctggctccctggccgcgcggcgcctcctccaggccccagcacaccctgccaaccccaccgccgcggctgcccccaccgggaccgagggtggctcacacctgtaatcccagcacgttgggaagccgaggagctacctgtgcaccctgcctccggctctcctgagcagagagatcctgatggctgactcagaagcactcccctcccttgctggggacccagtggctgtggaagccttgctccgggccgtgtttggggttgttgtggatgaggccattcagaaaggaaccagtgtctcccagaaggtctgtgagtggaaggagcctgaggagctgaagcagctgctggatttggagctgcggagccagggcgagtcacagaagcagatcctggagcggtgtcgggctgtgattcgctacagtgtcaagactggtcaccctcggttcttcaaccagctcttctctgggttggatccccatgctctggccgggcgcattatcactgagagcctcaacaccagccagtacacatatgaaatcgcccccgtgtttgtgctcatggaagaggaggtgctgaggaaactgcgggccctggtgggctggagctctggggacggaatcttctgccctggtggctccatctccaacatgtatgctgtaaatctggcccgctatcagcgctacccggattgcaagcagaggggcctccgcacactgccgcccctggccctattcacatcgaaggagtgtcactactccatccagaagggagctgcgtttctgggacttggcaccgacagtgtccgagtggtcaaggctgatgagagagggaaaatggtccccgaggatctggagaggcagattggtatggccgaggctgagggtgctgtgccgttcctggtcagtgccacctctggcaccactgtgctaggggcctttgaccccctggaggcaattgctgatgtgtgccagcgtcatgggctatggctgcatgtggatgctgcctggggtgggagcgtcctgctgtcacagacacacaggcatctcctggatgggatccagagggctgactctgtggcctggaatccccacaagctcctcgcagcaggcctgcaatgctctgcacttcttctccaggatacctcgaacctgctcaagcgctgccatgggtcccaggccagctaccttttccagcaggacaagttctacgatgtggctctggacacgggagacaaggtggtgcagtgtggccgccgtgtggactgtctgaagctgtggctcatgtggaaggcacagggcgatcaagggctggagcggcgcatcgaccaggcctttgtccttgcccggtacctggtggaggaaatgaagaagcgggaagggtttgagctagtcatggagcctgagtttgtcaatgtgtgtttctggttcgtaccccccagcctgcgagggaagcaggagagtccagattaccacgaaaggctgtcaaaggtggcccccgtgctcaaggagcgcatggtgaaggagggctccatgatgattggctaccagccccacgggacccggggcaacttcttccgtgtggttgtggccaactctgcactgacctgtgctgatatggacttcctcctcaacgagctggagcggctaggccaggacctgtgagccttctctgtcttgctgccggccttgataccacccctcacccgcagagtcactgcattccctcccagcctttgaggccgggtgcagtggctcacgcctgtaatcccagcactttgggaggccgaggcgggtggatcacttgaggtcaggagttcgagaccagcctggccaataaggtgaaaccctgtctctactaaaaatacaaaaattagccgagcatggtggcctgtgcctgtaaacccagctactcaggaggttggggcagaattgcttgaacccagggggcagaggttgcagtgagccgagattgcacccctgcactccaggctgggcaacagtacgagactctgttccaaaaaaaataaaaaagaa

SEQ ID NO: 123980 - DNA, 2080 bp, Homo sapiens
  Payload ID: 4337
  Gene Symbol: CSAD
  Gene Name: cysteine sulfinic acid decarboxylase
  ENST ID: ENST00000475890
  CDS Start-End: 50-853
gagctacctgtgcaccctgcctccggctctcctgagcagagagatcctgatggctgactcagaagcactcccctcccttgctggggacccagtggctgtggaagccttgctccgggccgtgtttggggttgttgtggatgaggccattcagaaaggaaccagtgtctcccagaaggtctgtgagtggaaggagcctgaggagctgaagcagctgctggatttggagctgcggagccagggcgagtcacagaagcagatcctggagcggtgtcgggctgtgattcgctacagtgtcaagactggtcaccctcggttcttcaaccagctcttctctgggttggatccccatgctctggccgggcgcattatcactgagagcctcaacaccagccagtacacatatgaaatcgcccccgtgtttgtgctcatggaagaggaggtgctgaggaaactgcgggccctggtgggctggagctctggggacggaatcttctgccctggtggctccatctccaacatgtatgctgtaaatctggcccgctatcagcgctacccggattgcaagcagaggggcctccgcacactgccgcccctggccctattcacatcgaaggaggtggggaagaggcacaggcccaaccctgggctcctgattctaatctccagccatgtcactactccatccagaagggagctgcgtttctgggacttggcaccgacagtgtccgagtggtcaaggctgatgagagagggaaaatggtccccgaggatctggagaggcagattggtatggccgaggctgagggtgctgtgccgttcctggtcagtgccacctctggcaccactgtgctaggggcctttgaccccctggaggcaattgctgatgtgtgccagcgtcatgggctatggctgcatgtggatggctgactctgtggcctggaatccccacaagctcctcgcagcaggcctgcaatgctctgcacttcttctccaggatacctcgaacctgctcaagcgctgccatgggtcccaggccagctaccttttccagcaggacaagttctacgatgtggctctggacacgggagacaaggtggtgcagtgtggccgccgtgtggactgtctgaagctgtggctcatgtggaaggcacagggcgatcaagggctggagcggcgcatcgaccaggcctttgtccttgcccggtacctggtggaggaaatgaagaagcgggaagggtttgagctagtcatggagcctgagtttgtcaatgtgtgtttctggttcgtaccccccagcctgcgagggaagcaggagagtccagattaccacgaaaggctgtcaaagtggctcacgcctgtaatcccagcactttgggaggccgaggcgggtggatcacttgaggtcaggagttcgagaccagcctggccaataaggtgaaaccctgtctctactaaaaatacaaaaattagccgagcatggtggcctgtgcctgtaaacccagctactcaggaggttggggcagaattgcttgaacccagggggcagaggttgcagtgagccgagattgcacccctgcactccaggctgggcaacagtacgagactctgttccaaaaaaaataaaaaagaacagcctttttaggccacagtgacctgcgcaatgtttatatgctttgacctactaactttctcctaactaaatatttgattttaggagagtgtttaaataaattacagtatgtctatatgatgaaatgttattttgccattaaaattttgtttacaaagataatttttattgacataaaaataactttaatgtaatttatgttgaaaaagctgaatacaagtctttatatagagtaatatttgagctgtgttcaaaaatacataggaaaagactgataaaatgaaatatggcaaaatgttaatagttttccctggaataggataataggcaattttaaaacagactcctttaaaaaaacaaacaaacaaaaaaaacatagacttctttatatcttttgagctccctcccttttattatgtaatgaatatgtgttgcttttgtaataggaaa

SEQ ID NO: 123981 - DNA, 455 bp, Homo sapiens
  Payload ID: 4337
  Gene Symbol: CSAD
  Gene Name: cysteine sulfinic acid decarboxylase
  ENST ID: ENST00000548698
  CDS Start-End: 50-455
gagctacctgtgcaccctgcctccggctctcctgagcagagagatcctgatggctgactcagaagcactcccctcccttgctggggacccagtggctgtggaagccttgctccgggccgtgtttggggttgttgtggatgaggccattcagaaaggaaccagtgtctcccagaagtgtcactactccatccagaagggagctgcgtttctgggacttggcaccgacagtgtccgagtggtcaaggctgatgagagagggaaaatggtccccgaggatctggagaggcagattggtatggccgaggctgagggtgctgtgccgttcctggtcagtgccacctctggcaccactgtgctaggggcctttgaccccctggaggcaattgctgatgtgtgccagcgtcatgggctatggctgcatgtggatgctgcctggggtgggagcgtcctgctgt

SEQ ID NO: 123982 - DNA, 558 bp, Homo sapiens
  Payload ID: 4337
  Gene Symbol: CSAD
  Gene Name: cysteine sulfinic acid decarboxylase
  ENST ID: ENST00000483632
  CDS Start-End: 1-429
attcagaaaggaaccagtgtctcccagaaggtctgtgagtggaaggagcctgaggagctgaagcagctgctggatttggagctgcggagccagggcgagtcacagaagcagatcctggagcggtgtcgggctgtgattcgctacagtgtcaagactggtcaccctcggttcttcaaccagctcttctctgggttggatccccatgctctggccgggcgcattatcactgagagcctcaacaccagccagtacacatatgaaatcgcccccgtgtttgtgctcatggaagaggaggtgctgaggaaactgcgggccctggtgggctggagctctggggacggaatcttctgccctgtgtcactactccatccagaagggagctgcgtttctgggacttggcaccgacagtgtccgagtggtcaaggctgatgagagagggaaaatggtccccgaggatctggagaggcagattggtatggccgaggctgagggtgctgtgccgttcctggtcagtgccacctctggcaccactgtgctaggggcctttgaccccctgga

SEQ ID NO: 123983 - DNA, 585 bp, Homo sapiens
  Payload ID: 4337
  Gene Symbol: CSAD
  Gene Name: cysteine sulfinic acid decarboxylase
  ENST ID: ENST00000498635
  CDS Start-End: 199-585
tgctactgaggtttttttttgggtgatgaaaatgttctggcgttagatagtgatgatggttgcaacaactttgtgaatttatgaaaaaaacacttaattgtacacttttcaccccacttcctctgccatcttggtcctgctgtcctgaggagctacctgtgcaccctgcctccggctctcctgagcagagagatcctgatggctgactcagaagcactcccctcccttgctggggacccagtggctgtggaagccttgctccgggccgtgtttggggttgttgtggatgaggccattcagaaaggaaccagtgtctcccagaaggtctgtgagtggaaggagcctgaggagctgaagcagctgctggatttggagctgcggagccagggcgagtcacagaagcagatcctggagcggtgtcgggctgtgattcgctacagtgtcaagactggtcaccctcggttcttcaaccagctcttctctgggttggatccccatgctctggccgggcgcattatcactgagagcctcaacaccagccagtacacatatgaaatcgcccccgtgtttgtgctcatggaagag

SEQ ID NO: 123984 - DNA, 1409 bp, Homo sapiens
  Payload ID: 4338
  Gene Symbol: CYHR1
  Gene Name: cysteine/histidine-rich 1
  Uniprot ID: Q6ZMK1
  ENST ID: ENST00000306145
  CDS Start-End: 521-1099
ccaaaccactatgcccacgcacgcacccacccaaacagagcgttttctggtccccgagctcctcccgaccccacccgctcctacggcctccaaccggccccccccaggtctcgaccctctcccccaggcctcgaccctccccccccagccgctctagccccgcccggccgctctagcctccgctcctctcgctggtggaggttcccgaccgcgctcgctcccgcaactgggggcacggcagaggaggcagggccgacggcggtgggcggtgcgttgcgcaggctcgggcctcccgctcgccgctgcgttgggaccgcgcagcccggtgtgtgcagtggcctcagggatccggaaagtctaggactgaacttctcctaacatccagtaatggggacctggaacctgggcttactagagtgccgcgcgtagggctccaggtcgctggcttctgcgcttccttcctctccaaagttgagtatctcctatctgtgtcctcgtacatactgccgcctgaggtgccatggcccccaagccgggggccgagtggagcacagccctgtcccatctggtgctgggagtggtgtctctgcacgcagccgtgagcacagccgaggcaagtcgaggggctgctgctggcttcctgctccaggtcttggctgccaccaccacgctggccccagggctgagcacacacgaagactgccttgctggagcctgggtggccaccgtcatcggccttccccttctggccttcgatttccactgggtgaatggggaccgctcctctgccaacctgctcctgggaggaggcatggtgctggcagtggctggcggccacctcggccctgagggccgctctgtggctggtcaggcaatgctgttggtggtcgcagtgaccatcctcattgtagctgtcttcacggccaacacttatgggatgtgggggggggcgatgctgggtgtggcaggcctcctgagccggctggaggaggacaggctgctgctgctaccgaaggaggatgtctgtcgctgggccttggctgtaggcagctgggcttactgccgggccctgcatacacagcgcctccagtgggagtgacagttggatacagccaggcagggtttctgccctgccgaacactttccctcccacctgcctgctcctggcgccttctccctaggggtagactcttctgcctactgaagtgggtttgctgcacattgactggtcaggggcagagtctgggtgctgtcctttggccacgtgtggggacttgtctagaccagaatgaaagggacagggtcccagacacgtttgggggtcctgattctgggctggacacggttgtggatccagagaagaggcctagtctccaataaatcttaggaattttgcaggaatatgaaaa

SEQ ID NO: 123985 - DNA, 1477 bp, Homo sapiens
  Payload ID: 4338
  Gene Symbol: CYHR1
  Gene Name: cysteine/histidine-rich 1
  Uniprot ID: Q6ZMK1
  ENST ID: ENST00000403000
  CDS Start-End: 589-1167
tcgctggtggaggttcccgaccgcgctcgctcccgcaactgggggcacggcagaggaggcagggccgacggcggtgggcggtgcgttgcgcaggctcgggcctcccgctcgccgctgcgttgggaccgcgcagcccggtaactgcgcacggctggcctcccggagtcctgcgccgtcgctcctcctggacccgggttcccaggacaacgcctcccggaacgcagggagcaggccgaggccgccgcgtgggcctgcagcgcctcgccgctctctcttccccaggcccgcactcccacttgggctccagggccccagggctgacgttccccccagcttagaccctgagtcgttttcccccgtttcccggctgaattaggttcttcttctccacaggtgtgtgcagtggcctcagggatccggaaagtctaggactgaacttctcctaacatccagtaatggggacctggaacctgggcttactagagtgccgcgcgtagggctccaggtcgctggcttctgcgcttccttcctctccaaagttgagtatctcctatctgtgtcctcgtacatactgccgcctgaggtgccatggcccccaagccgggggccgagtggagcacagccctgtcccatctggtgctgggagtggtgtctctgcacgcagccgtgagcacagccgaggcaagtcgaggggctgctgctggcttcctgctccaggtcttggctgccaccaccacgctggccccagggctgagcacacacgaagactgccttgctggagcctgggtggccaccgtcatcggccttccccttctggccttcgatttccactgggtgaatggggaccgctcctctgccaacctgctcctgggaggaggcatggtgctggcagtggctggcggccacctcggccctgagggccgctctgtggctggtcaggcaatgctgttggtggtcgcagtgaccatcctcattgtagctgtcttcacggccaacacttatgggatgtgggggggggcgatgctgggtgtggcaggcctcctgagccggctggaggaggacaggctgctgctgctaccgaaggaggatgtctgtcgctgggccttggctgtaggcagctgggcttactgccgggccctgcatacacagcgcctccagtgggagtgacagttggatacagccaggcagggtttctgccctgccgaacactttccctcccacctgcctgctcctggcgccttctccctaggggtagactcttctgcctactgaagtgggtttgctgcacattgactggtcaggggcagagtctgggtgctgtcctttggccacgtgtggggacttgtctagaccagaatgaaagggacagggtcccagacacgtttgggggtcctgattctgggctggacacggttgtggatccagagaagaggcctagtctccaataaatcttaggaattttgcaggaatatgaaaa

SEQ ID NO: 123986 - DNA, 2020 bp, Homo sapiens
  Payload ID: 4338
  Gene Symbol: CYHR1
  Gene Name: cysteine/histidine-rich 1
  Uniprot ID: Q6ZMK1
  ENST ID: ENST00000438911
  CDS Start-End: 135-1223
aatggggacctggaacctgggcttactagagtgccgcgcgtagggctccaggtcgctggcttctgcgcttccttcctctccaaagttgagtatctcctatctgtgtcctcgtacatactgccgcctgaggtgccatggcccccaagccgggggccgagtggagcacagccctgtcccatctggtgctgggagtggtgtctctgcacgcagccgtgagcacagccgaggcaagtcgaggggctgctgctggcttcctgctccaggtcttggctgccaccaccacgctggccccagggctgagcacacacgaagactgccttgctggagcctgggtggccaccgtcatcggccttccccttctggccttcgatttccactggtgtactaatggtcacttgatgtgcgctggctgttttatccacctactagcagatgcccggctgaaggaggagcaggccacgtgccccaattgtcgttgtgagatcagtaagagcctctgctgccggaacctggccgtggagaaagccgtgagcgagctgccttcagagtgtggcttctgcctgcgccagtttccccgctccctcctggagaggcaccagaaagaggaatgccaggacagggtaacccagtgcaagtacaaacgcatcggctgcccatggcacggccccttccatgagctgacggtgcacgaggctgcgtgcgcccacccgaccaagacaggcagtgagctgatggagatcctggatgggatggaccagagccaccgcaaggagatgcagctgtacaacagcatcttcagcctgctcagcttcgagaagattggctacacagaggtccagttccggccgtaccgcacagacgacttcatcacgcgcctgtactatgagacgcccaggttcacagtgctgaaccagacgtgggtcctgaaggctcgagtcaacgactcggagcgtaaccccaacctgtcctgcaagcgtacgctctccttccagctcctcctcaagagcaaggtcacggcaccgctggagtgctccttcctgctgctcaagggcccctacgacgacgtgaggatcagccccgtcatctaccactttgtcttcaccaacgagagcaacgagacggactacgtgccactgcccatcattgactccgtggagtgcaacaagctgctggctgccaagaacatcaacctgcggctcttcctgttccagatacagaagtagggcggggcctcaggatgtccgaggagcccacgggcggcatcccagcaccgctgccctgtccacctggctggcagctgcttcacaggactatctgatcactttagcaaaggaggagaacaaacgaagccaacacagggcaagtctgcatgcgtgcgcgacggggcccccgcctccggctcacccccccgacccctgcctcccctccttccgagggccgccagaggctgggctgacccgaagaggagacggtgcaccaggcgccccgaggctcagagacggtggcagcaaggaggccgagaggcacagcgaccctgccccagcccttctgtgcagtcaggcggcggtgctgctccatccctgcgggttccggcggggcgcgggggccttgctgacatcagacgggatatccgaatatctgatagcaattaaaaggcagccttgtttcgtactttctgttttgttcgaggggaaggcatggctgtgaatggacagcgtgggggctttggtttggcctgggggtcagagcctgccccgcccccatctgtgtgcccgcacacgtcccccgaggaaagactcagagacactgcctccccctacactctgtcatggggtcttgagactgaggcttgggcaggaagatccaggtagggtcggggctgccctggccaaccggccgctcccagggagacaggactcagccaccagggctcagcaggcattttccgaaagcagggtgaaattgtctcttcccaggaaaaagattaaactccttgcaggctcttggataagttacacaa

SEQ ID NO: 123987 - DNA, 1162 bp, Homo sapiens
  Payload ID: 4338
  Gene Symbol: CYHR1
  Gene Name: cysteine/histidine-rich 1
  Uniprot ID: Q6ZMK1
  ENST ID: ENST00000424149
  CDS Start-End: 274-852
cccaaacagagcgttttctggtccccgagctcctcccgaccccacccgctcctacggcctccaaccggccccccccaggtgtgtgcagtggcctcagggatccggaaagtctaggactgaacttctcctaacatccagtaatggggacctggaacctgggcttactagagtgccgcgcgtagggctccaggtcgctggcttctgcgcttccttcctctccaaagttgagtatctcctatctgtgtcctcgtacatactgccgcctgaggtgccatggcccccaagccgggggccgagtggagcacagccctgtcccatctggtgctgggagtggtgtctctgcacgcagccgtgagcacagccgaggcaagtcgaggggctgctgctggcttcctgctccaggtcttggctgccaccaccacgctggccccagggctgagcacacacgaagactgccttgctggagcctgggtggccaccgtcatcggccttccccttctggccttcgatttccactgggtgaatggggaccgctcctctgccaacctgctcctgggaggaggcatggtgctggcagtggctggcggccacctcggccctgagggccgctctgtggctggtcaggcaatgctgttggtggtcgcagtgaccatcctcattgtagctgtcttcacggccaacacttatgggatgtgggggggggcgatgctgggtgtggcaggcctcctgagccggctggaggaggacaggctgctgctgctaccgaaggaggatgtctgtcgctgggccttggctgtaggcagctgggcttactgccgggccctgcatacacagcgcctccagtgggagtgacagttggatacagccaggcagggtttctgccctgccgaacactttccctcccacctgcctgctcctggcgccttctccctaggggtagactcttctgcctactgaagtgggtttgctgcacattgactggtcaggggcagagtctgggtgctgtcctttggccacgtgtggggacttgtctagaccagaatgaaagggacagggtcccagacacgtttgggggtcctgattctgggctggacacggttgtggatccagagaagaggcctagtctccaataaatcttaggaattttgcaggaatatgaaaa

SEQ ID NO: 123988 - DNA, 853 bp, Homo sapiens
  Payload ID: 4338
  Gene Symbol: CYHR1
  Gene Name: cysteine/histidine-rich 1
  ENST ID: ENST00000533764
  CDS Start-End: 423-853
gaggcagggccgacggcggtgggcggtgcgttgcgcaggctcgggcctcccgctcgccgctgcgttgggaccgcgcagcccggtaactgcgcacggctggcctcccggagtcctgcgccgtcgctcctcctggacccgggttcccaggacaacgcctcccggaacgcagggagcaggccgaggccgccgcgtgggcctgcagcgcctcgccgctctctcttccccaggtgtgtgcagtggcctcagggatccggaaagtctaggactgaacttctcctaacatccagtaatggggacctggaacctgggcttactagagtgccgcgcgtagggctccaggtcgctggcttctgcgcttccttcctctccaaagttgagtatctcctatctgtgtcctcgtacatactgccgcctgaggtgccatggcccccaagccgggggccgagtggagcacagccctgtcccatctggtgctgggagtggtgtctctgcacgcagccgtgagcacagccgaggcaagtcgaggggctgctgctggcttcctgctccaggtcttggctgccaccaccacgctggccccagggctgagcacacacgaagactgccttgctggagcctgggtggccaccgtcatcggccttccccttctggccttcgatttccactgggtgaatggggaccgctcctctgccaacctgctcctgggaggaggcatggtgctggcagtggctggcggccacctcggccctgagggccgctctgtggctggtcaggcaatgctgttggtggtcgcagtgaccatcctcattgtagctgtcttcacggccaacacttatgggatgtgggggggggc

SEQ ID NO: 123989 - DNA, 1870 bp, Homo sapiens
  Payload ID: 4338
  Gene Symbol: CYHR1
  Gene Name: cysteine/histidine-rich 1
  ENST ID: ENST00000530374
  CDS Start-End: 208-1422
cgaaaacaaagatggcggccgtgccggggtcggtggccgcggcggctgtggggctacgcgcgggccgggcccactgaggcggcggcgcagggagcggggctgcgggttcgcggcggcggcggcaggagagcggcgggagcgcgcggcgcccctaacttctagtcgggggagcgcgccggcatccgcccgccgggccggccggccgctatgtccggcgccgaggaggccggcgggggcggcccggccgcggggcccgcgggctccgtgccggccggggtcggggtcggggtcggagccgggcccggggcggccgccgggcaggcggcggcggcggctctgggcgaggcggcggggcctgggctcccggacgaggcgggcttggcgggcgcccggcagctacagctgcaggaggcggccggcgaccccgacgcgccgcccaagaagcggctgcgggcagccgaggcggccgaggcggcggcggcggcggcggcggccggcagcgggaaactggaggagcggctctactcggtgctgtgctgcaccgtgtgcctggacctgcccaaggcctccgtgtaccagtgtactaatggtcacttgatgtgcgctggctgttttatccacctactagcagatgcccggctgaaggaggagcaggccacgtgccccaattgtcgttgtgagatcagtaagagcctctgctgccggaacctggccgtggagaaagccgtgagcgagctgccttcagagtgtggcttctgcctgcgccagtttccccgctccctcctggagaggcaccagaaagaggaatgccaggacagggtaacccagtgcaagtacaaacgcatcggctgcccatggcacggccccttccatgagctgacggtgcacgaggctgcgtgcgcccacccgaccaagacaggcagtgagctgatggagatcctggatgggatggaccagagccaccgcaaggagatgcagctgtacaacagcatcttcagcctgctcagcttcgagaagattggctacacagaggtccagttccggccgtaccgcacagacgacttcatcacgcgcctgtactatgagacgcccaggttcacagtgctgaaccagacgtgggtcctgaaggctcgagtcaacgactcggagcgtaaccccaacctgtcctgcaagcgtacgctctccttccagctcctcctcaagagcaaggtcacggcaccgctggagtgctccttcctgctgctcaagggcccctacgacgacgtgaggatcagccccgtcatctaccactttgtcttcaccaacgagagcaacgagacggactacgtgccactgcccatcattgactccgtggagtgcaacaagctgctggctgccaagaacatcaacctgcggctcttcctgttccagatacagaagtagggcggggcctcaggatgtccgaggagcccacgggcggcatcccagcaccgctgccctgtccacctggctggcagctgcttcacaggactatctgatcactttagcaaaggaggagaacaaacgaagccaacacagggcaagtctgcatgcgtgcgcgacggggcccccgcctccggctcacccccccgacccctgcctcccctccttccgagggccgccagaggctgggctgacccgaagaggagacggtgcaccaggcgccccgaggctcagagacggtggcagcaaggaggccgagaggcacagcgaccctgccccagcccttctgtgcagtcaggcggcggtgctgctccatccctgcgggttccggcggggcgcgggggccttgctgacatcagacgggatatccgaatatctgatagcaattaaaaggcagccttgtttcgta

SEQ ID NO: 123990 - DNA, 1012 bp, Homo sapiens
  Payload ID: 4338
  Gene Symbol: CYHR1
  Gene Name: cysteine/histidine-rich 1
  ENST ID: ENST00000526887
  CDS Start-End: 274-1012
cagggccgacggcggtgggcggtgcgttgcgcaggctcgggcctcccgctcgccgctgcgttgggaccgcgcagcccggtgtgtgcagtggcctcagggatccggaaagtctaggactgaacttctcctaacatccagtaatggggacctggaacctgggcttactagagtgccgcgcgtagggctccaggtcgctggcttctgcgcttccttcctctccaaagttgagtatctcctatctgtgtcctcgtacatactgccgcctgaggtgccatggcccccaagccgggggccgagtggagcacagccctgtcccatctggtgctgggagtggtgtctctgcacgcagccgtgagcacagccgagtgtactaatggtcacttgatgtgcgctggctgttttatccacctactagcagatgcccggctgaaggaggagcaggccacgtgccccaattgtcgttgtgagatcagtaagagcctctgctgccggaacctggccgtggagaaagccgtgagcgagctgccttcagagtgtggcttctgcctgcgccagtttccccgctccctcctggagaggcaccagaaagaggaatgccaggacagggtaacccagtgcaagtacaaacgcatcggctgcccatggcacggccccttccatgagctgacggtgcacgaggctgcgtgcgcccacccgaccaagacaggcagtgagctgatggagatcctggatgggatggaccagagccaccgcaaggagatgcagctgtacaacagcatcttcagcctgctcagcttcgagaagattggctacacagaggtccagttccggccgtaccgcacagacgacttcatcacgcgcctgtactatgagacgcccaggttcacagtgctgaaccagacgtgggtcctgaaggctcgagtcaacgactcggagcgtaaccccaacctgtcctgcaagcgtacgctctccttccagctcctcctcaagagcaaggtcacggcaccgctgg

SEQ ID NO: 123991 - DNA, 581 bp, Homo sapiens
  Payload ID: 4338
  Gene Symbol: CYHR1
  Gene Name: cysteine/histidine-rich 1
  ENST ID: ENST00000530637
  CDS Start-End: 454-581
atgcccacgcacgcacccacccaaacagagcgttttctggtccccgagctcctcccgaccccacccgctcctacggcctccaaccggccccccccaggtctcgaccctctcccccaggcctcgaccctccccccccagccgctctagccccgcccggccgctctagcctccgctcctctcgctggtggaggttcccgaccgcgctcgctcccgcaactgggggcacggcagaggaggcagggccgacggcggtgggcggtgtgtgcagtggcctcagggatccggaaagtctaggactgaacttctcctaacatccagtaatggggacctggaacctgggcttactagagtgccgcgcgtagggctccaggtcgctggcttctgcgcttccttcctctccaaagttgagtatctcctatctgtgtcctcgtacatactgccgcctgaggtgccatggcccccaagccgggggccgagtggagcacagccctgtcccatctggtgctgggagtggtgtctctgcacgcagccgtgagcacagccgaggcaagtcgaggggctgctgctggcttcctgctcca

SEQ ID NO: 123992 - DNA, 3101 bp, Homo sapiens
  Payload ID: 4339
  Gene Symbol: CYYR1
  Gene Name: cysteine/tyrosine-rich 1
  Uniprot ID: Q96J86
  ENST ID: ENST00000299340
  CDS Start-End: 345-809
agtcgttgccacccgcggagatgaaatgtgagcctgggtggccaaggacgccggagtggccgccttccccgcgcctgagcgcagtggggcgagacaaagagacctgggcccccagcgcagcccgtctcgggccacgggcgccccagctccgcggagtcccgcagtcgctggcccgggacgcgcccggcccgggctcccttggaaggctccctaggcaatggccgggtctctgctccacccggctctcaggagcgctgctctctccatctgatcgccctccatcctccccattccctccggttccgggctctcccttcgctccaagcctcaggccaccggcttggatggacgctccgaggctacccgtgcgtccaggggtcttgcttccgaagttggtcctgctctttgtctacgcagatgattgccttgctcagtgtggcaaagattgcaaatcttactgctgtgatggaaccacgccctactgttgctcctactacgcttatattgggaatatcctctcgggcactgcaattgcgggcattgtttttggaatagtatttatcatgggggtcattgctgggattgccatatgcatctgcatgtgcatgaagaaccacagggcgacccgcgtgggcatcctcaggacgactcacatcaacaccgtctcctcctatcctggaccaccaccctacggtcacgaccacgagatggaatactgtgcagacttgcctcctccatactcccccaccccacagggtccagcacagcgttctccaccccctccttatcctggaaacgcaaggaaataatctatctcccagaacagaacatgtgccaatgggcgatcttgcctggaataaaatgcctctactcagaaacaggcaggaaagaattgctccaaggaatactttttggggtcagataatgtgtcaggtggaatatccctgctaggagatataggatttctactctgctcaaagctgaccccatctggagtattaatgtttggttctatggaaccacattttaagagatctgctgatccacctaagcacattcagggaagagtaatgtaattgacaaaatatctgataatcatgttgtttaagggctaggtgaagaaagtttcagtattgatcctggaaaaaaagaagatctaagtaggatgggagaatgatttggcccacacaaggaagcaactttattctatatagctttaaaagtcagaactagaattgttcattctttcattcatcaataaatgtattttgagtgcctaagagtttactatgtgcctagcactgtttgaggtcctgatggaagttacaggacgggtactctggttttagtacaagaaagagcaatgactagattgctttgtgaagctcttggtagagacacgctccagaagggataacaaaatcaaatagtagatgggttcattgggcctcagaagttctgctcgtattttaggtgggtgtgaagtgaatttctatatgtccaggagtgaatacaacagaaagagttggatcttatttatttaattagggagttaaaacaagaccaaaaagactcaacagccgcttgaagccaagaactcttcaatgccagctactgccacctaaaaatcatctggctttatagtggatcagaataaaggttattctaactgtggggagaaaaaaaaaattgtatcaagttccacaggtagcagacacttcacttccaagtaaaagatgagaaatcaattattcccacaggattttaggtcagggagcaaaaatctcagaacttgaccatgaagatacacaacagactcgcaaaaataaagtgggaaatgaagttcagattcccttctgtagatttccttaaaactattatttttttcttcttcgtaaaattttgataatctgttctcttaaaaaagttaatgacacaattaagatactgacatcaaattgttgccttttaccaaaatgcaaattttatgaagtgcctacctttatatgtataaagcatttaataaataattctaatgtgccatattttgctgtgagtgaccttaacatttatatttttatatgaattgtttcatgtatttataaaaattgtatattgaacattggaaatagatgattagatttttgtgtcattttacaattaaatctaaaatgcttaatccaatatcatcatcaaaattcagtgaaatcccaaaacagtgccaagaattttgctgaatgaaacaatcaaacaaagcattttaaggtgtaagttatagtacctgtacttgcagataagaagcttactatatcattattataagtagcatatattactttcaaatacctatattagaaagatattgatctgactgaaatataacctacctgccagtaaggtccaaaggctgaatttgttttgaatgagttccttgatctttaagcactgatgattttcttatatatgaggatgcaaagcattcaagagtttcagcctgttctggtgaggggctccctgacttacataaagttttcagtgcaattttaatagtacatatgctttaatttatttttcttctgcgtgtggtcagacccaattacactgtggctaagactctcaaagtgccagggtttctgtgatgattctgagaatgctgaatacaaatataccttatattctttaaggaaaacggaaaggaaagatcagcagaaatagggttttctcatcttcaccatcaataaacatttattgcgtacctcctatattctgcaaattttccccaaatagaagccagttcagtccacaccatctcttctttgagttgtttatggcctcccttaaggcattttacaaacccataagcctacaatagatgagtatttttactatttgtattaagtgtcataatagcatcaatgtgcacattaccagtatagactgttggagttcactgattgttttcatagatgatgcttcttggggaaaaatagtataggatgtgaaagttttgaattacggttatttaaaaactaacatttgctatggccaaagtgtttacaataagcaataaagtgaaagaacctattataacacagattata

SEQ ID NO: 123993 - DNA, 735 bp, Homo sapiens
  Payload ID: 4339
  Gene Symbol: CYYR1
  Gene Name: cysteine/tyrosine-rich 1
  Uniprot ID: Q96J86
  ENST ID: ENST00000400043
  CDS Start-End: 237-635
cccccagcgcagcccgtctcgggccacgggcgccccagctccgcggagtcccgcagtcgctggcccgggacgcgcccggcccgggctcccttggaaggctccctaggcaatggccgggtctctgctccacccggctctcaggagcgctgctctctccatctgatcgccctccatcctccccattccctccggttccgggctctcccttcgctccaagcctcaggccaccggcttggatggacgctccgaggctacccgtgcgtccaggggtcttgcttccgaagttggtcctgctctttgtctacgcagatgattgccttgctcagtgtggcaaagattgcaaatcttactgctgtgatggaaccacgccctactgttgctcctactacgcttatattgggaatatcctctcgggcactgcaattgcgggcattgtttttggaatagtatttatcatgggggtcattgctgggattgccatatgcatctgcatgtgcatgaagaaccacagggcgacccgcgtgggcatcctcaggacgactcacatcaacaccgtctcctcctatcctgaatatgaactccatgaggcagagatcttggtctattttgttcaacactctattccaagcatgtaagaccaggcctggtacataatgggcactcagctgaatgaatgatgaacacaactcatgaaaagacctgaattaatcatatatcaataccctagggaattga

SEQ ID NO: 123994 - DNA, 700 bp, Homo sapiens
  Payload ID: 4340
  Gene Symbol: CRCT1
  Gene Name: cysteine-rich C-terminal 1
  Uniprot ID: Q9UGL9
  ENST ID: ENST00000368790
  CDS Start-End: 74-373
gcccattccagttggagaacgtagtgagtctttcagtggagccagggtctggtttgtcgtgaggagctccgcgatgtcctctcaacagagcgccgtttccgccaaaggcttttccaaggggtcgtcccagggccccgctccgtgtcccgccccggcgcccaccccggcgcccgcctcctcctcctcctgctgcggctccggcaggggctgctgcggcgactcaggctgctgcggctccagctccaccagttgctgctgcttcccaaggagacgccgccgacagcggagtagtggttgctgctgctgcgggggcggcagccagaggtcccagcgctccaacaaccggagctcaggatgctgctccggctgctgagaggcccgcaacccccagcgctgcgctagagaaacccgcccagcccagagcgggcccgccccgctgcggctcccacgcggggctgggcctcggagtttgccccgtaaagcgaattgcactttgatgttcagaaacccactttgttctcagccacgcaaaactccctgaccccgatgtgatttttctccccggggattcgagagccatgcgtgggacactggaccctactgtctacacgggcttgcacacagcaggtgctcagcaaatgtctattgatttgattgtcttttgaagatgtcataataaagcttctacctcctgagaaca

SEQ ID NO: 123995 - DNA, 4158 bp, Homo sapiens
  Payload ID: 4341
  Gene Symbol: CHIC1
  Gene Name: cysteine-rich hydrophobic domain 1
  Uniprot ID: Q5VXU3
  ENST ID: ENST00000373502
  CDS Start-End: 78-752
gttccccctcctcttgcagcacctcggcaggttcaaactcttctccgggagcgtggcggcgatcgcgaggtcacgtgatgagcatcctgctgcccaacatggcggagttcgacaccatctcggaactggaggaggaggaggaagaagaagcggcaacgtcgtcgtcgtcgccgtcgtcgtcgtcgtcggtatctgggcccgacgatgacgaggaggatgaggaggaagaggaggaagaggaggaggaggaagaagaggaggaggaggaagaggaggaggaagcgccgcccccgcctcgggtagtgagcgaggagcatctgcggagatatgctcccgaccctgtattagtgcggggtgccggccacatcactgtgtttggcttgagcaacaagtttgatactgaatttccctccgttctaacagggaaggtggccccagaagaatttaaaaccagcattggccgtgtgaatgcatgtttgaaaaaggctctcccggtcaatgtgaaatggctgctgtgtggttgtctctgctgctgttgcacactgggttgcagcctatggcctgttatttgtctcaacaaaagaaccagaagatcaattcagaagttaatagaatgggaaaataacagattatatcacaagcttgctttgcactggaagttgactaagaggaaatgtgaaactagcaatatgatggagtatgtaatactaatagaattcttaccaaaatatcccatattccgacctgactgaggagttttatccagtcacttctgtgttacctgtcatttcctacccttagtgccttgtagatttggaatgaagatggtctcctttgctgtgttcaacttattctttataatggtagaatattcttctcgctcttttgtgttggtttatgaagaaaatttgcacatcttttttgtctttcaatgaggcttgtgttttgcactctcaattttaaatacacacacatgcgtgtgtgcatatacatatatagatagttgccattaaagataaatcatcagtgttggtgtttaaaaaacaaaaacttgttctgagcatgctgccttataattttcatactcattgtttctaaactcgcatcatttttctaggctacttgatgctctgtaatcccttactggacaaacttaaataagcttttggtagcttttagaaatggttttactctgcttttaaaggacatgcttttaaaggacatgcaattaatggcactggttttgtcctgcactttgctttatcacttatgttagtggataaaatatttaaactcctaaagacttgtaaatattgcctctttgcataatgtaaaatgtggtatgccatggtttacataatgtaacattactcttattgtattgccaacaattttacatagattttaatatgaatgaagtttgcaagcatccctttgaatgtagaaactgctaacatgctgttttatggcaaggccataatgagtatgttaagaatttcaggtgtagggcaaggttgccctttgtaacaagtggactaaaattgaaattattatctcagatattctgtattgcacctgaaaccatgacctttatttttccatttcgtttaataatttccattttgttgtctactccttcccacaaaaaaactatttgacatctgacacatttcacagtctcactatcctgcatttattagccttttcttcctttgaaaatacacacaattatgacttttaaggagtattttgagatttcagacatcttcagaaggtatctagaccctcttgaaagccactaacacctttctgcagttctgatattctagtttgagaaagagagagaactatttgagaagctgtagctaaagagtatatagcagctgattcataattgaaaaaaaattctcaattctgtttttgatgatcctttataaaacattaatgaggaaagacaagtgtttagacaaaagtattttagtttataaattcagcacatatgtaacatttatttggtccatatttctctatttttcttcacaattaaaatgattgctagcaccacacaactagaatttgaaaattcagtataatgaaagctttatatcacattaattcaactgcaaatgtatgcctgtttgtaggcattatttgtaattcatagtgctaaaaataaaagtgtctagggctcagtaatattttgtcatcttactcttactgcttttagtaaaccttttaggcaagattcatctcagtgaagtgaacaatcatttcttcatagaaggtcaagcctttttaagccactcttaaaatttatgcctaatttgaaatccacagtccttgaccagtttaaaaaagagaggaaaaagaagacactattttatatgtgattataattgtttgcacaaacacttttccaccttcctctgtgccccattacctctgtgccactcagtcaccccaaatctctaacctttagtaatgtgtatgcctgcaaatattatgtgtttgcctgctgcaaaattgaaggtgtatttttatagacaaggtagaagcctctgaaaatgtataccaaatgtcttgttttgtagctaaggtcgggaaaaattgtatctgaggtttatgttccagctaatgttatcaaatttatgcttcaaactgtgatattttaataccaaaatcgattttcagcataatacaaaatatctcattttcactgatagaaaattgcttttaagtgttgatccttagaaatcttatttttttctataaccttagaatttgatcatatgatggtcataggaactttttctgccatgtataaatcacacttggttttgctcaaagaacagcatgaagtggtgaattgtttccatgaaacaattattgagaatgggaatacagtatatctggaaatgacacagtataatacaagttacagtagcatttgtcacaaaaaccacttgtcagcatgtgtaaacttaattttaaagcctattctaatcactcgagtttattattttattgttcgctatgctggttgactcatcttagtttcttcaactacccaaaaaaataccaatttttttcctctcttgtatgactactttttcaaactgttttcctttgcagggggctgattagcaattgagtattttgtaatgtttgggcggggttgctttgttttcagtgaaattggttgcagtgaatgctaaaatgacacagcacactggtgattaattcctcccccatggagccttttttctgttatgcttaggatagaacatacttgtaattttccattaggttagtaacatacttttgtgaaagttgtttttagactgaagaaagtaattttgaatttctttgttacataatattcctttatgaaacttgtgatagtttccagagcaaaacatgtatttgccaaagtatataaatctcacaaggctttaagattacaagctaaaattgttttttaaaattaatgttccaatgtttctcatttggcccaagattctggcttcataaatttgtccaactggctatttttaagcttgtcctaaaagccaataacatgtttattcctaataactaatatgggcaagtgttatttacagatttattaactccatcccagatatgtctccactctttgttccctcctaatgctaatttaggaaagagaccactgtagtaaaactttagaagaagatggagaagtgccttgtctttttagaacaaagataacacattacgtgtaaggaagcataataaatgaattggtagatgattagattagaaatcatccttttcaactaggtctaagaatactttactagtgtattatcttttatttattatgtaaagcttctttccttccttttccccaatcatgatatattagtgacaaaatattacagaaccggactatcagtcacttaaaaaaacagtataattctaatgctagtaaacatgtaatttaatttagttctggaaggacagttgtctttgattaaagccccaccaaaacccatttaagtatttaatgtacatactattcatattattatggcctgtaaacactaatatctgagcaatcaaactgttttatctaccatttttgatgaaatttgaataaagtttaaaaacgtgtaa

SEQ ID NO: 123996 - DNA, 6797 bp, Homo sapiens
  Payload ID: 4341
  Gene Symbol: CHIC1
  Gene Name: cysteine-rich hydrophobic domain 1
  Uniprot ID: Q5VXU3
  ENST ID: ENST00000373504
  CDS Start-End: 86-700
ttcatttcgttccccctcctcttgcagcacctcggcaggttcaaactcttctccgggagcgtggcggcgatcgcgaggtcacgtgatgagcatcctgctgcccaacatggcggagttcgacaccatctcggaactggaggaggaggaggaagaagaagcggcaacgtcgtcgtcgtcgccgtcgtcgtcgtcgtcggtatctgggcccgacgatgacgaggaggatgaggaggaagaggaggaagaggaggaggaggaagaagaggaggaggaggaagaggaggaggaagcgccgcccccgcctcgggtagtgagcgaggagcatctgcggagatatgctcccgaccctgtattagtgcggggtgccggccacatcactgtgtttggcttgagcaacaagtttgatactgaatttccctccgttctaacagggaaggtggccccagaagaatttaaaaccagcattggccgtgtgaatgcatgtttgaaaaaggctctcccggtcaatgtgaaatggctgctgtgtggttgtctctgctgctgttgcacactgggttgcagcctatggcctgttatttgtctcaacaaaagaaccagaagatcaattcagaagttaatagaatgggaaaataacagattatatcacaaggtaatactaatagaattcttaccaaaatatcccatattccgacctgactgaggagttttatccagtcacttctgtgttacctgtcatttcctacccttagtgccttgtagatttggaatgaagatggtctcctttgctgtgttcaacttattctttataatggtagaatattcttctcgctcttttgtgttggtttatgaagaaaatttgcacatcttttttgtctttcaatgaggcttgtgttttgcactctcaattttaaatacacacacatgcgtgtgtgcatatacatatatagatagttgccattaaagataaatcatcagtgttggtgtttaaaaaacaaaaacttgttctgagcatgctgccttataattttcatactcattgtttctaaactcgcatcatttttctaggctacttgatgctctgtaatcccttactggacaaacttaaataagcttttggtagcttttagaaatggttttactctgcttttaaaggacatgcttttaaaggacatgcaattaatggcactggttttgtcctgcactttgctttatcacttatgttagtggataaaatatttaaactcctaaagacttgtaaatattgcctctttgcataatgtaaaatgtggtatgccatggtttacataatgtaacattactcttattgtattgccaacaattttacatagattttaatatgaatgaagtttgcaagcatccctttgaatgtagaaactgctaacatgctgttttatggcaaggccataatgagtatgttaagaatttcaggtgtagggcaaggttgccctttgtaacaagtggactaaaattgaaattattatctcagatattctgtattgcacctgaaaccatgacctttatttttccatttcgtttaataatttccattttgttgtctactccttcccacaaaaaaactatttgacatctgacacatttcacagtctcactatcctgcatttattagccttttcttcctttgaaaatacacacaattatgacttttaaggagtattttgagatttcagacatcttcagaaggtatctagaccctcttgaaagccactaacacctttctgcagttctgatattctagtttgagaaagagagagaactatttgagaagctgtagctaaagagtatatagcagctgattcataattgaaaaaaaattctcaattctgtttttgatgatcctttataaaacattaatgaggaaagacaagtgtttagacaaaagtattttagtttataaattcagcacatatgtaacatttatttggtccatatttctctatttttcttcacaattaaaatgattgctagcaccacacaactagaatttgaaaattcagtataatgaaagctttatatcacattaattcaactgcaaatgtatgcctgtttgtaggcattatttgtaattcatagtgctaaaaataaaagtgtctagggctcagtaatattttgtcatcttactcttactgcttttagtaaaccttttaggcaagattcatctcagtgaagtgaacaatcatttcttcatagaaggtcaagcctttttaagccactcttaaaatttatgcctaatttgaaatccacagtccttgaccagtttaaaaaagagaggaaaaagaagacactattttatatgtgattataattgtttgcacaaacacttttccaccttcctctgtgccccattacctctgtgccactcagtcaccccaaatctctaacctttagtaatgtgtatgcctgcaaatattatgtgtttgcctgctgcaaaattgaaggtgtatttttatagacaaggtagaagcctctgaaaatgtataccaaatgtcttgttttgtagctaaggtcgggaaaaattgtatctgaggtttatgttccagctaatgttatcaaatttatgcttcaaactgtgatattttaataccaaaatcgattttcagcataatacaaaatatctcattttcactgatagaaaattgcttttaagtgttgatccttagaaatcttatttttttctataaccttagaatttgatcatatgatggtcataggaactttttctgccatgtataaatcacacttggttttgctcaaagaacagcatgaagtggtgaattgtttccatgaaacaattattgagaatgggaatacagtatatctggaaatgacacagtataatacaagttacagtagcatttgtcacaaaaaccacttgtcagcatgtgtaaacttaattttaaagcctattctaatcactcgagtttattattttattgttcgctatgctggttgactcatcttagtttcttcaactacccaaaaaaataccaatttttttcctctcttgtatgactactttttcaaactgttttcctttgcagggggctgattagcaattgagtattttgtaatgtttgggcggggttgctttgttttcagtgaaattggttgcagtgaatgctaaaatgacacagcacactggtgattaattcctcccccatggagccttttttctgttatgcttaggatagaacatacttgtaattttccattaggttagtaacatacttttgtgaaagttgtttttagactgaagaaagtaattttgaatttctttgttacataatattcctttatgaaacttgtgatagtttccagagcaaaacatgtatttgccaaagtatataaatctcacaaggctttaagattacaagctaaaattgttttttaaaattaatgttccaatgtttctcatttggcccaagattctggcttcataaatttgtccaactggctatttttaagcttgtcctaaaagccaataacatgtttattcctaataactaatatgggcaagtgttatttacagatttattaactccatcccagatatgtctccactctttgttccctcctaatgctaatttaggaaagagaccactgtagtaaaactttagaagaagatggagaagtgccttgtctttttagaacaaagataacacattacgtgtaaggaagcataataaatgaattggtagatgattagattagaaatcatccttttcaactaggtctaagaatactttactagtgtattatcttttatttattatgtaaagcttctttccttccttttccccaatcatgatatattagtgacaaaatattacagaaccggactatcagtcacttaaaaaaacagtataattctaatgctagtaaacatgtaatttaatttagttctggaaggacagttgtctttgattaaagccccaccaaaacccatttaagtatttaatgtacatactattcatattattatggcctgtaaacactaatatctgagcaatcaaactgttttatctaccatttttgatgaaatttgaataaagtttaaaaacgtgtaagcctttgaacaaatgtatgaaagctttaaaagatcattagcacttttattttgtttacaaataagctgccatttaaaaaaataaaacctcactacttgaacataaagctcccaaacaatattgtattaaaatgtactatattgacctaggaggatatagaaattatattcacctgattaactggagcagtttcacatagtagaaatactttttgctaatttgattataagtgctcaaatttattgaaattagattctcatgcctataaaagtatactttaaaaatattttgcaacaactgtcaaattatttgggttcctttaaatagcaaacaattgggaaattttccataaaaatgaataggttttattaatacctgttcatgtagtatgtggactaaaacaattgatatatatctgtatgtaaaaatgaatgatcttatcttgccccaaatttttcttacctgattctgagccagcctttttgttttgatggcaccctgtgagtatgttccattttctgtgaactttgtcaaattcatactatatgaggaaatgatctaatattgtgggctccaggcaggtcatcttaattgcatgtctgtctcttctgtaaaatgatgaggtggaacctagagctggacaaaaaattagagatcacttaacattctgtgattcaaggaattcttaggacatttttactctatagaatctcagaatgattattctcagatctactgtccttggtggaaactctcacagtgccttgcatgcagtaaaagtttgatttgccgactggctgacgtgttaattatcacacagactccaagaacctgatgcttgctagaccttagttccttggtgatgctaagagtaaatgtagttttcctaggaactgagcactgaggtctgtgtcctttgcctgtgtagaatctgtctatgcagttggtattcaggcaagaattttagctgtaacaacaatggaaatattggaggacccactttggcatttatgtaaagatttcatatcctatccaacatttactttagtgtctaatcaaattccataccctcaaaaagatctgttggaacaaattgataaaattaggtggaaaggaaagtggtatgggactcaaatacaagtcacttctggtttaattattggctctgctgcttaattcctctgtacctcacgtcctcattgtcgaagtggggacaataatctggacctacctcacaggggaattgaggatattttcatatattagtgtgctttgaagttgactgaaagatatactggatatcataattatataatttctaaatagatttctttaaatccatgctatgttttctttttcagtcaggtcctacagaatgactattgcacttggtctattgttttaatagtaaattttgttattaatctcctatgtgttaaacgtgggtaattgtattatgttaatacatacttagggaggaaaagcaggtggatgtaaatcagtgattcccaacttcagcagatgatagcagtggagggtatccttgagctttttgtaatatttcaaaaagtatattagaaattatacatttacccataatattcctgcttcacaagtcaattaagacattgaatttccattcattttgcctatattctctcaaaagctgtgaatggcagtatgtttttgattaataataaaataagaaatcctattatgtgcaacttattaaatacttgggaacatgggaaaagaataatgaagggattcttatggtgaaaatgttgggaaccacttttataaaggaactaagattatttgaccccctccacagattgcttacctagtctctaaataatgaaatgtgtgtgtttgtgtgttttggctatattaggctatataacttcaggttagaatttgccttcagttttttttctgttttagaatatcactggcctaatttatttaggtgtgtacatgttgctcatacatacacacacatataggattacaaatgtggaaaatgttataatgtcatattctagcattggactaaatatcaatttctgactcttaaagtagttctgtgtataaattcaacatgatgaatcaaggcaataatttctcaaatgttcttttatttctttgtttttatctcgactttttattttccattttttctagtacgcaaatagtgtaaaattgttttaatgcctggactttgaaacaagtaacaagtgtttgaaagtatataatctacgagcgaatttgccctccttggactaaccacatacaaatatgaatctggctgcaagaacaggatatccaggtaactagagagtgggcattgataaaaatatctggtggagaagcctaggatttcaactttttgtcagaggattcctgttgggacagctttaccagaaaagaataatagcggatatgttcatccaaactaagaactttcatgcatcttgcattgttacatagcctgtggaatgaattcattttttctcccttgagtccaggaatgacttccctggaaaaactcaatctatatacagctgtgccaaaatgaaggatacctgcctctccgaaactttcactgctgcttctgtcattgttcacttgtcagataaaattttattatctcaggatgcaaatttaaaataaagtgtaaatctatgttaa

SEQ ID NO: 123997 - DNA, 967 bp, Homo sapiens
  Payload ID: 4341
  Gene Symbol: CHIC1
  Gene Name: cysteine-rich hydrophobic domain 1
  ENST ID: ENST00000498407
  CDS Start-End: 25-678
gtgatgagcatcctgctgcccaacatggcggagttcgacaccatctcggaactggaggaggaggaggaagaagaagcggcaacgtcgtcgtcgtcgccgtcgtcgtcgtcgtcggtatctgggcccgacgatgacgaggaggatgaggaggaagaggaggaagaggaggaggaggaagaagaggaggaggaggaagaggaggaggaagcgccgcccccgcctcgggtagtgagcgaggagcatctgcggagatatgctcccgaccctgtattagtgcggggtgccggccacatcactgtgtttggcttgagcaacaagtttgatactgaatttccctccgttctaacagggaaggtggccccagaagaatttaaaaccagcattggccgtgtgaatgcatgtttgaaaaaggctctcccggtcaatgtgaaatggctgctgtgtggttgtctctgctgctgttgcacactgggttgcagcctatggcctgttatttgtctcaacaaaagaaccagaagatcaattcagaagttaatagaatgggaaaataacagattatatcacaagcttgctttgcactggaagttgactaagaggaaatgtgaaactagcaatatgatggagtatgtaatactaatagaattcttaccaaaatatcccatattccgacctgactgaggagttttatccagtcacttctgtgttacctgtcatttcctacccttagtgccttgtagatttggaatgaagatggtctcctttgctgtgttcaacttattctttataatgtacgcaaatagtgtaaaattgttttaatgcctggactttgaaacaagtaacaagtgtttgaaagtatataatctacgagcgaatttgccctccttggactaaccacatacaaatatgaatctggctgcaagaacaggatatccaggtaactagagagtgggcattgataaaaatatct

SEQ ID NO: 123998 - DNA, 2800 bp, Homo sapiens
  Payload ID: 4341
  Gene Symbol: CHIC1
  Gene Name: cysteine-rich hydrophobic domain 1
  ENST ID: ENST00000498318
  CDS Start-End: 1-193
ggaggaagaagaggaggaggaggaagaggaggaggaagcgccgcccccgcctcgggtagtgagcgaggagcatctgcggagatatgctcccgaccctgtattagtgcggggtgccggccacatcactgtgtttggcttgagcaacaagtttgatactgaatttccctccgttctaacagggaagaaattctagagagatacacatgaaactaataaaagttattacctttgatgggagaagaggaatgtgatggatagaggcaagggtggccccagaagaatttaaaaccagcattggccgtgtgaatgcatgtttgaaaaaggctctcccggtcaatgtgaaatggctgctgtgtggttgtctctgctgctgttgcacactgggttgcagcctatggcctgttatttgtctcaacaaaagaaccagaagatcaattcagaagttaatagaatgggaaaataacagattatatcacaagcttgctttgcactggaagttgactaagaggaaatgtgaaactagcaatatgatggagtatgtaatactaatagaattcttaccaaaatatcccatattccgacctgactgaggagttttatccagtcacttctgtgttacctgtcatttcctacccttagtgccttgtagatttggaatgaagatggtctcctttgctgtgttcaacttattctttataatggtagaatattcttctcgctcttttgtgttggtttatgaagaaaatttgcacatcttttttgtctttcaatgaggcttgtgttttgcactctcaattttaaatacacacacatgcgtgtgtgcatatacatatatagatagttgccattaaagataaatcatcagtgttggtgtttaaaaaacaaaaacttgttctgagcatgctgccttataattttcatactcattgtttctaaactcgcatcatttttctaggctacttgatgctctgtaatcccttactggacaaacttaaataagcttttggtagcttttagaaatggttttactctgcttttaaaggacatgcttttaaaggacatgcaattaatggcactggttttgtcctgcactttgctttatcacttatgttagtggataaaatatttaaactcctaaagacttgtaaatattgcctctttgcataatgtaaaatgtggtatgccatggtttacataatgtaacattactcttattgtattgccaacaattttacatagattttaatatgaatgaagtttgcaagcatccctttgaatgtagaaactgctaacatgctgttttatggcaaggccataatgagtatgttaagaatttcaggtgtagggcaaggttgccctttgtaacaagtggactaaaattgaaattattatctcagatattctgtattgcacctgaaaccatgacctttatttttccatttcgtttaataatttccattttgttgtctactccttcccacaaaaaaactatttgacatctgacacatttcacagtctcactatcctgcatttattagccttttcttcctttgaaaatacacacaattatgacttttaaggagtattttgagatttcagacatcttcagaaggtatctagaccctcttgaaagccactaacacctttctgcagttctgatattctagtttgagaaagagagagaactatttgagaagctgtagctaaagagtatatagcagctgattcataattgaaaaaaaattctcaattctgtttttgatgatcctttataaaacattaatgaggaaagacaagtgtttagacaaaagtattttagtttataaattcagcacatatgtaacatttatttggtccatatttctctatttttcttcacaattaaaatgattgctagcaccacacaactagaatttgaaaattcagtataatgaaagctttatatcacattaattcaactgcaaatgtatgcctgtttgtaggcattatttgtaattcatagtgctaaaaataaaagtgtctagggctcagtaatattttgtcatcttactcttactgcttttagtaaaccttttaggcaagattcatctcagtgaagtgaacaatcatttcttcatagaaggtcaagcctttttaagccactcttaaaatttatgcctaatttgaaatccacagtccttgaccagtttaaaaaagagaggaaaaagaagacactattttatatgtgattataattgtttgcacaaacacttttccaccttcctctgtgccccattacctctgtgccactcagtcaccccaaatctctaacctttagtaatgtgtatgcctgcaaatattatgtgtttgcctgctgcaaaattgaaggtgtatttttatagacaaggtagaagcctctgaaaatgtataccaaatgtcttgttttgtagctaaggtcgggaaaaattgtatctgaggtttatgttccagctaatgttatcaaatttatgcttcaaactgtgatattttaataccaaaatcgattttcagcataatacaaaatatctcattttcactgatagaaaattgcttttaagtgttgatccttagaaatcttatttttttctataaccttagaatttgatcatatgatggtcataggaactttttctgccatgtataaatcacacttggttttgctcaaagaacagcatgaagtggtgaattgtttccatgaaacaattattgagaatgggaatacagtatatctggaaatgacacagtataatacaagttacagtagcatttgtcacaaaaacca

SEQ ID NO: 123999 - DNA, 1194 bp, Homo sapiens
  Payload ID: 4342
  Gene Symbol: CHIC2
  Gene Name: cysteine-rich hydrophobic domain 2
  Uniprot ID: Q9UKJ5
  ENST ID: ENST00000263921
  CDS Start-End: 391-888
acgcgcccgcccgcccgttggcccgggaagtctcgcgatgccgtagccggctgctcccgctgcgggtggctcgggctgttgctgtggtttcctgagttgctgctgctgcggcggcggcagcggcgtctgtgcttgtggaggtgtcggcctctgggcggatgttgacattgtgttgttgttattgctgatggtaatggcggcggcggtggcggcgacggtccagaccccatcccctctgtagccggagccgagacagccgacagcgaactccgcggcctcggagccggcggcagcggcgactcccctcagcctccgccgcctcgcccgccggtaccccggcgccaaccccgggagtcaggccctttgggcaggggagctcggaggctcaggatggcggatttcgacgaaatctatgaggaagaggaggacgaggagcgggccctggaggagcagctgctcaagtactcgccggacccggtggtcgtccgcggctccggtcacgtcaccgtatttggactgagcaacaaatttgaatctgaattcccttcttcattaactggaaaagtagctcctgaagaatttaaagccagcatcaacagagttaacagttgtcttaagaagaaccttcctgttaatgtacgttggctactttgtggctgcctttgttgctgctgcacattaggttgcagtatgtggccagttatttgcctcagtaaaagaacacgaagatcgattgagaagttattagaatgggaaaacaataggttataccacaagctgtgcttgcattggagactgagcaaaaggaaatgtgaaacgaataacatgatggaatatgtcatcctcatagaatttttaccaaagacaccgatttttcgaccagattagcatttactttatttatagagactttccaagtatgttgtctttccaatggtgccttgcttggtgctctcctggtggtgacataacattggttctacagaatcgtgtggtgttttttttgtttttgtttttgttttttttttaaataaccgcatgttctaagtgtgcatttttgtcaatctttgcaacagttatttcatacagatgtttaatacttaagttattgtgctcttttctgttatgtattctgattttcaaggattacttttttgtattatcaaaaaaatacatttgaacttagcataaaaa

SEQ ID NO: 124000 - DNA, 528 bp, Homo sapiens
  Payload ID: 4342
  Gene Symbol: CHIC2
  Gene Name: cysteine-rich hydrophobic domain 2
  ENST ID: ENST00000510894
  CDS Start-End: 1-412
ggcggatttcgacgaaatctatgaggaagaggaggacgaggagcgggccctggaggagcagctgctcaagtactcgccggacccggtggtcgtccgcggctccggtcacgtcaccgtatttggactgagcaacaaatttgaatctgaattcccttcttcattaactggaaaagtagctcctgaagaatttaaagccagcatcaacagagttaacagttgtcttaagaagaaccttcctgttaatacacgaagatcgattgagaagttattagaatgggaaaacaataggttataccacaagctgtgcttgcattggagactgagcaaaaggaaatgtgaaacgaataacatgatggaatatgtcatcctcatagaatttttaccaaagacaccgatttttcgaccagattagcatttactttatttatagagactttccaagtatgttgtctttccaatggtgccttgcttggtgctctcctggtggtgacataacattggttctacagaatcgtgtggtgttttttt

SEQ ID NO: 124001 - DNA, 711 bp, Homo sapiens
  Payload ID: 4342
  Gene Symbol: CHIC2
  Gene Name: cysteine-rich hydrophobic domain 2
  ENST ID: ENST00000512964
  CDS Start-End: 1-441
atggcggatttcgacgaaatctatgaggaagaggaggacgaggagcgggccctggaggagcagctgctcaagtactcgccggacccggtggtcgtccgcggctccggtcacgtcaccgtatttggactgagcaacaaatttgaatctgaattcccttcttcattaactggaaaagtagctcctgaagaatttaaagccagcatcaacagagttaacagttgtcttaagaagaaccttcctgttaatgtacgttggctactttgtggctgcctttgttgctgctgcacattaggttgcagtatgtggccagttatttgcctcagtaaaagactgtgcttgcattggagactgagcaaaaggaaatgtgaaacgaataacatgatggaatatgtcatcctcatagaatttttaccaaagacaccgatttttcgaccagattagcatttactttatttatagagactttccaagtatgttgtctttccaatggtgccttgcttggtgctctcctggtggtgacataacattggttctacagaatcgtgtggtgttttttttgtttttgtttttgttttttttttaaataaccgcatgttctaagtgtgcatttttgtcaatctttgcaacagttatttcatacagatgtttaatacttaagttattgtgctcttttctgttatgtattctgattttcaaggattacttttttgt

SEQ ID NO: 124002 - DNA, 4438 bp, Homo sapiens
  Payload ID: 4343
  Gene Symbol: CRIPAK
  Gene Name: cysteine-rich PAK1 inhibitor
  Uniprot ID: Q8N1N5
  ENST ID: ENST00000324803
  CDS Start-End: 2961-4301
tagtgaaaaaaaaatgtctttaagtcccttttgtatgttattagtatagccacttagctcttttttgattattgtttgcatggtatcttttttcaccctttaactttcattgtatctctgaatctaaagtgtgtttcttgtaaacagcatatagtgggatcatgtttcttatctgtcctgctggtctctgccgtgaatctaaagtgtgtttcttgtaaacagcatatagtaggatagtgtttctcatctgtctttctggtctctgctctgaatcaaaagtgtgtttcttgtagacagcacatagtgggatcatgtttttcatctgtcctgctggtctctgctgtttgagagggatgtttaatccatttacattcagtgtgattactgagaaagttggatttgtatctgccatttctaaatttgtttactatattgtcttttttgtctttcttcctttatttctccattacttttttgtgttaaatggacatttaattctcttgtaacattgtaatttccttgtctgttttactgggtttttttaaaagtaactttcttagcagctgctctgagtattacagtaacaacgtaaaaccaatcaagtgttcagatgaacttaatataatgtacaaaaaccttcacttcaagtagctttgtttcctctcagcttcttggtgctgtatttgtcatataaatgctaccttttagattgtaagtccgtcagcagtcttgtaattattgctttatgcagttgtcttttaaatcacatagaagaagaaaagatgtacaaacagaaatgagtttctgctgtctctgttgctggctttgcagttgtcttttttggtgctctttgtgtggatttgagtgtggtgtcttggacttcagcctcaagtatttcttgtaggacagatcttctagcaatgaattctctttgtttttgtttatctgagaatgttgtaatttttccttctcttctgaagaataattgtgctggatatggctgacttggttggccctctttttctttcagtcctctatagatgtcattccactgcctctggcatctgtggtttccatggcgggagcaccgcaccatgtctcagtctctttttagcttctgactgtttgactgtggtgtgtctaattgtggatctttcagtgtgtcctacctgcagttctttgagcttcttggatatagaggttaatatttcttgtagtctgattgtttacatcttctcttcacttattgatcttctgcctagttatattgatattgaatgtgggtattgaatccttcggttttgtcagcttcatgttcagccagtgactggacaggggacccctttaagtgctttgcaccagtaactctcatggttctgctgacacacagttgatgtgtggtgagtatgccttcagcgctccattgtggttctgcaaatttgggaaattttaggttgtcgtttctcgaaatattttatgtccatgttctcttcccccacttggactccagctacgtgtgttgatgtggagctgggcacagccttggaggcctccttgactttcctttattccggaattttttcttcttctcagaatgggtcatctcagttgacctatcttcaaggtcacagatgcttttgccaaacaaaacctgatgtcaagctgctctagtgaatttttcatttcagttattgtacttttctactccaaacttccatttggctctctcctataatttctgtatctttactcatattctttgtttagtgaaacattctcatactttaattctgtagacacagtttcctttagttatttgaacatatgtgtagaagctgatttaaagtacttgtctaagccgggcgtggtggtgtgcacctgtaatcccagctacttgggaggcagaggcaggagaattgcttgaacccgggaggcagaggttgcagtgagccaggatcaagccattgtactccagcctgggccacagagcgagacgctttcaaaactagatagatagatagattagatagatagatagatagatagatagatagatagatagataggataagataagatagataggtgacttgtctactaagttcaacatcagggcttattcaggggaagttcctattgatgaccttttttcccatgtcagagccaaggaaataacatactctttctttgtggtctcatatatatgtattttttgaagactggacactttaataatgtgctgtgcaactctggaaatcagataccctctccacgagtttattgttgttctgttgctgttaccttttgtttagtgtgtgttctggactaatttgaagtgtccacctcatcagcttcatgttcagccagtgactggacagaggacccctttaagtgctttgcaccagtaactctcacggttctgccgacacgcagttgatgcatggtgagtgtgccttcagcgctccatcgcggttctgctgacacgcagttgatatgtggtcagtgctccagcaggcagctgccaactgtgcctttgccttcacttcttacttgcacacagccacaaagccagccagaggtgagggccagggcagctcaggttcctctcgggcacacacacagctctgtgcctgtgtgggcacagccttccatgcctccaggagtgtggcagagcttctcagcggccactgtgggcatctcgttcctcagatcttcctttcatgagttatgtagttgaattatcaatctttcttggcttctaagttttgtgttctacttagaatgctcttcccccttaaagattatatttgaaatgttttccatgttttcttctagtacttttatgggtttcattttcatattgaaatcattgatctacttctagtttttgatacaaaatgtgagccaggaaacccagtttttaaatttcaaatagctgtccaggtgtccctgcacctcttatgcatgagccctcgctttgtgccaatgtggagtgcccgcctgctcacacgtgcccatgtggagtgcccgcctgctcatgtgcccatgtggagtgcccgcctgctcacacatgtcgatgcggagtgcccgcctgctcacacatgcccatgtggagtgcccgcctgctcacacgtgcccatgtggagtgcccgcctgctcacacacgtgtccatgtggagtgcccacctgctcatgtgcccatgtggagtgcccacctgctcacatgtgccgatgtggagtgccacctgctcacacacgtgcccatgtggagtgcccgcctgctcacgtgcccatgtggagtgcccgcctgctcacacgtgccgatgcggagtgcccgcctgctcacacgtgcccatgcggagtgcccgcctgctcacacgtgcccatgcggagtgcccgcctgctcacacgtgcccatgcggagtgcccgcctgctcacacgtgccgacgtggagtgcccgcctgctcacacgtgcccatgtggagtgcccgcctgctcacacgtgccaacgtggagtgcccgcctgatcacacgtgcccatgtggagtgctcgcctgctcacacgtgccgatgtggagtgcctgcctgctcacacgtgcccatgtggagtgttcgcctgctcacacgtgccgatgcggagtgcccgcctgctcacacgtgccgatgcggagtgcccgcctgctcacacgtgcccatgtggagtgcccgcctgctcacgtgccgatgtggagtgcccgcctgctcacacgtgcccatgtggagtgcccgcctgctcacgtgccgatgtggggtgcccgcctgctcacatgtgccgatgtggagtgcccgcctgctcacacgtgcccatgtggagtgcccgcctgctcacacgtgccgacgtggagtgcccgcctgctcacgtgcccatatggagtgcccgcctgctcacacgtgccattgtggagtgcccgcctgctcacacacatgccgatgtggagtgcccgcctgctcacacgtgcccatgtggagtgcccgcctgctcacacgtgcccatgtggagtgcccgcctgctcacacacgtgcccatgtggagtgcccgcctgctcacacgtgcccatgtggagtgcctgcctgctcacacacgtgcccatgtggagtgcccgcctgctcacacaaagccctggcatggtggttctgtaggtttcctgtcctgccggccgagtcagacgctgttaccgtacattctactcatggtggctttttaatacgtttttatgtcaaggatcccttttatatttctctgcacctcgagataacgtaggaatattagggatgagatggaagaggagagggtgtttttgtaaaattgaattcaggactgatttgttagcctggtgcttttcgtatcagaccttttaatgaattttcatggatgctgattaaaagacaaacctgtga

SEQ ID NO: 124003 - DNA, 1953 bp, Homo sapiens
  Payload ID: 4344
  Gene Symbol: CRIPT
  Gene Name: cysteine-rich PDZ-binding protein
  Uniprot ID: Q9P021
  ENST ID: ENST00000238892
  CDS Start-End: 133-438
gggagtatgggcttagaagccggaagtgggttgacgtagcccggaaggggaatacttccaagttgtagtgttgttgttttcagcctgctgctgctgctgctgttgcggctaggggaaccgtcgtggggaaggatggtgtgcgaaaaatgtgaaaagaaacttggtactgttatcactccagatacatggaaagatggtgctaggaataccacagaaagtggtggaagaaagctgaatgaaaataaagctttgacttcaaaaaaagcaagatttgatccatatggaaagaataagttctccacttgtagaatttgtaaaagttctgtgcaccaaccaggttctcattactgccagggctgtgcctacaaaaaaggcatctgtgcgatgtgtggaaaaaaggttttggataccaaaaactacaagcaaacatctgtctagatgtattgatggaatttctggctttctaaatgattttactttctgccttgaattttcaaggcatagatgtcaacttacagaataacatgttttaagataattaagtttaaaccagagaatttgattgttactcattttgctctcatgttctaaacagcaacagtgtaactagtcttttgttgtaaatggttattttccttataagaattttaagaactaagtggcaaattccatgaaaatatttctcagttctgtatgcacttttatttaacattattcatataattctccccccaccactttatttatagatactgcaaaagtgagaaggagataatagatactttgctctgaatttggcatccagagttaacatttctcccctcactcccttgctggtgtcatagttattagaatcagcagcctcttaactaattgcggtttcataggatatataaatgtttcaagccattattgctgaatggttctttagttattaacctagacccaaatcaaagaccagttggatttatgatattttttatttgttcttgcagccaaagtgccagtttctttaatatgtgaccaagaacacaaggagcatccatatggccaaataaatacactgaattttagaaaaacatattactttgaattcaaattgtcatgaaaaccagaacagtgtttgtccatgttgcatgtaatgaaaataaatccctgctctgagaaaagctctttgaagcaaaaaccaaacttttttttttttttttttacctcctgtcttgccccctaaaagaaataaatagagcaaacatcttgactctccctttttaaaatttgtttgttttttttttttttttttggatacaagagctcactctgttgcccagggtggagtgcagaggtatcatcaggctctctgcagcctccatctgctgggctcaagcaattcttccccctcagcctcctaagtagctggggactacaggcgtgtgccactgtgctcagctagtttttatttttagtagagatgaggactcactatgttgcccaagctgttctcgaacttctgatctcaagcaatcctctggcctcagccttccgaagtgctgggatacaggtgtgagccacagaacttggcctctctcttttttttttttttttttttttttttttaacactacaggtttcaaatgaatacttttcttatgttgccttcagaggttcaggacttctgcttttaaaacctgcagcctaccgtgggaaaccaaaaaagcattccctatttccaactgcagtatgtataaatacatatcactacaaaatgtatagaaagtgtgatgagatacatgaatggcatttttattggtcataacattttgatgaaaagcatttaaagttttaactttataaggcttttcaaaatgtgtttttctgagatacattgttatttattcatatccagaaaaattacaaggataatacagaatataataaataatttatctgagagca

SEQ ID NO: 124004 - DNA, 460 bp, Homo sapiens
  Payload ID: 4345
  Gene Symbol: AL928654.7
  Gene Name: Cysteine-rich protein 1
  ENST ID: ENST00000547184
  CDS Start-End: 1-139
gaaatgtgggaagacgctgacctctgggggccacgctgagcacgaaggcaaaccctactgcaaccacccctgctacgcagccatgtttgggcctaaaggctttgggcggggcggagccgagagccacactttcaagtaaaccaggtggtggagaccccatccttggctgcttgcagggccactgtccaggcaaatgccaggccttgtccccagatgcccagggctcccttgttgcccctaatgctctcagtaaacctgaacacttggaaaacctgtccctgccaggagcccggaagtgggtccgcacgagacagaatagactacactcaaactccaggggaaccgttcattgggcttggacacgaaggcgggaccctgccgacgcagtgattggatgcatgtccggccagcgcggtgattggacctccgcgctctggcagctcctcttccgtgtgctctc

SEQ ID NO: 124005 - DNA, 980 bp, Homo sapiens
  Payload ID: 4345
  Gene Symbol: AL928654.7
  Gene Name: Cysteine-rich protein 1
  ENST ID: ENST00000551180
  CDS Start-End: 1-139
gaaatgtgggaagacgctgacctctgggggccacgctgagcacgaaggcaaaccctactgcaaccacccctgctacgcagccatgtttgggcctaaaggctttgggcggggcggagccgagagccacactttcaagtaaaccaggtggtggagaccccatccttggctgcttgcagggccactgtccaggcaaatgccaggccttgtccccagatgcccagggctcccttgttgcccctaatgctctcagtaaacctgaacacttggaaaacctgtgtgtgtacatgcgcgtgtgtgctggggagtgccaagggagctgcagtggggtcctggcagcaggctctgccaccggcgcctgctcttctgctgcccattgccctccccagggggccgttccagggtctcataggcgagggctccctgtgcagggccaggcccagcttctgcaagggcctgatgaggctgctctgcccctgacccaggcaccactgccccatgtgcgtcctcatctgccatctaccctgtgcccagggacttacccagtggcccggcgtccagtggggaacttgagtaccggccgtgcacaggggctggggggccttctggaaactcccttgtcaactcagccagccgctgctgactggccaccttcagagaccctcttccccacactggctacttagataccggccttggcagaaggccacccctccggacacccactggtttaaaagagcccaggggtctggccctgccttagggctgtggtgggtgtgctgcaggctcagctcgacagccctgccaggagcccggaagtgggtccgcacgagacagaatagactacactcaaactccaggggaaccgttcattgggcttggacacgaaggcgggaccctgccgacgcagtgattggatgcatgtccggccagcgcggtgattggacctccgcgctctggcagctcctcttccgtgtgctctc

SEQ ID NO: 124006 - DNA, 678 bp, Homo sapiens
  Payload ID: 4345
  Gene Symbol: AL928654.7
  Gene Name: Cysteine-rich protein 1
  ENST ID: ENST00000477724
  CDS Start-End: 62-295
tctcgcgcctgcagcccgtgccgccccagccgctgccgcctgcaccggacccggagccgtcatgcccaagtgtcccaagtgcaacaaggaggtgtacttcgccgagagggtgacctctctgggcaaggactggcatcggccctgcctgaagtgcgagaaatgtgggaagacgctgacctctgggggccacgctgagcacgaaggcaaaccctactgcaaccacccctgctacgcagccatgtttgggcctaaaggctttgggcggggcggagccgagagccacactttcaagtaaaccagccctgccaggagcccggaagtgggtccgcacgagacagaatagactacactcaaactccaggggaaccgttcattgggcttggacacgaaggcgggaccctgccgacgcagtgattggatgcatgtccggccagcgcgacctccgcgctctggcagctcctcttccgtgtgctctcgccactccctgcgggcaacgccttggcatcgctcgccctggaggtccaagcccgcttggtgaagtcagcactatgctcccagggctacccgaggctggcactggcacaactacctgaggatggctcgcagggcagtcgggagctgctgctggctctgtcctggctcttggcccgaggacctgtgcccgagcagatgctggcc

SEQ ID NO: 124007 - DNA, 613 bp, Homo sapiens
  Payload ID: 4345
  Gene Symbol: AL928654.7
  Gene Name: Cysteine-rich protein 1
  ENST ID: ENST00000550554
  CDS Start-End: 1-139
gaaatgtgggaagacgctgacctctgggggccacgctgagcacgaaggcaaaccctactgcaaccacccctgctacgcagccatgtttgggcctaaaggctttgggcggggcggagccgagagccacactttcaagtaaaccaggtggtggagaccccatccttggctgcttgcagggccactgtccaggcaaatgccaggccttgtccccagatgcccagggctcccttgttgcccctaatgctctcagtaaacctgaacacttggaaaacctgtgtgtgtacatgcgcgtgtgtgctggggagtgccaagggagctgcagtggggtcctggcagcaggctctgccaccggcgcctgctcttctgctgcccattgccctccccagggggccgttccagggtctcataggcgagggctccctgtgcaggccctgccaggagcccggaagtgggtccgcacgagacagaatagactacactcaaactccaggggaaccgttcattgggcttggacacgaaggcgggaccctgccgacgcagtgattggatgcatgtccggccagcgcggtgattggacctccgcgctctggcagctcctcttccgtgtgctctc

SEQ ID NO: 124008 - DNA, 337 bp, Homo sapiens
  Payload ID: 4345
  Gene Symbol: AL928654.7
  Gene Name: Cysteine-rich protein 1
  ENST ID: ENST00000553228
  CDS Start-End: 1-148
gaagtgcgagaaatgtgggaagacgctgacctctgggggccacgctgagcacgaaggcaaaccctactgcaaccacccctgctacgcagccatgtttgggcctaaaggctttgggcggggcggagccgagagccacactttcaagtaaaccagccctgccaggagcccggaagtgggtccgcacgagacagaatagactacactcaaactccaggggaaccgttcattgggcttggacacgaaggcgggaccctgccgacgcagtgattggatgcatgtccggccagcgcggtgattggacctccgcgctctggcagctcctcttccgtgtgctctc

SEQ ID NO: 124009 - DNA, 1311 bp, Homo sapiens
  Payload ID: 4346
  Gene Symbol: CRIP1
  Gene Name: cysteine-rich protein 1 (intestinal)
  Uniprot ID: P50238
  ENST ID: ENST00000330233
  CDS Start-End: 944-1177
aactttgcagcgtacttggaccgctctggccgccctgggcgctacccgcagagataagggcccctccctgcgcccggtccgggcatctccgagccggcctgggggtggctgaactctcttttgccggccgaaaccccagcccccgcagcccccgcagccgatcggtcctcaagctacagctcccctctctgggagtccccgcttttgaattccccggggatgttcccgctgcggtccgatggacctcccagagcagcggaggtcaggggagctagcagaggcggggacgtcccttgggagtgaggggactgacaggggcggcctcgtaaccctgcgtgggatggaaggtcagagtgggttcctcggtggggggcaacagcgggggctctccggcaattgtccccgaccctccgtcctggggagggcaggatcagcgcgcgggctgctttgcatctctttgcattttagtgatgtttggtccagtcctggcccgggcagatctggggttcgggcgggtgccggtggggtagggctgggggtgggagcggcgtttcctgctgcgggtgagccttttgcctcggaactggacccgggagacatcacagcgctgggctaggggcgcggcttgaactcgcctaaagagctgcgccctctcagtaagtccccatggccccctgcccccccgcgctccgtcctcagtcaggcccgggtcctgcctgaaggcgggggtggaccagatgatctttcttgggccctgggcctagattcgaggtccccagggtccaagtcctgggttcagagggcggggcgcgaggggcggggtctccaaggggcggggtcccggggtccctgaaaggcgcggaccaggccggatccacccagtctcgcgcctgcagcccgtgccgccccagccgctgccgcctgcaccggacccggagccgtcatgcccaagtgtcccaagtgcaacaaggaggtgtacttcgccgagagggtgacctctctgggcaaggactggcatcggccctgcctgaagtgcgagaaatgtgggaagacgctgacctctgggggccacgctgagcacgaaggcaaaccctactgcaaccacccctgctacgcagccatgtttgggcctaaaggctttgggcggggcggagccgagagccacactttcaagtaaaccaggtggtggagaccccatccttggctgcttgcagggccactgtccaggcaaatgccaggccttgtccccagatgcccagggctcccttgttgcccctaatgctctcagtaaacctgaacacttggaaaacc

SEQ ID NO: 124010 - DNA, 485 bp, Homo sapiens
  Payload ID: 4346
  Gene Symbol: CRIP1
  Gene Name: cysteine-rich protein 1 (intestinal)
  Uniprot ID: P50238
  ENST ID: ENST00000392531
  CDS Start-End: 118-351
cacagcgctgggctaggggcgcggcttgaactcgcctaaagagctgcgccctctcatctcgcgcctgcagcccgtgccgccccagccgctgccgcctgcaccggacccggagccgtcatgcccaagtgtcccaagtgcaacaaggaggtgtacttcgccgagagggtgacctctctgggcaaggactggcatcggccctgcctgaagtgcgagaaatgtgggaagacgctgacctctgggggccacgctgagcacgaaggcaaaccctactgcaaccacccctgctacgcagccatgtttgggcctaaaggctttgggcggggcggagccgagagccacactttcaagtaaaccaggtggtggagaccccatccttggctgcttgcagggccactgtccaggcaaatgccaggccttgtccccagatgcccagggctcccttgttgcccctaatgctctcagtaaacctgaacacttggaaaacc

SEQ ID NO: 124011 - DNA, 677 bp, Homo sapiens
  Payload ID: 4346
  Gene Symbol: CRIP1
  Gene Name: cysteine-rich protein 1 (intestinal)
  Uniprot ID: P50238
  ENST ID: ENST00000409393
  CDS Start-End: 154-387
tttcctgctgcgggtgagccttttgcctcggaactggacccgggagacatcacagcgctgggctaggggcgcggcttgaactcgcctaaagagctgcgccctctcacccgtgccgccccagccgctgccgcctgcaccggacccggagccgtcatgcccaagtgtcccaagtgcaacaaggaggtgtacttcgccgagagggtgacctctctgggcaaggactggcatcggccctgcctgaagtgcgagaaatgtgggaagacgctgacctctgggggccacgctgagcacgaaggcaaaccctactgcaaccacccctgctacgcagccatgtttgggcctaaaggctttgggcggggcggagccgagagccacactttcaagtaaaccaggtggtggagaccccatccttggctgcttgcagggccactgtccaggcaaatgccaggccttgtccccagatgcccagggctcccttgttgcccctaatgctctcagtaaacctgaacacttggaaaacctgtgtgtgtacatgcgcgtgtgtgctggggagtgccaagggagctgcagtggggtcctggcagcaggctctgccaccggcgcctgctcttctgctgcccattgccctccccagggggccgttccagggtctcataggcgagggctccctgtgcagg

SEQ ID NO: 124012 - DNA, 1857 bp, Homo sapiens
  Payload ID: 4347
  Gene Symbol: CRIP2
  Gene Name: cysteine-rich protein 2
  Uniprot ID: P52943
  ENST ID: ENST00000329146
  CDS Start-End: 714-1340
gcgccttccttcctgagccctgccctccacccaaggagccttcagcaccacagacagtgttggggcggggcgcgggcgggggcggagcgggacatggagacccggacagggctgggggccgtgcccgccgggaatctgactccgctcccgcggcgcggctgttgctatggaaaccgagcaacaaagggaagcgggacaggcgccgcgcgcggcggggtgggggtggggttctcccggagcctgcgaccccttcccgcggcggagcgcagcctgggcgcccagggccgggagtgttggacccctaggcccaagtcactagggctccccgagagccgagggccaggctccccgcaccctgcccgccgccccggggacggcccggccaggcggccccgacgtcgccatggaaacagccggggcgcgggcggcgccgcggtcgcccgggcgggcccctgtagacgccacctccggcgcgaggggcccgggggcgccaggcctggcccggctgccccgcacccgccacccccggcaggtgcgccccgcccccgcggcgcccccaggcggcccccagcccgggggacgggttatcgaggccccgccccggccgcggagccaatgggcgcgcggacagccgggcaggcggggctgggcgcgggcggcggcggcccggaggagaacgggcggagggcgcgggccgaccgggcgcaccgaccatggcctccaaatgccccaagtgcgacaagaccgtgtacttcgccgagaaggtgagctccctggggaaggactggcacaagttctgcctcaagtgcgagcgctgcagcaagacgctgacgcccgggggccacgccgagcatgacgggaagccgttctgccacaagccgtgctacgccaccctgttcggacccaaaggcgtgaacatcgggggcgcgggctcctacatctacgagaagcccctggcggaggggccgcaggtcaccggccccatcgaggtccccgcggcccgagcagaggagcggaaggcgagcggccccccgaaggggcccagcagagcctccagtgtcaccactttcaccggggagcccaacacgtgcccgcgctgcagcaagaaggtgtacttcgctgagaaggtgacgtctctgggcaaggattggcaccggccctgcctgcgctgcgagcgctgcgggaagacactgacccccggcgggcacgcggagcacgacggccagccctactgccacaagccctgctatggaatcctcttcggacccaagggagtgaacaccggtgcggtgggcagctacatctatgaccgggaccccgaaggcaaggtccagccctaggctacagcggctctcatgatgtgggctcacctgcgccccagaccctgcaggggcccccctgcttggctctgctgggagagtgctcagccgcccagtcctgcctgcaagcccagggcgagtattggaggaggggcagccacgggcagagcaccatgcccatccccgagtctctggtgtgtctgccccctctggcatcctctgggcgtcccatgatcccttctgtgtctgcgtgtccgaatccccgtgtgaccctgtcccagcattttcccgccgaccctgcgtgtccccgtggcgctgtccgctctccctctcctgctgcccacccacctgccagtgttatttatgctcccttcgtgggtgatggccacgccctcaccatgtccctggcagagggcttccctccgggatcccctgcctggtgcccacactgcctcgcaagcgctcgccaccctcacgtggctcacctgctgttgagccttgtgctgtcaataaacggtttgaggattgcaggattgtc

SEQ ID NO: 124013 - DNA, 1176 bp, Homo sapiens
  Payload ID: 4347
  Gene Symbol: CRIP2
  Gene Name: cysteine-rich protein 2
  Uniprot ID: P52943
  ENST ID: ENST00000483017
  CDS Start-End: 287-1135
ggctggggaccttggggcaggtggtctccctccagaagagccctgtgttcagccagccctgtcctccagagcaagccccacaggtagcaagccccacaggtagcaaagtcagggagggtaatggcttagccccaggctcccaagctgggcagaacagggcagggagctggagagggtttggcagtgggcccatgaatccagcctgggcaaggccctgctgtgagggacccctagggacccctgggcctgccagggaggaagggctgcccagaaaaggtactgactgatgcctcctcaccatcttctgccttggctggcacaggtcccaagtgcagagggggagctggtcaggctggtcagtcgggcgggggggcggggggcatgtttctggcctgctgtcaccatggaaatggcagtggctgcagggtgtgtgtgcaagggaggagggtgctgccacagagagcccagccaggaccaccatgaaagccaggagcaccgagggcctctggttggctcacaaacatgcctggtgcaccaggcagagggaacagccgagaaggtgagctccctggggaaggactggcacaagttctgcctcaagtgcgagcgctgcagcaagacgctgacgcccgggggccacgccgagcatgacgggaagccgttctgccacaagccgtgctacgccaccctgttcggacccaaaggcgtgaacatcgggggcgcgggctcctacatctacgagaagcccctggcggaggggccgcaggtcaccggccccatcgaggtccccgcggcccgagcagaggagcggaaggcgagcggccccccgaaggggcccagcagagcctccagtgtcaccactttcaccggggagcccaacacgtgcccgcgctgcagcaagaaggtgtacttcgctgagaaggtgacgtctctgggcaaggattggcaccggccctgcctgcgctgcgagcgctgcgggaagacactgacccccggcgggcacgcggagcacgacggccagccctactgccacaagccctgctatggaatcctcttcggacccaagggagtgaacaccggtgcggtgggcagctacatctatgaccgggaccccgaaggcaaggtccagccctaggctacagcggctctcatgatgtgggctcacctgcgccccag

SEQ ID NO: 124014 - DNA, 991 bp, Homo sapiens
  Payload ID: 4347
  Gene Symbol: CRIP2
  Gene Name: cysteine-rich protein 2
  ENST ID: ENST00000538259
  CDS Start-End: 1-577
ggaggagaacgggcggagggcgcgggccgaccgggcgcaccgaccatggcctccaaatgccccaagtgcgacaagaccgtgtacttcgcatgacgggaagccgttctgccacaagccgtgctacgccaccctgttcggacccaaaggcgtgaacatcgggggcgcgggctcctacatctacgagaagcccctggcggaggggccgcaggtcaccggccccatcgaggtccccgcggcccgagcagaggagcggaaggcgagcggccccccgaaggggcccagcagagcctccagtgtcaccactttcaccggggagcccaacacgtgcccgcgctgcagcaagaaggtgtacttcgctgagaaggtgacgtctctgggcaaggattggcaccggccctgcctgcgctgcgagcgctgcgggaagacactgacccccggcgggcacgcggagcacgacggccagccctactgccacaagccctgctatggaatcctcttcggacccaagggagtgaacaccggtgcggtgggcagctacatctatgaccgggaccccgaaggcaaggtccagccctaggctacagcggctctcatgatgtgggctcacctgcgccccagaccctgcaggggcccccctgcttggctctgctgggagagtgctcagccgcccagtcctgcctgcaagcccagggcgagtattggaggaggggcagccacgggcagagcaccatgcccatccccgagtctctggtgtgtctgccccctctggcatcctctgggcgtcccatgatcccttctgtgtctgcgtgtccgaatccccgtgtgaccctgtcccagcattttcccgccgaccctgcgtgtccccgtggcgctgtccgctctccctctcctgctgcccacccacctgccagtgttatttatgctcccttcgtgggtgatggccacgccctcaccatgtccctggcagagggcttccctccgggatcccctg

SEQ ID NO: 124015 - DNA, 817 bp, Homo sapiens
  Payload ID: 4347
  Gene Symbol: CRIP2
  Gene Name: cysteine-rich protein 2
  ENST ID: ENST00000550577
  CDS Start-End: 1-313
gcccggaggagaacgggcggagggcgcgggccgaccgggcgcaccgaccatggcctccaaatgccccaagtgcgacaagaccgtgtacttcgctgagaaggtgacgtctctgggcaaggattggcaccggccctgcctgcgctgcgagcgctgcgggaagacactgacccccggcgggcacgcggagcacgacggccagccctactgccacaagccctgctatggaatcctcttcggacccaagggagtgaacaccggtgcggtgggcagctacatctatgaccgggaccccgaaggcaaggtccagccctaggctacagcggctctcatgatgtgggctcacctgcgccccagaccctgcaggggcccccctgcttggctctgctgggagagtgctcagccgcccagtcctgcctgcaagcccagggcgagtattggaggaggggcagccacgggcagagcaccatgcccatccccgagtctctggtgtgtctgccccctctggcatcctctgggcgtcccatgatcccttctgtgtctgcgtgtccgaatccccgtgtgaccctgtcccagcattttcccgccgaccctgcgtgtccccgtggcgctgtccgctctccctctcctgctgcccacccacctgccagtgttatttatgctcccttcgtgggtgatggccacgccctcaccatgtccctggcagagggcttccctccgggatcccctgcctggtgcccacactgcctcgcaagcgctcgccaccctcacgtggctcacctgctgttgagccttgtgctgtcaataaacggtttgagga

SEQ ID NO: 124016 - DNA, 800 bp, Homo sapiens
  Payload ID: 4348
  Gene Symbol: CRIP3
  Gene Name: cysteine-rich protein 3
  Uniprot ID: Q6Q6R5
  ENST ID: ENST00000274990
  CDS Start-End: 6-659
gagctatgagctggacctgtccgcgttgccagcaacctgttttcttcgctgagaaggtgagctccctgggcaagaactggcaccgcttctgcctgaaatgtgagcgctgccacagcatcctgtcccctggcgggcatgcagagcacaatgggaggccatactgccacaagccatgctatggggctctctttggacccaggggggtgaacattggtggtgtaggctcctacttgtacaatccccccactcccagccctggctgcaccactcctctcagccccagcagcttcagccctcccaggccaaggactggcctcccccaaggcaagaaaagccctccccatatgaagacattcactggggagacctcgctgtgccctggctgtggggagcccgtctattttgctgagaaggtgatgtcattaggcagaaattggcaccgaccgtgtctgaggtgccagcgttgccacaagaccctgactgctgggagtcatgctgagcatgatggagtcccctactgccacgtcccctgctacggctacctgtttggccccaaaggtgggcagccccatcccagacactgggatggcatgtacatgcctgaagtatggcatgtacatggtctgtgggtatgtgtggacaacttcccctgtggttaagcataccctggcccccccaccaagttccctctaggcctgaaccctgcaccacagacccagggcctttggtgatagggctctctctctcaggtgtgaacattggcgatgtgggctgctacatctatgacccagtgaagataa

SEQ ID NO: 124017 - DNA, 962 bp, Homo sapiens
  Payload ID: 4348
  Gene Symbol: CRIP3
  Gene Name: cysteine-rich protein 3
  Uniprot ID: Q6Q6R5
  ENST ID: ENST00000372569
  CDS Start-End: 6-620
gagctatgagctggacctgtccgcgttgccagcaacctgttttcttcgctgagaaggtgagctccctgggcaagaactggcaccgcttctgcctgaaatgtgagcgctgccacagcatcctgtcccctggcgggcatgcagagcacaatgggaggccatactgccacaagccatgctatggggctctctttggacccaggggggtgaacattggtggtgtaggctcctacttgtacaatccccccactcccagccctggctgcaccactcctctcagccccagcagcttcagccctcccaggccaaggactggcctcccccaaggcaagaaaagccctccccatatgaagacattcactggggagacctcgctgtgccctggctgtggggagcccgtctattttgctgagaaggtgatgtcattaggcagaaattggcaccgaccgtgtctgaggtgccagcgttgccacaagaccctgactgctgggagtcatgctgagcatgatggagtcccctactgccacgtcccctgctacggctacctgtttggccccaaaggtgtgaacattggcgatgtgggctgctacatctatgacccagtgaagataaaattcaaatgagacgctcacaaaaaaggtcaccctaactcaggcctcccatcatgcccctcatggtccaatggaagctacaaaaatctccagtcccatgggggttggggaaggtgggatcttgggggcctgggcctaggctccatggtaggccagagagtctagactttctctgccaattttttccctttcccatttctatctggttagggaacagcccgttttgaagggtatcctcctcctggccatcacaacccctttccccagcacattctggagcttcaaggtactcataaaacttgtgtttattgaatttcagcctctgtggcttcttcaataaaatgttggctccca

SEQ ID NO: 124018 - DNA, 474 bp, Homo sapiens
  Payload ID: 4348
  Gene Symbol: CRIP3
  Gene Name: cysteine-rich protein 3
  ENST ID: ENST00000451294
  CDS Start-End: 1-117
gagcccgtctattttgctgagaaggtgatgtcattaggcagaaattggcaccgaccgtgtctgaggtgccagcgttgccacaagaccctgactgctgggagtcatgctgaggtgtgaacattggcgatgtgggctgctacatctatgacccagtgaagataaaattcaaatgagacgctcacaaaaaaggtcaccctaactcaggcctcccatcatgcccctcatggtccaatggaagctacaaaaatctccagtcccatgggggttggggaaggtgggatcttgggggcctgggcctaggctccatggtaggccagagagtctagactttctctgccaattttttccctttcccatttctatctggttagggaacagcccgttttgaagggtatcctcctcctggccatcacaacccctttccccagcacattctggagcttcaaggtactcataaaacttgtgtttattgaa

SEQ ID NO: 124019 - DNA, 430 bp, Homo sapiens
  Payload ID: 4348
  Gene Symbol: CRIP3
  Gene Name: cysteine-rich protein 3
  ENST ID: ENST00000416431
  CDS Start-End: 1-331
ccacaagccatgctatggggctctctttggacccaggggggtgaacattggtggtgtaggctcctacttgtacaatccccccactcccagccctggctgcaccactcctctcagccccagcagcttcagccctcccaggccaaggactggcctcccccaaggcaagaaaactgagaaggtgatgtcattaggcagaaattggcaccgaccgtgtctgaggtgccagcgttgccacaagaccctgactgctgggagtcatgctgagcatgatggagtcccctactgccacgtcccctgctacggctacctgtttggccccaaagccctctaggtcctgcctgtttcttgcctgcctcacccagtggcatcacgatgatggtaaaaccagccagggctgagccagtaagggtgcgggtgatggcaaacatta

SEQ ID NO: 124020 - DNA, 1709 bp, Homo sapiens
  Payload ID: 4349
  Gene Symbol: CRISP1
  Gene Name: cysteine-rich secretory protein 1
  Uniprot ID: P54107
  ENST ID: ENST00000329411
  CDS Start-End: 4-540
gggatggaaattaaacacctcttgtttttggttgctgctgcttgcttactgcctatgttgtccatgaaaaagaaatcagctagagaccaatttaataagctcgtcaccgacttgccaaatgtacaagaagagatcgttaatatacacaacgccctcaggagaagagtagttccaccagccagcaacatgctgaagatgagttggagtgaagaggctgcacaaaatgccagaattttttcaaagtattgtgatatgacagagagcaacccccttgagaggagacttccaaataccttttgtggagaaaatatgcatatgacatcttatcctgtatcatggtcaagtgtaattggagtctggtacagtgagtctacaagtttcaaacatggagaatggacaacaacggatgatgacataactactgaccactacactcagattgtttgggccacatcttacctgattggctgtgccattgcatcttgccgccaacaaggatcacctcgatatctctacgtttgtcactattgtcatgactaacccctgcatctactatgatgaatacttcgactgtgacatacaagtccattatctgggatgcaaccactcaacaactatcctattctgtaaagccacttgtctgtgtgacactgagataaaataggtctttgttattttcaactgttctatgctgtgacgatgaggaggagatgtctgttggattcatgtcttttgctatagttcagtagcttctgctaaatttcactgattttaatcatgctggagaccttaactcccatcctgatacatcctgaagtaacactgttttaaactttcttagtgctggagtaaaaggtcaagtccaacacctgccttaaatttaaatcatgtgatttatagtttttaagttggcataattcaacttatggtataactgggtccctcaacagtaacctgggctaaaataggtcttatgtggttcaactcccacccccgccttccccatattttcaaccactctgattatcttccctgcacaactaacatccagtaataattcttcacttttaaaattttacttctactttaaatcaatcattaaaggaatccacaaagcaaacagagttcagtctcatcttgcaaggtaaatatcatttaattggaagtagtttaaatgtctcattgttttattgacacatctatatatacatttgtgaagcaagaaacaataaaaaagcttcgtatgccattaatttaacaaaatatgtattcagtactgattgcatacaagatgcatgtttatatatatggaaggaatatagtttcatttcattgcaaaggcagtataaaagatatataaaatagcataatatgagaaattaagtccctaaagacatataggtcacatattattattgccagatgagcataaatagcttctgtttggagattcaggaaagccttagggtggaatgaggaacatcttctgagtaaacagggttgcaaaggttatgattatttcaacacaatggaagagcacagttaaggccaactaacgtaaaatgcactgaagccttagggaatattgaagggcctgacatggggaaagggaaggctaaaaatacttggtcaaattttaacattataccaaagttatacccagttctacctacttgtatatttctttactcatttcaataaagtgtttg

SEQ ID NO: 124021 - DNA, 1911 bp, Homo sapiens
  Payload ID: 4349
  Gene Symbol: CRISP1
  Gene Name: cysteine-rich secretory protein 1
  Uniprot ID: P54107
  ENST ID: ENST00000335847
  CDS Start-End: 103-852
aaatctcccctgtggactgtcatttaaaagcacaaatacactacatagagaaaggcttggttcttatcaggacacaaatttaaaggctgtgtggacttggggatggaaattaaacacctcttgtttttggttgctgctgcttgcttactgcctatgttgtccatgaaaaagaaatcagctagagaccaatttaataagctcgtcaccgacttgccaaatgtacaagaagagatcgttaatatacacaacgccctcaggagaagagtagttccaccagccagcaacatgctgaagatgagttggagtgaagaggctgcacaaaatgccagaattttttcaaagtattgtgatatgacagagagcaacccccttgagaggagacttccaaataccttttgtggagaaaatatgcatatgacatcttatcctgtatcatggtcaagtgtaattggagtctggtacagtgagtctacaagtttcaaacatggagaatggacaacaacggatgatgacataactactgaccactacactcagattgtttgggccacatcttacctgattggctgtgccattgcatcttgccgccaacaaggatcacctcgatatctctacgtttgtcactattgtcatgagggaaatgatcctgaaacaaagaatgaaccttataagacaggcgtcccatgtgaagcctgcccaagtaactgtgaagacaaactttgcactaacccctgcatctactatgatgaatacttcgactgtgacatacaagtccattatctgggatgcaaccactcaacaactatcctattctgtaaagccacttgtctgtgtgacactgagataaaataggtctttgttattttcaactgttctatgctgtgacgatgaggaggagatgtctgttggattcatgtcttttgctatagttcagtagcttctgctaaatttcactgattttaatcatgctggagaccttaactcccatcctgatacatcctgaagtaacactgttttaaactttcttagtgctggagtaaaaggtcaagtccaacacctgccttaaatttaaatcatgtgatttatagtttttaagttggcataattcaacttatggtataactgggtccctcaacagtaacctgggctaaaataggtcttatgtggttcaactcccacccccgccttccccatattttcaaccactctgattatcttccctgcacaactaacatccagtaataattcttcacttttaaaattttacttctactttaaatcaatcattaaaggaatccacaaagcaaacagagttcagtctcatcttgcaaggtaaatatcatttaattggaagtagtttaaatgtctcattgttttattgacacatctatatatacatttgtgaagcaagaaacaataaaaaagcttcgtatgccattaatttaacaaaatatgtattcagtactgattgcatacaagatgcatgtttatatatatggaaggaatatagtttcatttcattgcaaaggcagtataaaagatatataaaatagcataatatgagaaattaagtccctaaagacatataggtcacatattattattgccagatgagcataaatagcttctgtttggagattcaggaaagccttagggtggaatgaggaacatcttctgagtaaacagggttgcaaaggttatgattatttcaacacaatggaagagcacagttaaggccaactaacgtaaaatgcactgaagccttagggaatattgaagggcctgacatggggaaagggaaggctaaaaatacttggtcaaattttaacattataccaaagttatacccagttctacctacttgtatatttctttactcatttcaataaagtgtttgaaaaaaaaaaaaaa

SEQ ID NO: 124022 - DNA, 1793 bp, Homo sapiens
  Payload ID: 4349
  Gene Symbol: CRISP1
  Gene Name: cysteine-rich secretory protein 1
  Uniprot ID: P54107
  ENST ID: ENST00000507853
  CDS Start-End: 74-610
gcacaaatacactacatagagaaaggcttggttcttatcaggacacaaatttaaaggctgtgtggacttggggatggaaattaaacacctcttgtttttggttgctgctgcttgcttactgcctatgttgtccatgaaaaagaaatcagctagagaccaatttaataagctcgtcaccgacttgccaaatgtacaagaagagatcgttaatatacacaacgccctcaggagaagagtagttccaccagccagcaacatgctgaagatgagttggagtgaagaggctgcacaaaatgccagaattttttcaaagtattgtgatatgacagagagcaacccccttgagaggagacttccaaataccttttgtggagaaaatatgcatatgacatcttatcctgtatcatggtcaagtgtaattggagtctggtacagtgagtctacaagtttcaaacatggagaatggacaacaacggatgatgacataactactgaccactacactcagattgtttgggccacatcttacctgattggctgtgccattgcatcttgccgccaacaaggatcacctcgatatctctacgtttgtcactattgtcatgactaacccctgcatctactatgatgaatacttcgactgtgacatacaagtccattatctgggatgcaaccactcaacaactatcctattctgtaaagccacttgtctgtgtgacactgagataaaataggtctttgttattttcaactgttctatgctgtgacgatgaggaggagatgtctgttggattcatgtcttttgctatagttcagtagcttctgctaaatttcactgattttaatcatgctggagaccttaactcccatcctgatacatcctgaagtaacactgttttaaactttcttagtgctggagtaaaaggtcaagtccaacacctgccttaaatttaaatcatgtgatttatagtttttaagttggcataattcaacttatggtataactgggtccctcaacagtaacctgggctaaaataggtcttatgtggttcaactcccacccccgccttccccatattttcaaccactctgattatcttccctgcacaactaacatccagtaataattcttcacttttaaaattttacttctactttaaatcaatcattaaaggaatccacaaagcaaacagagttcagtctcatcttgcaaggtaaatatcatttaattggaagtagtttaaatgtctcattgttttattgacacatctatatatacatttgtgaagcaagaaacaataaaaaagcttcgtatgccattaatttaacaaaatatgtattcagtactgattgcatacaagatgcatgtttatatatatggaaggaatatagtttcatttcattgcaaaggcagtataaaagatatataaaatagcataatatgagaaattaagtccctaaagacatataggtcacatattattattgccagatgagcataaatagcttctgtttggagattcaggaaagccttagggtggaatgaggaacatcttctgagtaaacagggttgcaaaggttatgattatttcaacacaatggaagagcacagttaaggccaactaacgtaaaatgcactgaagccttagggaatattgaagggcctgacatggggaaagggaaggctaaaaatacttggtcaaattttaacattataccaaagttatacccagttctacctacttgtatatttctttactcatttcaataaagtgtttgaaaaaaaaaaaaaa

SEQ ID NO: 124023 - DNA, 1296 bp, Homo sapiens
  Payload ID: 4349
  Gene Symbol: CRISP1
  Gene Name: cysteine-rich secretory protein 1
  Uniprot ID: P54107
  ENST ID: ENST00000505118
  CDS Start-End: 91-840
agtttctttgcagctaccaggacagagcttggtgagataattcttttattcttcaacttttattttaacttcaatggtacatgtgcagggatggaaattaaacacctcttgtttttggttgctgctgcttgcttactgcctatgttgtccatgaaaaagaaatcagctagagaccaatttaataagctcgtcaccgacttgccaaatgtacaagaagagatcgttaatatacacaacgccctcaggagaagagtagttccaccagccagcaacatgctgaagatgagttggagtgaagaggctgcacaaaatgccagaattttttcaaagtattgtgatatgacagagagcaacccccttgagaggagacttccaaataccttttgtggagaaaatatgcatatgacatcttatcctgtatcatggtcaagtgtaattggagtctggtacagtgagtctacaagtttcaaacatggagaatggacaacaacggatgatgacataactactgaccactacactcagattgtttgggccacatcttacctgattggctgtgccattgcatcttgccgccaacaaggatcacctcgatatctctacgtttgtcactattgtcatgagggaaatgatcctgaaacaaagaatgaaccttataagacaggcgtcccatgtgaagcctgcccaagtaactgtgaagacaaactttgcactaacccctgcatctactatgatgaatacttcgactgtgacatacaagtccattatctgggatgcaaccactcaacaactatcctattctgtaaagccacttgtctgtgtgacactgagataaaataggtctttgttattttcaactgttctatgctgtgacgatgaggaggagatgtctgttggattcatgtcttttgctatagttcagtagcttctgctaaatttcactgattttaatcatgctggagaccttaactcccatcctgatacatcctgaagtaacactgttttaaactttcttagtgctggagtaaaaggtcaagtccaacacctgccttaaatttaaatcatgtgatttatagtttttaagttggcataattcaacttatggtataactgggtccctcaacagtaacctgggctaaaataggtcttatgtggttcaactcccacccccgccttccccatattttcaaccactctgattatcttccctgcacaactaacatccagtaataattcttcacttttaaaattttacttctactttaaatcaatcattaaaggaatccacaaagcaaa

SEQ ID NO: 124024 - DNA, 1382 bp, Homo sapiens
  Payload ID: 4350
  Gene Symbol: CRISP2
  Gene Name: cysteine-rich secretory protein 2
  Uniprot ID: P16562
  ENST ID: ENST00000339139
  CDS Start-End: 238-969
cggtgagaggggcgcgccgcagctcctcaacgccgcaacgcgccggcccaactgcaggaaggtctgtgctctggagccagggtaaatggttataaaattatacaccatggccctcctaaagacactctaggaaaaccatgtcatcctgatcttaaaacacctgcaagaaagagcacagtacttcaccattaataaagtagatatttcatcctgctcagaaaaccaacatttccagcaatggctttactaccggtgttgtttctggttactgtgctgcttccatctttacctgcagaaggaaaggatcccgcttttactgctttgttaaccacccagttgcaagtgcaaagggagattgtaaataaacacaatgaactaaggaaagcagtctctccacctgccagtaacatgctaaagatggaatggagcagagaggtaacaacgaatgcccaaaggtgggcaaacaagtgcactttacaacatagtgatccagaggaccgcaaaaccagtacaagatgtggtgagaatctctatatgtcaagtgaccctacttcctggtcttctgcaatccaaagctggtatgacgagatcctagattttgtctatggtgtaggaccaaagagtcccaatgcagttgttggacattatactcagcttgtttggtactcgacttaccaggtaggctgtggaattgcctactgtcccaatcaagatagtctaaaatactactatgtttgccaatattgtcctgctggtaataatatgaatagaaagaataccccgtaccaacaaggaacaccttgtgccggttgccctgatgactgtgacaaaggactatgcaccaatagttgccagtatcaagatctcctaagtaactgtgattccttgaagaatacagctggctgtgaacatgagttactcaaggaaaagtgcaaggctacttgcctatgtgagaacaaaatttactgatttacctagtgagcattgtgcaagactgcatggataagggctgcatcatttaattgcgacataccagtggaaattgtatgtatgttagtgacaaatttgatttcaaagagcaatgcatcttctcccccagatcatcacagaaatcactttcaggcaatgatttacaaaagtagcatagtagatgatgacaactgtgaactctgacataaatttagtgctttataacgaactgaatcaggttgaggattttgaaaactgtataaccataggatttaggtcactaggactttggatcaaaatggtgcattacgtatttcctgaaacatgctaaagaagaagactgtaacatcattgccattcctactacctgagtttttacttgcataaacaataaattcaaagctttacatctg

SEQ ID NO: 124025 - DNA, 1492 bp, Homo sapiens
  Payload ID: 4350
  Gene Symbol: CRISP2
  Gene Name: cysteine-rich secretory protein 2
  Uniprot ID: P16562
  ENST ID: ENST00000618917
  CDS Start-End: 241-1077
acacgtggcgcctggcaagtgaacaatcgcggtgagaggggcgcgccgcagctcctcaacgccgcaacgcgccggcccaactgcaggaagggttataaaattatacaccatggccctcctaaagacactctaggaaaaccatgtcatcctgatcttaaaacacctgcaagaaagagcacagtacttcaccattaataaagtagatatttcatcctgctcagaaaaccaacatttccagcaatggctttactaccggtgttgtttctggttactgtgctgcttccatctttacctgcagaaggaaaggatcccgcttttactgctttgttaaccacccagttgcaagtgcaaagggagattgtaaataaacacaatgaactaaggaaagcagtctctccacctgccagtaacatgctaaagatggaatggagcagagaggtaacaacgaatgcccaaaggtgggcaaacaagtgcactttacaacatagtgatccagaggaccgcaaaaccagtacaagatgtggtgagaatctctatatgtcaagtgaccctacttcctggtcttctgcaatccaaagctggtatgacgagatcctagattttgtctatggtgtaggaccaaagagtcccaatgcagttgttggacattatactcagcttgtttggtactcgacttaccaggtaggctgtggaattgcctactgtcccaatcaagatagtctaaaatactactatgtttgccaatattgtcctgcaatgaaaacatatctcaataaaagggaggggataaacgtttggaaatgttttttaaggttgagacactttcaacttctcagaggagaacaacttctcactttcagtggtaataatatgaatagaaagaataccccgtaccaacaaggaacaccttgtgccggttgccctgatgactgtgacaaaggactatgcaccaatagttgccagtatcaagatctcctaagtaactgtgattccttgaagaatacagctggctgtgaacatgagttactcaaggaaaagtgcaaggctacttgcctatgtgagaacaaaatttactgatttacctagtgagcattgtgcaagactgcatggataagggctgcatcatttaattgcgacataccagtggaaattgtatgtatgttagtgacaaatttgatttcaaagagcaatgcatcttctcccccagatcatcacagaaatcactttcaggcaatgatttacaaaagtagcatagtagatgatgacaactgtgaactctgacataaatttagtgctttataacgaactgaatcaggttgaggattttgaaaactgtataaccataggatttaggtcactaggactttggatcaaaatggtgcattacgtatttcctgaaacatgctaaagaagaagactgtaacatcattgccattcctactacctgagtttttacttgcataaacaataaattcaaagctttacatctgcc

SEQ ID NO: 124026 - DNA, 1376 bp, Homo sapiens
  Payload ID: 4350
  Gene Symbol: CRISP2
  Gene Name: cysteine-rich secretory protein 2
  Uniprot ID: P16562
  ENST ID: ENST00000616725
  CDS Start-End: 230-961
acacgtggcgcctggcaagtgaacaatcgcggtgagaggggcgcgccgcagctcctcaacgccgcaacgcgccggcccaactgcaggaaggtctgtgctctggagccagggtaaatggttataaaattatacaccatggccctcctaaagacactctaggaaaaccatgtcatcctgatcttaaaacacctgcaagaaagagcacagtacttcaccattatttccagcaatggctttactaccggtgttgtttctggttactgtgctgcttccatctttacctgcagaaggaaaggatcccgcttttactgctttgttaaccacccagttgcaagtgcaaagggagattgtaaataaacacaatgaactaaggaaagcagtctctccacctgccagtaacatgctaaagatggaatggagcagagaggtaacaacgaatgcccaaaggtgggcaaacaagtgcactttacaacatagtgatccagaggaccgcaaaaccagtacaagatgtggtgagaatctctatatgtcaagtgaccctacttcctggtcttctgcaatccaaagctggtatgacgagatcctagattttgtctatggtgtaggaccaaagagtcccaatgcagttgttggacattatactcagcttgtttggtactcgacttaccaggtaggctgtggaattgcctactgtcccaatcaagatagtctaaaatactactatgtttgccaatattgtcctgctggtaataatatgaatagaaagaataccccgtaccaacaaggaacaccttgtgccggttgccctgatgactgtgacaaaggactatgcaccaatagttgccagtatcaagatctcctaagtaactgtgattccttgaagaatacagctggctgtgaacatgagttactcaaggaaaagtgcaaggctacttgcctatgtgagaacaaaatttactgatttacctagtgagcattgtgcaagactgcatggataagggctgcatcatttaattgcgacataccagtggaaattgtatgtatgttagtgacaaatttgatttcaaagagcaatgcatcttctcccccagatcatcacagaaatcactttcaggcaatgatttacaaaagtagcatagtagatgatgacaactgtgaactctgacataaatttagtgctttataacgaactgaatcaggttgaggattttgaaaactgtataaccataggatttaggtcactaggactttggatcaaaatggtgcattacgtatttcctgaaacatgctaaagaagaagactgtaacatcattgccattcctactacctgagtttttacttgcataaacaataaattcaaagctttacatctgcc

SEQ ID NO: 124027 - DNA, 2170 bp, Homo sapiens
  Payload ID: 4351
  Gene Symbol: CRISP3
  Gene Name: cysteine-rich secretory protein 3
  Uniprot ID: P54108
  ENST ID: ENST00000263045
  CDS Start-End: 48-824
atatacggctctaaccttctctctctgcaccttccttctgtcaatagatgaaacaaatacttcatcctgctctggaaaccactgcaatgacattattcccagtgctgttgttcctggttgctgggctgcttccatcttttccagcaaatgaagataaggatcccgcttttactgctttgttaaccacccaaacacaagtgcaaagggagattgtgaataagcacaatgaactgaggagagcagtatctccccctgccagaaacatgctgaagatggaatggaacaaagaggctgcagcaaatgcccaaaagtgggcaaaccagtgcaattacagacacagtaacccaaaggatcgaatgacaagtctaaaatgtggtgagaatctctacatgtcaagtgcctccagctcatggtcacaagcaatccaaagctggtttgatgagtacaatgattttgactttggtgtagggccaaagactcccaacgcagtggttggacattatacacaggttgtttggtactcttcatacctcgttggatgtggaaatgcctactgtcccaatcaaaaagttctaaaatactactatgtttgccaatattgtcctgctggtaattgggctaatagactatatgtcccttatgaacaaggagcaccttgtgccagttgcccagataactgtgacgatggactatgcaccaatggttgcaagtacgaagatctctatagtaactgtaaaagtttgaagctcacattaacctgtaaacatcagttggtcagggacagttgcaaggcctcctgcaattgttcaaacagcatttattaaatacgcattacacaccgagtagggctatgtagagaggagtcagattatctacttagatttggcatctacttagatttaacatatactagctgagaaattgtaggcatgtttgatacacatttgatttcaaatgtttttcttctggatctgctttttattttacaaaaatatttttcatacaaatggttaaaaagaaacaaaatctataacaacaactttggatttttatatataaactttgtgatttaaatttactgaatttaattagggtgaaaattttgaaagttgtattctcatatgactaagttcactaaaaccctggattgaaagtgaaaattatgttcctagaacaaaatgtacaaaaagaacaatataattttcacatgaacccttggctgtagttgcctttcctagctccactctaaggctaagcatcttcaaagacgttttcccatatgctgtcttaattcttttcactcattcacccttcttcccaatcatctggctggcatcctcacaattgagttgaagctgttcctcctaaaacaatcctgacttttattttgccaaaatcaatacaatcctttgaattttttatctgcataaattttacagtagaatatgatcaaaccttcatttttaaacctctcttctctttgacaaaacttccttaaaaaagaatacaagataatataggtaaataccctccactcaaggaggtagaactcagtcctctcccttgtgagtcttcactaaaatcagtgactcacttccaaagagtggagtatggaaagggaaacatagtaactttacaggggagaaaaatgacaaatgacgtcttcaccaagtgatcaaaattaacgtcaccagtgataagtcattcagatttgttctagataatctttctaaaaattcataatcccaatctaattatgagctaaaacatccagcaaactcaagttgaaggacattctacaaaatatccctggggtattttagagtattcctcaaaactgtaaaaatcatggaaaataagggaatcctgagaaacaatcacagaccacatgagactaaggagacatgtgagccaaatgcaatgtgcttcttggatcagatcctggaacagaaaaagatcagtaatgaaaaaactgatgaagtctgaatagaatctggagtatttttaacagtagtgttgatttcttaatcttgataaatatagcagggtaatgtaagatgataacgttagagaaactgaaactgggtgagggctatctaggaattctctgtactatcttaccaaattttcggtaagtctaagaaagcaatgcaaaataaaaagtgtcttg

SEQ ID NO: 124028 - DNA, 645 bp, Homo sapiens
  Payload ID: 4351
  Gene Symbol: CRISP3
  Gene Name: cysteine-rich secretory protein 3
  ENST ID: ENST00000354620
  CDS Start-End: 71-645
aaaacaggaaataggtgtttcatatatacggctctaaccttctctctctgcaccttccttctgtcaatagatgaaacaaatacttcatcctgctctggaaaccactgatccctgttccaccggttttgttttcccagcaatgacattattcccagtgctgttgttcctggttgctgggctgcttccatcttttccagcaaatgaagataaggatcccgcttttactgctttgttaaccacccaaacacaagtgcaaagggagattgtgaataagcacaatgaactgaggagagcagtatctccccctgccagaaacatgctgaagatggaatggaacaaagaggctgcagcaaatgcccaaaagtgggcaaaccagtgcaattacagacacagtaacccaaaggatcgaatgacaagtctaaaatgtggtgagaatctctacatgtcaagtgcctccagctcatggtcacaagcaatccaaagctggtttgatgagtacaatgattttgactttggtgtagggccaaagactcccaacgcagtggttggacattatacacaggttgtttggtactcttcatacctcgttggatgtggaaatgcctactgtcccaatcaaaaagttctaaaatactactatgtttg

SEQ ID NO: 124029 - DNA, 872 bp, Homo sapiens
  Payload ID: 4351
  Gene Symbol: CRISP3
  Gene Name: cysteine-rich secretory protein 3
  ENST ID: ENST00000371159
  CDS Start-End: 20-850
accttccttctgtcaatagatgaaacaaatacttcatcctgctctggaaaccactgcatgtaccaatcattttaatgcagatccctgttccaccggttttgttttcccagcaatgacattattcccagtgctgttgttcctggttgctgggctgcttccatcttttccagcaaatgaagataaggatcccgcttttactgctttgttaaccacccaaacacaagtgcaaagggagattgtgaataagcacaatgaactgaggagagcagtatctccccctgccagaaacatgctgaagatggaatggaacaaagaggctgcagcaaatgcccaaaagtgggcaaaccagtgcaattacagacacagtaacccaaaggatcgaatgacaagtctaaaatgtggtgagaatctctacatgtcaagtgcctccagctcatggtcacaagcaatccaaagctggtttgatgagtacaatgattttgactttggtgtagggccaaagactcccaacgcagtggttggacattatacacaggttgtttggtactcttcatacctcgttggatgtggaaatgcctactgtcccaatcaaaaagttctaaaatactactatgtttgccaatattgtcctgctggtaattgggctaatagactatatgtcccttatgaacaaggagcaccttgtgccagttgcccagataactgtgacgatggactatgcaccaatggttgcaagtacgaagatctctatagtaactgtaaaagtttgaagctcacattaacctgtaaacatcagttggtcagggacagttgcaaggcctcctgcaattgttcaaacagcatttattaaatacgcattacacaccgagtag

SEQ ID NO: 124030 - DNA, 2205 bp, Homo sapiens
  Payload ID: 4351
  Gene Symbol: CRISP3
  Gene Name: cysteine-rich secretory protein 3
  Uniprot ID: P54108
  ENST ID: ENST00000433368
  CDS Start-End: 71-877
aaaacaggaaataggtgtttcatatatacggctctaaccttctctctctgcaccttccttctgtcaatagatgaaacaaatacttcatcctgctctggaaaccactgatccctgttccaccggttttgttttcccagcaatgacattattcccagtgctgttgttcctggttgctgggctgcttccatcttttccagcaaatgaagataaggatcccgcttttactgctttgttaaccacccaaacacaagtgcaaagggagattgtgaataagcacaatgaactgaggagagcagtatctccccctgccagaaacatgctgaagatggaatggaacaaagaggctgcagcaaatgcccaaaagtgggcaaaccagtgcaattacagacacagtaacccaaaggatcgaatgacaagtctaaaatgtggtgagaatctctacatgtcaagtgcctccagctcatggtcacaagcaatccaaagctggtttgatgagtacaatgattttgactttggtgtagggccaaagactcccaacgcagtggttggacattatacacaggttgtttggtactcttcatacctcgttggatgtggaaatgcctactgtcccaatcaaaaagttctaaaatactactatgtttgccaatattgtcctgctggtaattgggctaatagactatatgtcccttatgaacaaggagcaccttgtgccagttgcccagataactgtgacgatggactatgcaccaatggttgcaagtacgaagatctctatagtaactgtaaaagtttgaagctcacattaacctgtaaacatcagttggtcagggacagttgcaaggcctcctgcaattgttcaaacagcatttattaaatacgcattacacaccgagtagggctatgtagagaggagtcagattatctacttagatttggcatctacttagatttaacatatactagctgagaaattgtaggcatgtttgatacacatttgatttcaaatgtttttcttctggatctgctttttattttacaaaaatatttttcatacaaatggttaaaaagaaacaaaatctataacaacaactttggatttttatatataaactttgtgatttaaatttactgaatttaattagggtgaaaattttgaaagttgtattctcatatgactaagttcactaaaaccctggattgaaagtgaaaattatgttcctagaacaaaatgtacaaaaagaacaatataattttcacatgaacccttggctgtagttgcctttcctagctccactctaaggctaagcatcttcaaagacgttttcccatatgctgtcttaattcttttcactcattcacccttcttcccaatcatctggctggcatcctcacaattgagttgaagctgttcctcctaaaacaatcctgacttttattttgccaaaatcaatacaatcctttgaattttttatctgcataaattttacagtagaatatgatcaaaccttcatttttaaacctctcttctctttgacaaaacttccttaaaaaagaatacaagataatataggtaaataccctccactcaaggaggtagaactcagtcctctcccttgtgagtcttcactaaaatcagtgactcacttccaaagagtggagtatggaaagggaaacatagtaactttacaggggagaaaaatgacaaatgacgtcttcaccaagtgatcaaaattaacgtcaccagtgataagtcattcagatttgttctagataatctttctaaaaattcataatcccaatctaattatgagctaaaacatccagcaaactcaagttgaaggacattctacaaaatatccctggggtattttagagtattcctcaaaactgtaaaaatcatggaaaataagggaatcctgagaaacaatcacagaccacatgagactaaggagacatgtgagccaaatgcaatgtgcttcttggatcagatcctggaacagaaaaagatcagtaatgaaaaaactgatgaagtctgaatagaatctggagtatttttaacagtagtgttgatttcttaatcttgataaatatagcagggtaatgtaagatgataacgttagagaaactgaaactgggtgagggctatctaggaattctctgtactatcttaccaaattttcggtaagtctaagaaagcaatgc

SEQ ID NO: 124031 - DNA, 4287 bp, Homo sapiens
  Payload ID: 4352
  Gene Symbol: CRISPLD1
  Gene Name: cysteine-rich secretory protein LCCL domain containing 1
  Uniprot ID: Q9H336
  ENST ID: ENST00000262207
  CDS Start-End: 469-1971
ggcgcctggttctgcgcgtactggctgtacggagcaggagcaagaggtcgccgccagcctccgccgccgagcctcgttcgtgtccccgcccctcgctcctgcagctactgctcagaaacgctggggcgcccaccctggcagactaacgaagcagctcccttcccaccccaactgcaggtctaattttggacgctttgcctgccatttcttccaggttgagggagccgcagaggcggaggctcgcgtattcctgcagtcagcacccacgtcgcccccggacgctcggtgctcaggcccttcgcgagcggggctctccgtctgcggtcccttgtgaaggctctgggcggctgcagaggccggccgtccggtttggctcacctctcccaggaaacttcacactggagagccaaaaggagtggaagagcctgtcttggagattttcctggggaaatcctgaggtcattcattatgaagtgtaccgcgcgggagtggctcagagtaaccacagtgctgttcatggctagagcaattccagccatggtggttcccaatgccactttattggagaaacttttggaaaaatacatggatgaggatggtgagtggtggatagccaaacaacgagggaaaagggccatcacagacaatgacatgcagagtattttggaccttcataataaattacgaagtcaggtgtatccaacagcctctaatatggagtatatgacatgggatgtagagctggaaagatctgcagaatcctgggctgaaagttgcttgtgggaacatggacctgcaagcttgcttccatcaattggacagaatttgggagcacactggggaagatataggcccccgacgtttcatgtacaatcgtggtatgatgaagtgaaagactttagctacccatatgaacatgaatgcaacccatattgtccattcaggtgttctggccctgtatgtacacattatacacaggtcgtgtgggcaactagtaacagaatcggttgtgccattaatttgtgtcataacatgaacatctgggggcagatatggcccaaagctgtctacctggtgtgcaattactccccaaagggaaactggtggggccatgccccttacaaacatgggcggccctgttctgcttgcccacctagttttggagggggctgtagagaaaatctgtgctacaaagaagggtcagacaggtattatccccctcgagaagaggaaacaaatgaaatagaacgacagcagtcacaagtccatgacacccatgtccggacaagatcagatgatagtagcagaaatgaagtcataagcgcacagcaaatgtcccaaattgtttcttgtgaagtaagattaagagatcagtgcaaaggaacaacctgcaataggtacgaatgtcctgctggctgtttggatagtaaagctaaagttattggcagtgtacattatgaaatgcaatccagcatctgtagagctgcaattcattatggtataatagacaatgatggtggctgggtagatatcactagacaaggaagaaagcattatttcatcaagtccaatagaaatggtattcaaacaattggcaaatatcagtctgctaattccttcacagtctctaaagtaacagttcaggctgtgacttgtgaaacaactgtggaacagctctgtccatttcataagcctgcttcacattgcccaagagtatactgtcctcgtaactgtatgcaagcaaatccacattatgctcgtgtaattggaactcgagtttattctgatctgtccagtatctgcagagcagcagtacatgctggagtggttcgaaatcacggtggttatgttgatgtaatgcctgtggacaaaagaaagacctacattgcttcttttcagaatggaatcttctcagaaagtttacagaatcctccaggaggaaaggcattcagagtgtttgctgttgtgtgaaactgaatacttggaagaggaccataaagactattccaaatgcaatatttctgaattttgtataaaactgtaacattactgtacagagtacatcaactattttcagcccaaaaaggtgccaaatgcatataaatcttgataaacaaagtctataaaataaaacatgggacattagctttgggaaaagtaatgaaaatataatggttttagaaatcctgtgttaaatattgctatattttcttagcagttatttctacagttaattacatagtcatgattgttctacgtttcatatattatatggtgctttgtatatgccactaataaaatgaatctaaacattgaatgtgaatggccctcagaaaatcatctagtgcatttaaaaataatcgactctaaaactgaaagaaaccttatcacattttccccagttcaatgctatgccattaccaactccaaataatctcaaataattttccacttaataactgtaaagtttttttctgttaatttaggcatatagaatattaaattctgatattgcacttcttattttatataaaataatcctttaatatccaaatgaatctgttaaaatgtttgattccttgggaatggccttaaaaataaatgtaataaagtcagagtggtggtatgaaaacattcctagtgatcatgtagtaaatgtagggttaagcatggacagccagagctttctatgtactgttaaaattgaggtcacatattttcttttgtatcctggcaaatactcctgcaggccaggaagtataatagcaaaaagttgaacaaagatgaactaatgtattacattaccattgccactgatttttttttaaatggtaaatgaccttgtatataaatattgccatatcatggtacctataatggtgatatatttgtttctatgaaaaatgtattgtgctttgatactaaaaatctgtaaaatgttagttttggtaattttttttctgctggtggatttacatattaaattttttctgctggtggataaacattaaaattaatcatgtttcaaagttttattttcagttccttttgcatgcctattttgatttagaaatcactttaagataaatgaacaaaattattgtaagtcttctaaacttggtttattgacgttagtataaataacatacaataccagatgtctacaaaatcgacctgattatttaggtatttgtatgtgaaagagaaacacatatttagaaacacagcaagggagattttgaataaagagagagatgaatttataaagtaggaaaaaaagaatctgaaagatacaaagtgattataaaagaattgacaggacaataaatacttcaaatacttttaggaagtaaatgagtaggagtttaggagggataaacgagataaattccatgcaatgatcaaggaaagcaagagagcagataatacaaaagaaaaagaagaaggttcacataaatagcttctggagtgcaaattataaagacatcaacatttttgatcatataataagtactggcttacagctaagtggttccaaatactggtaattaaaacaatgatgtatacgttaaagattgcaaaacttaaaagcagatttttatgggaacttttttcgaaaggatacatgaccaccttcttaaatagtatgactttacatagactctttttctggtccttactgctcctcccacaacagggaagcccgatcagttctgtcagtataaggttttcttctatttgcccttagtttagatctccatcatcaattccacttactattgtaataccttcagctggagcctgtgtctttctccattcctttttaatacattcgtatttcccagccccagaacccttgaaattaactcttccatgagttttcattgctgaagaaaaaccaaacattcttgtaaaaacatttaagaacttccatagtcttgttcatattgtttacctatcttctacacaaggcgtgtccttgggtaagttatttaacttcaatttaccttacctgtaaaatggaacaaataatatctccttaagattgctctacgaattaattgacacattatgtgtgatgtacttaaaggaataataaatgcataatatgaggtcagtggacgccattttctgttataatcatttttgttatctaatttggggaaactattcatctgtcatatactattgatcctttggcacttaaataaatgtgaaatcctccaggaattttcctgtgattctccttgtaagaattaaatgctctctaatatgatatccctttaa

SEQ ID NO: 124032 - DNA, 1964 bp, Homo sapiens
  Payload ID: 4352
  Gene Symbol: CRISPLD1
  Gene Name: cysteine-rich secretory protein LCCL domain containing 1
  Uniprot ID: Q9H336
  ENST ID: ENST00000517786
  CDS Start-End: 421-1365
aaaggtgctgctggtaataaaacatgaaactatatcttatgcttggtcaagacgtgtcaaatctgtatctgaaatagtgaatgaatgagatcagatgttgtccagagaaggaaaatcaaatgataaaagtgttgagagaggggcagctcttgaaggaagatggaataagaacatggaaactcctgtgtggaaagaaaaggccaagaggtctgctaaatcaagagtactgtgaataaacatgggatgtagagctggaaagatctgcagaatcctgggctgaaagttgcttgtgggaacatggacctgcaagcttgcttccatcaattggacagaatttgggagcacactggggaagatataggcccccgacgtttcatgtacaatcgtggtatgatgaagtgaaagactttagctacccatatgaacatgaatgcaacccatattgtccattcaggtgttctggccctgtatgtacacattatacacaggggaaactggtggggccatgccccttacaaacatgggcggccctgttctgcttgcccacctagttttggagggggctgtagagaaaatctgtgctacaaagaagggtcagacaggtattatccccctcgagaagaggaaacaaatgaaatagaacgacagcagtcacaagtccatgacacccatgtccggacaagatcagatgatagtagcagaaatgaagtcataagcgcacagcaaatgtcccaaattgtttcttgtgaagtaagattaagagatcagtgcaaaggaacaacctgcaataggtacgaatgtcctgctggctgtttggatagtaaagctaaagttattggcagtgtacattatgaaatgcaatccagcatctgtagagctgcaattcattatggtataatagacaatgatggtggctgggtagatatcactagacaaggaagaaagcattatttcatcaagtccaatagaaatggtattcaaacaattggcaaatatcagtctgctaattccttcacagtctctaaagtaacagttcaggctgtgacttgtgaaacaactgtggaacagctctgtccatttcataagcctgcttcacattgcccaagagtatactgtcctcgtaactgtatgcaagcaaatccacattatgctcgtgtaattggaactcgagtttattctgatctgtccagtatctgcagagcagcagtacatgctggagtggttcgaaatcacggtggttatgttgatgtaatgcctgtggacaaaagaaagacctacattgcttcttttcagaatggaatcttctcagaaagtttacagaatcctccaggaggaaaggcattcagagtgtttgctgttgtgtgaaactgaatacttggaagaggaccataaagactattccaaatgcaatatttctgaattttgtataaaactgtaacattactgtacagagtacatcaactattttcagcccaaaaaggtgccaaatgcatataaatcttgataaacaaagtctataaaataaaacatgggacattagctttgggaaaagtaatgaaaatataatggttttagaaatcctgtgttaaatattgctatattttcttagcagttatttctacagttaattacatagtcatgattgttctacgtttcatatattatatggtgctttgtatatgccactaataaaatgaatctaaacattgaatgtgaatggccctcagaaaatcatctagtgcatttaaaaataatcgactctaaaactgaaagaaaccttatcacattttccccagttcaatgctatgccattaccaactccaaataatctcaaataattttccacttaataactgtaaagtttttttctgttaatttaggcatatagaatattaaattctgatattgcacttcttattttatataaaataatcctttaatatccaaatgaatctgttaaaatg

SEQ ID NO: 124033 - DNA, 2100 bp, Homo sapiens
  Payload ID: 4352
  Gene Symbol: CRISPLD1
  Gene Name: cysteine-rich secretory protein LCCL domain containing 1
  ENST ID: ENST00000523524
  CDS Start-End: 563-1501
agaacgctggacaatccagtaaaggtgctgctggtaataaaacatgaaactatatcttatgcttggtcaagacgtgtcaaatctgtatctgaaatagtgaatgaatgagatcagatgttgtccagagaaggaaaatcaaatgataaaagtgttgagagaggggcagctcttgaaggaagatggaataagaacatggaaactcctgtgtggaaagaaaaggccaagaggtctgctaaatcaagagtactgtgaataaacatgggatgtagagctggaaagatctgcagaatcctgggctgaaagttgcttgtgggaacatggacctgcaagcttgcttccatcaattggacagaatttgggagcacactggggaagatataggcccccgacgtttcatgtacaatcgtggtatgatgaagtgaaagactttagctacccatatgaacatgaatgcaacccatattgtccattcaggtgttctggccctgtatgtacacattatacacaggtcgtgtgggcaactagtaacagaatcggttgtgccattaatttgtgtcataacatgaacatctgggggcagatatggcccaaagctgtctacctggtgtgcaattactccccaaagggaaactggtggggccatgccccttacaaacatgggcggccctgttctgcttgcccacctagttttggagggggctgtagagaaaatctgtgctacaaagaagggtcagacaggtattatccccctcgagaagaggaaacaaatgaaatagaacgacagcagtcacaagtccatgacacccatgtccggacaagatcagatgatagtagcagaaatgaagtcataagcgcacagcaaatgtcccaaattgtttcttgtgaagtaagattaagagatcagtgcaaaggaacaacctgcaataggtacgaatgtcctgctggctgtttggatagtaaagctaaagttattggcagtgtacattatgaaatgcaatccagcatctgtagagctgcaattcattatggtataatagacaatgatggtggctgggtagatatcactagacaaggaagaaagcattatttcatcaagtccaatagaaatggtattcaaacaattggcaaatatcagtctgctaattccttcacagtctctaaagtaacagttcaggctgtgacttgtgaaacaactgtggaacagctctgtccatttcataagcctgcttcacattgcccaagagtatactgtcctcgtaactgtatgcaagcaaatccacattatgctcgtgtaattggaactcgagtttattctgatctgtccagtatctgcagagcagcagtacatgctggagtggttcgaaatcacggtggttatgttgatgtaatgcctgtggacaaaagaaagacctacattgcttcttttcagaatggaatcttctcagaaagtttacagaatcctccaggaggaaaggcattcagagtgtttgctgttgtgtgaaactgaatacttggaagaggaccataaagactattccaaatgcaatatttctgaattttgtataaaactgtaacattactgtacagagtacatcaactattttcagcccaaaaaggtgccaaatgcatataaatcttgataaacaaagtctataaaataaaacatgggacattagctttgggaaaagtaatgaaaatataatggttttagaaatcctgtgttaaatattgctatattttcttagcagttatttctacagttaattacatagtcatgattgttctacgtttcatatattatatggtgctttgtatatgccactaataaaatgaatctaaacattgaatgtgaatggccctcagaaaatcatctagtgcatttaaaaataatcgactctaaaactgaaagaaaccttatcacattttccccagttcaatgctatgccattaccaactccaaataatctcaaataattttccacttaataactgtaaagtttttttctgttaatttaggcatatagaatattaaattctgatattgcacttcttattttatataaaataatcctttaatatccaaatgaatctgttaaaatg

SEQ ID NO: 124034 - DNA, 553 bp, Homo sapiens
  Payload ID: 4352
  Gene Symbol: CRISPLD1
  Gene Name: cysteine-rich secretory protein LCCL domain containing 1
  ENST ID: ENST00000520277
  CDS Start-End: 239-553
agaaacgctggggcgcccaccctggcagactaacgaagcagctcccttcccaccccaactgcaggtctaattttggacgctttgcctgccatttcttccaggttgagggagccgcagaggcggaggccggccgtccggtttggctcacctctcccaggaaacttcacactggagagccaaaaggagtggaagagcctgtcttggagattttcctggggaaatcctgaggtcattcattatgaagtgtaccgcgcgggagtggctcagagtaaccacagtgctgttcatggctagagcaattccagccatggtggttcccaatgccactttattggagaaacttttggaaaaatacatggatgaggatggtgagtggtggatagccaaacaacgagggaaaagggccatcacagacaatgacatgcagagtattttggaccttcataataaattacgaagtcaggtgtatccaacagcctctaatatggagtatatgacatgggatgtagagctggaaagatctgcagaatcctgggctgaaagttgcttgtgg

SEQ ID NO: 124035 - DNA, 4586 bp, Homo sapiens
  Payload ID: 4353
  Gene Symbol: CRISPLD2
  Gene Name: cysteine-rich secretory protein LCCL domain containing 2
  Uniprot ID: Q9H0B8
  ENST ID: ENST00000262424
  CDS Start-End: 225-1718
cactcgcatcccagggcgtctccggctgctcctattgagctgtctgctcgctgtgcccgctgtgcctgctgtgcccgcgctgtcgccgctgctaccgcgtctgctggacgcgggagacgccagcgagctggtgattggagccctgcggagagctcaagcgcccagctctgcccgaggagcccaggctgccccgtgagtcccatagttgctgcaggagtggagccatgagctgcgtcctgggtggtgtcatccccttggggctgctgttcctggtctgcggatcccaaggctacctcctgcccaacgtcactctcttagaggagctgctcagcaaataccagcacaacgagtctcactcccgggtccgcagagccatccccagggaggacaaggaggagatcctcatgctgcacaacaagcttcggggccaggtgcagcctcaggcctccaacatggagtacatgacctgggatgacgaactggagaagtctgctgcagcgtgggccagtcagtgcatctgggagcacgggcccaccagtctgctggtgtccatcgggcagaacctgggcgctcactggggcaggtatcgctctccggggttccatgtgcagtcctggtatgacgaggtgaaggactacacctacccctacccgagcgagtgcaacccctggtgtccagagaggtgctcggggcccatgtgcacgcactacacacagatagtttgggccaccaccaacaagatcggttgtgctgtgaacacctgccggaagatgactgtctggggagaagtttgggagaacgcggtctactttgtctgcaattattctccaaaggggaactggattggagaagccccctacaagaatggccggccctgctctgagtgcccacccagctatggaggcagctgcaggaacaacttgtgttaccgagaagaaacctacactccaaaacctgaaacggacgagatgaatgaggtggaaacggctcccattcctgaagaaaaccatgtttggctccaaccgagggtgatgagacccaccaagcccaagaaaacctctgcggtcaactacatgacccaagtcgtcagatgtgacaccaagatgaaggacaggtgcaaagggtccacgtgtaacaggtaccagtgcccagcaggctgcctgaaccacaaggcgaagatctttggaactctgttctatgaaagctcgtctagcatatgccgcgccgccatccactacgggatcctggatgacaagggaggcctggtggatatcaccaggaacgggaaggtccccttcttcgtgaagtctgagagacacggcgtgcagtccctcagcaaatacaaaccttccagctcattcatggtgtcaaaagtgaaagtgcaggatttggactgctacacgaccgttgctcagctgtgcccgtttgaaaagccagcaactcactgcccaagaatccattgtccggcacactgcaaagacgaaccttcctactgggctccggtgtttggaaccaacatctatgcagatacctcaagcatctgcaagacagccgtgcacgcgggagtcatcagcaacgagagtgggggtgacgtggacgtgatgcccgtggataaaaagaagacctacgtgggctcgctcaggaatggagttcagtctgaaagcctggggactcctcgggatggaaaggccttccggatctttgctgtcaggcagtgaatttccagcaccaggggagaaggggcgtcttcaggagggcttcggggttttgcttttatttttattttgtcattgcggggtatatggagagtcaggaaacttcctttgactgatgttcagtgtccatcactttgtggcctgtgggtgaggtgacatctcatcccctcactgaagcaacagcatcccaaggtgctcagccggactccctggtgcctgatcctgctggggcctgggggtctccatctggacgtcctctctcctttagagatctgagctgtctcttaaaggggacagttgcccaaaatgttccttgctatgtgttcttctgttggtggaggaagttgatttcaacctccctgccaaaagaacaaaccatttgaagctcacaattgtgaagcattcacggcgtcggaagaggccttttgagcaagcgccaatgagtttcaggaatgaagtagaaggtagttatttaaaaataaaaaacacagtccgtccctaccaatagaggaaaatggttttaatgtttgctggtcagacagacaaatgggctagagtaagagggctgcgggtatgagagaccccggctccgccctggcacgtgtccttgctggcggcccgccacaggcccccttcaatggccgcattcaggatggctctatacacagcagtgctggtttatgtagagttcagcagtcacttcagagatgtatcttgtctttgtcaggcccttcgtcttcatggcccacctgttttctgccgtgacctttggtcccattgaggactaaggatcgggaccctttctttaccccctacccgttgtggctcccaccctgcctcggactggtttacgtgtcctggttcacacccaggacttttctttgcaagcgaacctgtttgaagcccaagtcttaactcctggtctcgtaaggttccactgagacgagatgtctgagaacaaccaaagaaggcctgctctttgctgcttttaaaaaatgacaattaaatgtgcagattccccacgcacccgatgacctattttttcagccgtgggaggaatggagtctttggtacattcctcaccgaggttagcagctcagtttgtggttatgaaaccgtctgtggcctcatgacagcgagagatgggaatacactagaaggatctcttttcctgttttcgtgaaacgactcttgccaaacgttcccgaggcgccaaggagtgtagtacaccctggctgccatcactctataaaagtgcttcatgagcccagaccaaaagcccacagtgaaatgaagtacccttttgtaaatagcatttttttgcagaaggtgaaaattccactctctaccaccgggccagccaatagatcactttggtgaatgctagtttcaaatttgattcaaaatatttcttaggtgaaagaactagcagaaagtcaaaaactaagatactgtagactggacaagaaattctacctgggcacctaggtgatgccttctttctttgattgcctttctaataaatgcagaatctgaaggtaaataggtttaaaacaaaacaaaaacccacccctttaaggagttggtaaaaagcagttcaactcttagcttgactgagctaaaattcacaggactacgtgctttgtgcattgtagtctagtcgtaattcataggtactgactcctcagccccaaatgtcggagaggaagaattcggtcagcctgtcaggtcgtgagtccagttaccaccaaacatctgggaaacttctgggtgctgggtgctctgctgctggacttttgtggctgtgtctgtgtctgcaagataaattagatcgccctgtggggtttgcagaattagtgaagggtccaggacgatcccagtgggctcgcttccaaagcatcccactcaagggagacttgaaacttccagtgtgagttgaccccatcatttaaaaataaagtccccgggttccttaatgcctccttcactgggccttcctagcaggatagaaagtccttgcccagagcaggacctggctgtctttttttttttttttttttttttcccgagaccaagtttcactctgttgcccaaggtagagtgcagtggcgtgatctctgctcattgcaactgccgcctcccgggttcaagcaattctcatgcatcagcctcccaagtacctgggactacaggcgtgagctaccatgcccggctaatttttgtatttttagtagagatggggtttcattatgttggccaggctggtctcgaactccttacctcaggtgatccacccaccttggcctcccgaagtgctgggattacaggcatgagccactgcgcccggccatggacctggctgtctttatcatccccacaaacattttgaaactggaatatttgtcttcagaaaatggaaacaagactataaatgataagccctgtccctagcaccacctctcctgtgtgtggaatagaggcccctcgtgctaccaacacttaccctgtgtttaaaaagatcttgtaccaagccaacggcgttcctggctctcctgcccacaggatgaacattttcggcttccttaggagttttgccctaccgtattccaaagcgtgtgctggtttctcatattgtctgtaggctcactcagcccgcagtttatgtgtgtgcttttttctatgaaaaatgatgtattttgctacttcctgtgtacaaagttttattgtaaatgttttttgtgctttgcatgaacaggggccacgttgttgcaattgtttcagtagaactggtttgatttctaaaatgttcctgtaacatatcttttatgaacaaatctgaacaatttgtgaaataaaacattgaaaaccatc

SEQ ID NO: 124036 - DNA, 808 bp, Homo sapiens
  Payload ID: 4353
  Gene Symbol: CRISPLD2
  Gene Name: cysteine-rich secretory protein LCCL domain containing 2
  Uniprot ID: Q9H0B8
  ENST ID: ENST00000569090
  CDS Start-End: 204-566
ccggctgctcctattgagctgtctgctcgctgtgcccgctgtgcctgctgtgcccgcgctgtcgccgctgctaccgcgtctgctggacgcgggagacgccagcgagctggtgattggagccctgcggagagctcaagcgcccagctctgcccgaggagcccaggctgccccgtgagtcccatagttgctgcaggagtggagccatgagctgcgtcctgggtggtgtcatccccttggggctgctgttcctggtctgcggatcccaaggctacctcctgcccaacgtcactctcttagaggagctgctcagcaaataccagcacaacgagtctcactcccgggtccgcagagccatccccagggaggacaaggaggagatcctcatgctgcacaacaagcttcggggccaggtgcagcctcaggcctccaacatggagtacatgacctgggatgacgaactggagaagtctgctgcagcgtgggccagtcagtgcatctgggagcacgggcccaccagtctgctggtgtccatcgggcagaacctgggcgctcactggggcaggtaagagccacaagttcctctccggctgccgcaggaccccactgccgtgtgccgggctcagcacttgtgccccttatcaagtttagcctgcaaagagagtgagagagaccacccgtcccatcgatattctgggaaactgaggcttggcatccaggaacactcctgagtgactgacaaaatgtattcaagcttggttggctgaccccagacactgatgattgattaaagtttgtagtttgggttttc

SEQ ID NO: 124037 - DNA, 538 bp, Homo sapiens
  Payload ID: 4353
  Gene Symbol: CRISPLD2
  Gene Name: cysteine-rich secretory protein LCCL domain containing 2
  ENST ID: ENST00000566151
  CDS Start-End: 483-538
actcgcatcccagggcgtctccggctgctcctattgagctgtctgctcgctgtgcccgctgtgcctgctgtgcccgcgctgtcgccgctgctaccgcgtctgctggacgcgggagacgccagcgagctggtgattggagccctgcggagattgggtcttatccccaagatatctcattatgtacatgcaaatcagcggagcatcgtcatgacaccaggaggacaccccgtgacgccgattaccgcactctcaacctcaacccagcgtcagagttttctggcatctcttctttgagcctggccgcctgcagctggaaatgctcatatatggtggtgtgactaacctgagagagagagatcagggatcctgagaagttctgcattcttggtctgcttcccagtgggacgaagctcaagcgcccagctctgcccgaggagcccaggctgccccgtgagtcccatagttgctgcaggagtggagccatgagctgcgtcctgggtggtgtcatccccttggggctgctgttcctggtctgcgg

SEQ ID NO: 124038 - DNA, 1123 bp, Homo sapiens
  Payload ID: 4353
  Gene Symbol: CRISPLD2
  Gene Name: cysteine-rich secretory protein LCCL domain containing 2
  ENST ID: ENST00000563066
  CDS Start-End: 495-1123
cgggaggcggggagtgaagaacaaagagccgttccggagacctgggaggcattgcccatgggtcagggctacactggttttctggctgggctttctgtctttctccaagctctggacacaccgcaccgtgagaaaggctcctggaagcagagcaaccctgcccgggggctgtttctgaaggggcagagcagaggctggaaaacctgcaagccttccctcagagtcactgcgttccctcgtgccacgctcccctcctcttccaaacctgggatgacgaactggagaagtctgctgcagcgtgggccagtcagtgcatctgggagcacgggcccaccagtctgctggtgtccatcgggcagaacctgggcgctcactggggcaggtatcgctctccggggttccatgtgcagtcctggtatgacgaggtgaaggactacacctacccctacccgagcgagtgcaacccctggtgtccagagaggtgctcggggcccatgtgcacgcactacacacagatagtttgggccaccaccaacaagatcggttgtgctgtgaacacctgccggaagatgactgtctggggagaagtttgggagaacgcggtctactttgtctgcaattattctccaaaggggaactggattggagaagccccctacaagaatggccggccctgctctgagtgcccacccagctatggaggcagctgcaggaacaacttgtgttaccgagaagaaacctacactccaaaacctgaaacggacgagatgaatgaggtggaaacggctcccattcctgaagaaaaccatgtttggctccaaccgagggtgatgagacccaccaagcccaagaaaacctctgcggtcaactacatgacccaagtcgtcagatgtgacaccaagatgaaggacaggtgcaaagggtccacgtgtaacaggtaccagtgcccagcaggctgcctgaaccacaaggcgaagatctttggaactctgttctatgaaagctcgtctagcatatgccgcgccgccatccactacgggatcctggatgacaagggaggcctggtggatatcaccaggaacgggaaggtccccttcttcgtgaagtctgagagacacggcgt

SEQ ID NO: 124039 - DNA, 2178 bp, Homo sapiens
  Payload ID: 4353
  Gene Symbol: CRISPLD2
  Gene Name: cysteine-rich secretory protein LCCL domain containing 2
  ENST ID: ENST00000567845
  CDS Start-End: 218-1708
atcccagggcgtctccggctgctcctattgagctgtctgctcgctgtgcccgctgtgcctgctgtgcccgcgctgtcgccgctgctaccgcgtctgctggacgcgggagacgccagcgagctggtgattggagccctgcggagagctcaagcgcccagctctgcccgaggagcccaggctgccccgtgagtcccatagttgctgcaggagtggagccatgagctgcgtcctgggtggtgtcatccccttggggctgctgttcctggtctgcggatcccaaggctacctcctgcccaacgtcactctcttagaggagctgctcagcaaataccagcacaacgagtctcactcccgggtccgcagagccatccccagggaggacaaggaggagatcctcatgctgcacaacaagcttcggggccaggtgcagcctcaggcctccaacatggagtacatgacctgggatgacgaactggagaagtctgctgcagcgtgggccagtcagtgcatctgggagcacgggcccaccagtctgctggtgtccatcgggcagaacctgggcgctcactggggcaggtatcgctctccggggttccatgtgcagtcctggtatgacgaggtgaaggactacacctacccctacccgagcgagtgcaacccctggtgtccagagaggtgctcggggcccatgtgcacgcactacacacagatagtttgggccaccaccaacaagatcggttgtgctgtgaacacctgccggaagatgactgtctggggagaagtttgggagaacgcggtctactttgtctgcaattattctccaaaggggaactggattggagaagccccctacaagaatggccggccctgctctgagtgcccacccagctatggaggcagctgcaggaacaacttgtgttaccgagaaacctacactccaaaacctgaaacggacgagatgaatgaggtggaaacggctcccattcctgaagaaaaccatgtttggctccaaccgagggtgatgagacccaccaagcccaagaaaacctctgcggtcaactacatgacccaagtcgtcagatgtgacaccaagatgaaggacaggtgcaaagggtccacgtgtaacaggtaccagtgcccagcaggctgcctgaaccacaaggcgaagatctttggaactctgttctatgaaagctcgtctagcatatgccgcgccgccatccactacgggatcctggatgacaagggaggcctggtggatatcaccaggaacgggaaggtccccttcttcgtgaagtctgagagacacggcgtgcagtccctcagcaaatacaaaccttccagctcattcatggtgtcaaaagtgaaagtgcaggatttggactgctacacgaccgttgctcagctgtgcccgtttgaaaagccagcaactcactgcccaagaatccattgtccggcacactgcaaagacgaaccttcctactgggctccggtgtttggaaccaacatctatgcagatacctcaagcatctgcaagacagccgtgcacgcgggagtcatcagcaacgagagtgggggtgacgtggacgtgatgcccgtggataaaaagaagacctacgtgggctcgctcaggaatggagttcagtctgaaagcctggggactcctcgggatggaaaggccttccggatctttgctgtcaggcagtgaatttccagcaccaggggagaaggggcgtcttcaggagggcttcggggttttgcttttatttttattttgtcattgcggggtatatggagagtcaggaaacttcctttgactgatgttcagtgtccatcactttgtggcctgtgggtgaggtgacatctcatcccctcactgaagcaacagcatcccaaggtgctcagccggactccctggtgcctgatcctgctggggcctgggggtctccatctggacgtcctctctcctttagagatctgagctgtctcttaaaggggacagttgcccaaaatgttccttgctatgtgttcttctgttggtggaggaagttgatttcaacctccctgccaaaagaacaaaccatttgaagctcacaattgtgaagcattcacggcgtcggaagaggccttttgagcaagcgccaatgagtttcaggaatgaagtagaaggtagttatt

SEQ ID NO: 124040 - DNA, 615 bp, Homo sapiens
  Payload ID: 4353
  Gene Symbol: CRISPLD2
  Gene Name: cysteine-rich secretory protein LCCL domain containing 2
  ENST ID: ENST00000566789
  CDS Start-End: 281-615
tccgcctcctcggcctccctccctcccggctgcccgtggctgctcctggaattggccgctattcaccctcctcggcctccctccctcctacctgcccgtggctgctgctgtctccactggtgggtgaggggaggggctgggactgagtgagcggtttctgccctgcaggtatcgctctccggggttccatgtgcagtcctggtatgacgaggtgaaggactacacctacccctacccgagcgagtgcaacccctggtgtccagagaggtgctcggggcccatgtgcacgcactacacacagatagtttgggccaccaccaacaagatcggttgtgctgtgaacacctgccggaagatgactgtctggggagaagtttgggagaacgcggtctactttgtctgcaattattctccaaaggggaactggattggagaagccccctacaagaatggccggccctgctctgagtgcccacccagctatggaggcagctgcaggaacaacttgtgttaccgagaagaaacctacactccaaaacctgaaacggacgagatgaatgaggtggaaacggctcccattcctgaagaaaaccatgtttggctccaaccgagggt

SEQ ID NO: 124041 - DNA, 1651 bp, Homo sapiens
  Payload ID: 4353
  Gene Symbol: CRISPLD2
  Gene Name: cysteine-rich secretory protein LCCL domain containing 2
  Uniprot ID: Q9H0B8
  ENST ID: ENST00000564567
  CDS Start-End: 206-1555
ctccggctgctcctattgagctgtctgctcgctgtgcccgctgtgcctgctgtgcccgcgctgtcgccgctgctaccgcgtctgctggacgcgggagacgccagcgagctggtgattggagccctgcggagagctcaagcgcccagctctgcccgaggagcccaggctgccccgtgagtcccatagttgctgcaggagtggagccatgagctgcgtcctgggtggtgtcatccccttggggctgctgttcctggtctgcggatcccaaggctacctcctgcccaacgtcactctcttagaggagctgctcagcaaataccagcacaacgagtctcactcccgggtccgcagagccatccccagggaggacaaggaggagatcctcatgctgcacaacaagcttcggggccaggtgcagcctcaggcctccaacatggagtacatgacctgggatgacgaactggagaagtctgctgcagcgtgggccagtcagtgcatctgggagcacgggcccaccagtctgctggtgtccatcgggcagaacctgggcgctcactggggcaggtatcgctctccggggttccatgtgcagtcctggtatgacgaggtgaaggactacacctacccctacccgagcgagtgcaacccctggtgtccagagaggtgctcggggcccatgtgcacgcactacacacagatagtttgggccaccaccaacaagatcggttgtgctgtgaacacctgccggaagatgactgtctggggagaagtttgggagaacgcggtctactttgtctgcaattattctccaaaggggaactggattggagaagccccctacaagaatggccggccctgctctgagtgcccacccagctatggaggcagctgcaggaacaacttgtgttaccgagaagaaacctacactccaaaacctgaaacggacgagatgaatgaggtggaaacggctcccattcctgaagaaaaccatgtttggctccaaccgagggtgatgagacccaccaagcccaagaaaacctctgcggtcaactacatgacccaagtcgtcagatgtgacaccaagatgaaggacaggtgcaaagggtccacgtgtaacaggtaccagtgcccagcaggctgcctgaaccacaaggcgaagatctttggaactctgttctatgaaagctcgtctagcatatgccgcgccgccatccactacgggatcctggatgacaagggaggcctggtggatatcaccaggaacgggaaggtccccttcttcgtgaagtctgagagacacggcgtgcagtccctcagcaaatacaaaccttccagctcattcatggtgtcaaaagtgaaagtgcaggatttggactgctacacgaccgttgctcagctgtgcccgtttgaaaagccagcaactcactgcccaagaatccattgtccggcacactgcaaagacgaaccttcctactgggctccggtgtttggaaccaacatctatgcagatgtgagtaggatgcattttcaacaactatctcgcaaagcctgttaaagacctcaacatgcaagctccaagatctggatacttgaaactttattccagtgcctcttagctaaattaattaattaattaattaattaatttcga

SEQ ID NO: 124042 - DNA, 590 bp, Homo sapiens
  Payload ID: 4353
  Gene Symbol: CRISPLD2
  Gene Name: cysteine-rich secretory protein LCCL domain containing 2
  ENST ID: ENST00000566165
  CDS Start-End: 1-130
caagacagccgtgcacgcgggagtcatcagcaacgagagtgggggtgacgtggacgtgatgcccgtggataaaaagaagacctacgtgggctcgctcaggaatggagttcagtctgaaagaaacatgtaaatcaaaccacaggatgaagttgacatttgcttgcagctcttgggccttttaaaaaataagaggagttccttttcctggcttcgaaaaggaacagcagtggtgatcataatggtcatcagaggagaaccatcccagcaacccagccacagctggtcttcactggacaccatgaactacaccgtccaaaccttcttcactcccgccaacagcagccgttcccctaactataagatgctcaaggaggagcaagaggtggctgtgctgggggcaccccacaaccctgctcccctgacgtccacgtgatccacatccacagcgagacctctgtgaccgaccatgtcatctggtccctgtttaacaccctcttcatgaactcctgctgcctgggcttcatagcatttgcctactccgtgaagtctagggacaggaagatggttgacgacctgaacagggcccaggc

SEQ ID NO: 124043 - DNA, 1297 bp, Homo sapiens
  Payload ID: 4354
  Gene Symbol: CYSRT1
  Gene Name: cysteine-rich tail protein 1
  ENST ID: ENST00000409414
  CDS Start-End: 488-1042
cttgaacccgggaggcagaggttgcagtgagccgagatcgcgcagctgcactccagcctgggcaacagagcaagactccatctcagaaaagaagcagaaagcctccaagagccaatggctctcaagcatcttggtctctgctaagaagaggctcagaggcttagaagccctgcctcgccggggctttgaggtgtgtgagcaatggctggggactgcaggcccgggaatctgagggcctcaccccacttcctttccagagccgtgacctcaggctcacctcctgccctcctctcaggcaagctgcagatgccctttagggcccaggccatgccccggatgtgaggggctgagtcactggtttggcagtgcccctcagagcccaggcctgggctgccacccacctgaggacgagggctgggccagctgtcgtgctccagttgctggggcctcttgggatcttgggaaccccatctctgagccccgccccatggccccgcccctcccaaggagggaaaaggcggctgccagtcgctcaactcaggcactgggacctagagctcagaagaccgagaggacagactgccgtgttgccaccacaggctggaccatggacccccaagagatggtcgtcaagaacccatatgcccacatcagcatcccccgggctcacctgcggcctgacctggggcagcagttagaggtggcttccacctgttcctcatcctcggagatgcagcccctgccagtggggccctgtgccccagagccaacccacctcttgcagccgaccgaggtcccagggcccaagggcgccaagggtaaccagggggctgcccccatccagaaccagcaggcctggcagcagcctggcaacccctacagcagcagtcagcgccaggccggactgacctacgctggccctccgcccgcggggcgcggggatgacatcgcccaccactgctgctgctgcccctgctgccactgctgccactgcccccccttctgccgctgccacagctgctgctgctgtgtcatctcctagcccagcccaccctgccagggccaggacccagacttcagcaaatgtggctcacacagtgccgggacatgccgggacatgcggggtggctgttgtcatgggcgtctgccccttcacaccaggcactggggctcagacccaccaggaaggtggccgttcagcccgagctcctgaaacggaatcccaggtcctggctggagagggacacccctgattaccttaaggcccaggcaataaagcagggtgatcttcctccca

SEQ ID NO: 124044 - DNA, 1336 bp, Homo sapiens
  Payload ID: 4355
  Gene Symbol: CYSTM1
  Gene Name: cysteine-rich transmembrane module containing 1
  Uniprot ID: Q9H1C7
  ENST ID: ENST00000261811
  CDS Start-End: 665-958
tactggcgggactacttgttgcaaggtttatggggaaaagtagccagagagcaatccagttatcagcctcagccccattccgctcaggtacagctcgggaagtaagcccccaaccctagttgggtctggaccaacaagacacgaggaggcagcagcccacagccgacccctcatgccacgcactgagcagggttccgcatggacgctggtcttgcctcccaggcgcctgaactagcggagttggggtatcgggtggagtctcggagaaccaatccaatctgagggggacgcctgtgggagtcctaagtatccagcgcagctgggaggcccacgttgggaagtcggagaccgaccccgcctcccgactgcgccgactgcaagagagcgcttccggcggcgcttggaggccgagcagttgggggcggggctcgtgctgtgacgcaagcctcgcctcgccccgcgccgcgcgcgttgccagggtgatcaggtgactcccggttcgcggcgctgggagcggccgtgacgtcaggcgcccggctgctcctcacttgctctgagacaggtgcggcaagtctactgcgggctggtccgggctcctcaggttcagacccgaccgttatccagtcggttcgtggagaggagaggtgcactttacaggtccccgatgaaccaagagaaccctccaccatatccaggccctggtccaacggccccatacccaccttatccaccacaaccaatgggtccaggacctatggggggaccctacccacctcctcaagggtacccctaccaaggatacccacagtacggctggcagggtggacctcaggagcctcctaaaaccacagtgtatgtggtagaagaccaaagaagagatgagctaggaccatccacctgcctcacagcctgctggacggctctctgttgctgctgtctctgggacatgctcacctgaccagaccagcccagccgtcctgtcctgccagctctgctgccacctctgacaggtgtgcctgcccccatctcttctgattgctgttaacaaatgactagctttgcacagacacctctaccttcagcactatgggattctagattaatgggggttgctactgtttaattcagtgacttgatctttttaatgtccaaaatccatttcttattgatctttaaagatgtgctaaatgacttttttggccaaaggcttagttgtgaaaaatataatttttaaattatacattcaaggtagtggccaaatgtaacacatcaatcatggaatgatttctctgctaacagccgcctgtatgtttcaataaatttgtccaaagctcaa

SEQ ID NO: 124045 - DNA, 1994 bp, Homo sapiens
  Payload ID: 4356
  Gene Symbol: CRELD1
  Gene Name: cysteine-rich with EGF-like domains 1
  Uniprot ID: Q96HD1
  ENST ID: ENST00000326434
  CDS Start-End: 85-1353
aggagacggcccacggcgcccgcgggctggggcggtcgcttcttccttctccgtggcctacgagggtccccagcctgggtaaagatggccccatggcccccgaagggcctagtcccagctatgctctggggcctcagcctcttcctcaacctcccaggacctatctggctccagccctctccacctccccagtcttctcccccgcctcagccccatccgtgtcatacctgccggggactggttgacagctttaacaagggcctggagagaaccatccgggacaactttggaggtggaaacactgcctgggaggaagagaatttgtccaaatacaaagacagtgagacccgcctggtagaggtgctggagggtgtgtgcagcaagtcagacttcgagtgccaccgcctgctggagctgagtgaggagctggtggagagctggtggtttcacaagcagcaggaggccccggacctcttccagtggctgtgctcagattccctgaagctctgctgccccgcaggcaccttcgggccctcctgccttccctgtcctgggggaacagagaggccctgcggtggctacgggcagtgtgaaggagaagggacacgagggggcagcgggcactgtgactgccaagccggctacgggggtgaggcctgtggccagtgtggccttggctactttgaggcagaacgcaacgccagccatctggtatgttcggcttgttttggcccctgtgcccgatgctcaggacctgaggaatcaaactgtttgcaatgcaagaagggctgggccctgcatcacctcaagtgtgtagacattgatgagtgtggcacagagggagccaactgtggagctgaccaattctgcgtgaacactgagggctcctatgagtgccgagactgtgccaaggcctgcctaggctgcatgggggcagggccaggtcgctgtaagaagtgtagccctggctatcagcaggtgggctccaagtgtctcgatgtggatgagtgtgagacagaggtgtgtccgggagagaacaagcagtgtgaaaacaccgagggcggttatcgctgcatctgtgccgagggctacaagcagatggaaggcatctgtgtgaaggagcagatcccaggtgcattccccatcttaactgatttaacccctgaaacaacccgacgctggaagttgggttctcatccccactctacatatgtaaaaatgaagatgcagagagatgaagctactttcccagggctatatggcaagcaagtcgcaaagctgggatcccaatccagacagtctgaccgtggaacgagactcatacacagtcagcaggcttcttctcagagatgacagaagacgagttggtggtgctgcagcagatgttctttggcatcatcatctgtgcactggccacgctggctgctaagggcgacttggtgttcaccgccatcttcattggggctgtggcggccatgactggctactggttgtcagagcgcagtgaccgtgtgctggagggcttcatcaagggcagataatcgcggccaccacctgtaggacctcctcccacccacgctgcccccagagcttgggctgccctcctgctggacactcaggacagcttggtttatttttgagagtggggtaagcacccctacctgccttacagagcagcccaggtacccaggcccgggcagacaaggcccctggggtaaaaagtagccctgaaggtggataccatgagctcttcacctggcggggactggcaggcttcacaatgtgtgaatttcaaaagtttttccttaatggtggctgctagagctttggcccctgcttaggattaggtggtcctcacaggggtggggccatcacagctccctcctgccagctgcatgctgccagttcctgttctgtgttcaccacatccccacaccccattgccacttatttattcatctcaggaaataaagaaaggtcttggaaagttaaaa

SEQ ID NO: 124046 - DNA, 2696 bp, Homo sapiens
  Payload ID: 4356
  Gene Symbol: CRELD1
  Gene Name: cysteine-rich with EGF-like domains 1
  Uniprot ID: Q96HD1
  ENST ID: ENST00000383811
  CDS Start-End: 600-1862
tggcagcgacgcggtgaggagacggcccacggcgcccgcgggctggggcggtcgcttcttccttctccgtggcctacgagggtctggatccttctctgccggctcgtgggccgtgcctttgcccttctgcgaggccctgaatctgatcccttcccttcatatccggatccgggctcctccctccaagcccggggttccggacacctcccccaagacaacccctctggcctcctctccttcagtacttggaatctgatctcttctccctaattctgcggatccggcccctaatattctttatcagaccctcagacaagaggctgacttctgcccccttgtcaaggagcgaggccactttcctctccaccccatgctagcgaggataacttatttctcttctggaattgcatcttatgcgcctttccccacccatccccacagcccctgcaatacccagtttggcctcttttgcttgtaataacgcagatcccagcgccacggcaccttagaacagacctttttctttctcgcgtggggcctgactccttcagtgaagcctctccacgccctctatctgcaggtccccagcctgggtaaagatggccccatggcccccgaagggcctagtcccagctatgctctggggcctcagcctcttcctcaacctcccaggacctatctggctccagccctctccacctccccagtcttctcccccgcctcagccccatccgtgtcatacctgccggggactggttgacagctttaacaagggcctggagagaaccatccgggacaactttggaggtggaaacactgcctgggaggaagagaatttgtccaaatacaaagacagtgagacccgcctggtagaggtgctggagggtgtgtgcagcaagtcagacttcgagtgccaccgcctgctggagctgagtgaggagctggtggagagctggtggtttcacaagcagcaggaggccccggacctcttccagtggctgtgctcagattccctgaagctctgctgccccgcaggcaccttcgggccctcctgccttccctgtcctgggggaacagagaggccctgcggtggctacgggcagtgtgaaggagaagggacacgagggggcagcgggcactgtgactgccaagccggctacgggggtgaggcctgtggccagtgtggccttggctactttgaggcagaacgcaacgccagccatctggtatgttcggcttgttttggcccctgtgcccgatgctcaggacctgaggaatcaaactgtttgcaatgcaagaagggctgggccctgcatcacctcaagtgtgtagacattgatgagtgtggcacagagggagccaactgtggagctgaccaattctgcgtgaacactgagggctcctatgagtgccgagactgtgccaaggcctgcctaggctgcatgggggcagggccaggtcgctgtaagaagtgtagccctggctatcagcaggtgggctccaagtgtctcgatgtggatgagtgtgagacagaggtgtgtccgggagagaacaagcagtgtgaaaacaccgagggcggttatcgctgcatctgtgccgagggctacaagcagatggaaggcatctgtgtgaaggagcagatcccagagtcagcaggcttcttctcagagatgacagaagacgagttggtggtgctgcagcagatgttctttggcatcatcatctgtgcactggccacgctggctgctaagggcgacttggtgttcaccgccatcttcattggggctgtggcggccatgactggctactggttgtcagagcgcagtgaccgtgtgctggagggcttcatcaagggcagataatcgcggccaccacctgtaggacctcctcccacccacgctgcccccagagcttgggctgccctcctgctggacactcaggacagcttggtttatttttgagagtggggtaagcacccctacctgccttacagagcagcccaggtacccaggcccgggcagacaaggcccctggggtaaaaagtagccctgaaggtggataccatgagctcttcacctggcggggactggcaggcttcacaatgtgtgaatttcaaaagtttttccttaatggtggctgctagagctttggcccctgcttaggattaggtggtcctcacaggggtggggccatcacagctccctcctgccagctgcatgctgccagttcctgttctgtgttcaccacatccccacaccccattgccacttatttattcatctcaggaaataaagaaaggtcttggaaagttaaaaggcatcagtcttactacctgtcccaccacccccaccttagggaaatgtcctagaatcctgggaaattgagggcttctttgatggtgagtggagaaaagatagaggagaaggttgcccctgaagtgctgttaggagaaggaggatagaggaatcagccttaggagggttccatgccagctgtcatttggcaaaggaccctggacagatgacttttgcctctgaacttcactcttctctttcctcaaatgggcttcataatgctttccactcaggcttaacatgagaattaaatgaggtgacaaatgtgaagacctggacagtacacaacagatattcaataaaagtgtggtcgccattatgaccagagcctccaagcctcaa

SEQ ID NO: 124047 - DNA, 1728 bp, Homo sapiens
  Payload ID: 4356
  Gene Symbol: CRELD1
  Gene Name: cysteine-rich with EGF-like domains 1
  Uniprot ID: Q96HD1
  ENST ID: ENST00000397170
  CDS Start-End: 51-1313
tgcgttttacgcaggctgtggcagcgacgcggtccccagcctgggtaaagatggccccatggcccccgaagggcctagtcccagctatgctctggggcctcagcctcttcctcaacctcccaggacctatctggctccagccctctccacctccccagtcttctcccccgcctcagccccatccgtgtcatacctgccggggactggttgacagctttaacaagggcctggagagaaccatccgggacaactttggaggtggaaacactgcctgggaggaagagaatttgtccaaatacaaagacagtgagacccgcctggtagaggtgctggagggtgtgtgcagcaagtcagacttcgagtgccaccgcctgctggagctgagtgaggagctggtggagagctggtggtttcacaagcagcaggaggccccggacctcttccagtggctgtgctcagattccctgaagctctgctgccccgcaggcaccttcgggccctcctgccttccctgtcctgggggaacagagaggccctgcggtggctacgggcagtgtgaaggagaagggacacgagggggcagcgggcactgtgactgccaagccggctacgggggtgaggcctgtggccagtgtggccttggctactttgaggcagaacgcaacgccagccatctggtatgttcggcttgttttggcccctgtgcccgatgctcaggacctgaggaatcaaactgtttgcaatgcaagaagggctgggccctgcatcacctcaagtgtgtagacattgatgagtgtggcacagagggagccaactgtggagctgaccaattctgcgtgaacactgagggctcctatgagtgccgagactgtgccaaggcctgcctaggctgcatgggggcagggccaggtcgctgtaagaagtgtagccctggctatcagcaggtgggctccaagtgtctcgatgtggatgagtgtgagacagaggtgtgtccgggagagaacaagcagtgtgaaaacaccgagggcggttatcgctgcatctgtgccgagggctacaagcagatggaaggcatctgtgtgaaggagcagatcccagagtcagcaggcttcttctcagagatgacagaagacgagttggtggtgctgcagcagatgttctttggcatcatcatctgtgcactggccacgctggctgctaagggcgacttggtgttcaccgccatcttcattggggctgtggcggccatgactggctactggttgtcagagcgcagtgaccgtgtgctggagggcttcatcaagggcagataatcgcggccaccacctgtaggacctcctcccacccacgctgcccccagagcttgggctgccctcctgctggacactcaggacagcttggtttatttttgagagtggggtaagcacccctacctgccttacagagcagcccaggtacccaggcccgggcagacaaggcccctggggtaaaaagtagccctgaaggtggataccatgagctcttcacctggcggggactggcaggcttcacaatgtgtgaatttcaaaagtttttccttaatggtggctgctagagctttggcccctgcttaggattaggtggtcctcacaggggtggggccatcacagctccctcctgccagctgcatgctgccagttcctgttctgtgttcaccacatccccacaccccattgccacttatttatt

SEQ ID NO: 124048 - DNA, 1778 bp, Homo sapiens
  Payload ID: 4356
  Gene Symbol: CRELD1
  Gene Name: cysteine-rich with EGF-like domains 1
  Uniprot ID: Q96HD1
  ENST ID: ENST00000452070
  CDS Start-End: 96-1358
gcgacgcggtgaggagacggcccacggcgcccgcgggctggggcggtcgcttcttccttctccgtggcctacgagggtccccagcctgggtaaagatggccccatggcccccgaagggcctagtcccagctatgctctggggcctcagcctcttcctcaacctcccaggacctatctggctccagccctctccacctccccagtcttctcccccgcctcagccccatccgtgtcatacctgccggggactggttgacagctttaacaagggcctggagagaaccatccgggacaactttggaggtggaaacactgcctgggaggaagagaatttgtccaaatacaaagacagtgagacccgcctggtagaggtgctggagggtgtgtgcagcaagtcagacttcgagtgccaccgcctgctggagctgagtgaggagctggtggagagctggtggtttcacaagcagcaggaggccccggacctcttccagtggctgtgctcagattccctgaagctctgctgccccgcaggcaccttcgggccctcctgccttccctgtcctgggggaacagagaggccctgcggtggctacgggcagtgtgaaggagaagggacacgagggggcagcgggcactgtgactgccaagccggctacgggggtgaggcctgtggccagtgtggccttggctactttgaggcagaacgcaacgccagccatctggtatgttcggcttgttttggcccctgtgcccgatgctcaggacctgaggaatcaaactgtttgcaatgcaagaagggctgggccctgcatcacctcaagtgtgtagacattgatgagtgtggcacagagggagccaactgtggagctgaccaattctgcgtgaacactgagggctcctatgagtgccgagactgtgccaaggcctgcctaggctgcatgggggcagggccaggtcgctgtaagaagtgtagccctggctatcagcaggtgggctccaagtgtctcgatgtggatgagtgtgagacagaggtgtgtccgggagagaacaagcagtgtgaaaacaccgagggcggttatcgctgcatctgtgccgagggctacaagcagatggaaggcatctgtgtgaaggagcagatcccagagtcagcaggcttcttctcagagatgacagaagacgagttggtggtgctgcagcagatgttctttggcatcatcatctgtgcactggccacgctggctgctaagggcgacttggtgttcaccgccatcttcattggggctgtggcggccatgactggctactggttgtcagagcgcagtgaccgtgtgctggagggcttcatcaagggcagataatcgcggccaccacctgtaggacctcctcccacccacgctgcccccagagcttgggctgccctcctgctggacactcaggacagcttggtttatttttgagagtggggtaagcacccctacctgccttacagagcagcccaggtacccaggcccgggcagacaaggcccctggggtaaaaagtagccctgaaggtggataccatgagctcttcacctggcggggactggcaggcttcacaatgtgtgaatttcaaaagtttttccttaatggtggctgctagagctttggcccctgcttaggattaggtggtcctcacaggggtggggccatcacagctccctcctgccagctgcatgctgccagttcctgttctgtgttcaccacatccccacaccccattgccacttatttattcatct

SEQ ID NO: 124049 - DNA, 966 bp, Homo sapiens
  Payload ID: 4356
  Gene Symbol: CRELD1
  Gene Name: cysteine-rich with EGF-like domains 1
  ENST ID: ENST00000435417
  CDS Start-End: 1-301
ccctgctcacctctctgcagacattgatgagtgtggcacagagggagccaactgtggagctgaccaattctgcgtgaacactgagggctcctatgagtgccgagactgtgccaaggcctgcctaggctgcatgggggcagggccaggtcgctgtaagaagtgtagccctggctatcagcagatgtggatgagtgtgagacagaggtgtgtccgggagagaacaagcagtgtgaaaacaccgagggcggttatcgctgcatctgtgccgagggctacaagcagatggaaggcatctgtgtgaaggagcagatcccagagtcagcaggcttcttctcagagatgacagaagacgagttggtggtgctgcagcagatgttctttggcatcatcatctgtgcactggccacgctggctgctaagggcgacttggtgttcaccgccatcttcattggggctgtggcggccatgactggctactggttgtcagagcgcagtgaccgtgtgctggagggcttcatcaagggcagataatcgcggccaccacctgtaggacctcctcccacccacgctgcccccagagcttgggctgccctcctgctggacactcaggacagcttggtttatttttgagagtggggtaagcacccctacctgccttacagagcagcccaggtacccaggcccgggcagacaaggcccctggggtaaaaagtagccctgaaggtggataccatgagctcttcacctggcggggactggcaggcttcacaatgtgtgaatttcaaaagtttttccttaatggtggctgctagagctttggcccctgcttaggattaggtggtcctcacaggggtggggccatcacagctccctcctgccagctgcatgctgccagttcctgttctgtgttcaccacatccccacaccccattgccacttatttattcatctcaggaaataaagaaa

SEQ ID NO: 124050 - DNA, 723 bp, Homo sapiens
  Payload ID: 4356
  Gene Symbol: CRELD1
  Gene Name: cysteine-rich with EGF-like domains 1
  ENST ID: ENST00000414117
  CDS Start-End: 21-326
ggtccccagcctgggtaaagatggccccatggcccccgaagggcctagtcccagctatgctctggggcctcagcctcttcctcaacctcccaggacctatctggctccagccctctccacctccccagtcttctcccccgcctcagccccatccgtgtcatacctgccggggactggttgacagctttaacaagggcctggagagaaccatccgggacaactttggaggtggaaacactgcctgggaggaagagaatttgtccaaatacaaagacagcctgtcctgggggaacagagaggccctgcggtggctacgggcagtgtgaaggagaagggacacgagggggcagcgggcactgtgactgccaagccggctacgggggtgaggcctgtggccagtgtggccttggctactttgaggcagaacgcaacgccagccatctgcttgttttggcccctgtgcccgatgctcaggacctgaggaatcaaactgtttgcaatgcaagaagggctgggccctgcatcacctcaagtgtgtagacattgatgagtgtggcacagagggagccaactgtggagctgaccaattctgcgtgaacactgagggctcctatgagtgccgagactgtgccaaggcctgcctaggctgcatgggggcagggccaggtcgctgtaagaagtgtagccctggctatcagcaggtgggctccaagtgtctcggtg

SEQ ID NO: 124051 - DNA, 1357 bp, Homo sapiens
  Payload ID: 4357
  Gene Symbol: CRELD2
  Gene Name: cysteine-rich with EGF-like domains 2
  Uniprot ID: Q6UXH1
  ENST ID: ENST00000328268
  CDS Start-End: 75-1136
gcggccgggaggccggagcagcacggccgcaggacctggagctccggctgcgtcttcccgcagcgctacccgccatgcgcctgccgcgccgggccgcgctggggctcctgccgcttctgctgctgctgccgcccgcgccggaggccgccaagaagccgacgccctgccaccggtgccgggggctggtggacaagtttaaccaggggatggtggacaccgcaaagaagaactttggcggcgggaacacggcttgggaggaaaagacgctgtccaagtacgagtccagcgagattcgcctgctggagatcctggaggggctgtgcgagagcagcgacttcgaatgcaatcagatgctagaggcgcaggaggagcacctggaggcctggtggctgcagctgaagagcgaatatcctgacttattcgagtggttttgtgtgaagacactgaaagtgtgctgctctccaggaacctacggtcccgactgtctcgcatgccagggcggatcccagaggccctgcagcgggaatggccactgcagcggagatgggagcagacagggcgacgggtcctgccggtgccacatggggtaccagggcccgctgtgcactgactgcatggacggctacttcagctcgctccggaacgagacccacagcatctgcacagcctgtgacgagtcctgcaagacgtgctcgggcctgaccaacagagactgcggcgagtgtgaagtgggctgggtgctggacgagggcgcctgtgtggatgtggacgagtgtgcggccgagccgcctccctgcagcgctgcgcagttctgtaagaacgccaacggctcctacacgtgcgaagagtgtgactccagctgtgtgggctgcacaggggaaggcccaggaaactgtaaagagtgtatctctggctacgcgagggagcacggacagtgtgcagatgtggacgagtgctcactagcagaaaaaacctgtgtgaggaaaaacgaaaactgctacaatactccagggagctacgtctgtgtgtgtcctgacggcttcgaagaaacggaagatgcctgtgtgccgccggcagaggctgaagccacagaaggagaaagcccgacacagctgccctcccgcgaagacctgtaatgtgccggacttaccctttaaattattcagaaggatgtcccgtggaaaatgtggccctgaggatgccgtctcctgcagtggacagcggcggggagaggctgcctgctctctaacggttgattctcatttgtcccttaaacagctgcatttcttggttgttcttaaacagacttgtatattttgatacagttctttgtaataaaattgaccattgtaggtaa

SEQ ID NO: 124052 - DNA, 1577 bp, Homo sapiens
  Payload ID: 4357
  Gene Symbol: CRELD2
  Gene Name: cysteine-rich with EGF-like domains 2
  Uniprot ID: Q6UXH1
  ENST ID: ENST00000404488
  CDS Start-End: 136-1344
gggcctcgccggcgccgtcaagtagcctgggggacaggccggcgcggctgggagcgggtgggcggccgggaggccggagcagcacggccgcaggacctggagctccggctgcgtcttcccgcagcgctacccgccatgcgcctgccgcgccgggccgcgctggggctcctgccgcttctgctgctgctgccgcccgcgccggaggccgccaagaagccgacgccctgccaccggtgccgggggctggtggacaagtttaaccaggggatggtggacaccgcaaagaagaactttggcggcgggaacacggcttgggaggaaaagacgctgtccaagtacgagtccagcgagattcgcctgctggagatcctggaggggctgtgcgagagcagcgacttcgaatgcaatcagatgctagaggcgcaggaggagcacctggaggcctggtggctgcagctgaagagcgaatatcctgacttattcgagtggttttgtgtgaagacactgaaagtgtgctgctctccaggaacctacggtcccgactgtctcgcatgccagggcggatcccagaggccctgcagcgggaatggccactgcagcggagatgggagcagacagggcgacgggtcctgccggtgccacatggggtaccagggcccgctgtgcactgactgcatggacggctacttcagctcgctccggaacgagacccacagcatctgcacagtcaggaccggcctctccgattcttacccgccttgctgtctgtctcttggatgttggcgtggcgtgggccacgcatggatccgtggccggaacacgcacacccagccaggctacagctccagagtatggatagctgccttctctccagcctgtgacgagtcctgcaagacgtgctcgggcctgaccaacagagactgcggcgagtgtgaagtgggctgggtgctggacgagggcgcctgtgtggatgtggacgagtgtgcggccgagccgcctccctgcagcgctgcgcagttctgtaagaacgccaacggctcctacacgtgcgaagagtgtgactccagctgtgtgggctgcacaggggaaggcccaggaaactgtaaagagtgtatctctggctacgcgagggagcacggacagtgtgcagatgtggacgagtgctcactagcagaaaaaacctgtgtgaggaaaaacgaaaactgctacaatactccagggagctacgtctgtgtgtgtcctgacggcttcgaagaaacggaagatgcctgtgtgccgccggcagaggctgaagccacagaaggagaaagcccgacacagctgccctcccgcgaagacctgtaatgtgccggacttaccctttaaattattcagaaggatgtcccgtggaaaatgtggccctgaggatgccgtctcctgcagtggacagcggcggggagaggctgcctgctctctaacggttgattctcatttgtcccttaaacagctgcatttcttggttgttcttaaacagacttgtatattttgatacagttctttgtaataaaattgaccattgtaggtaatcaggaggagaa

SEQ ID NO: 124053 - DNA, 1242 bp, Homo sapiens
  Payload ID: 4357
  Gene Symbol: CRELD2
  Gene Name: cysteine-rich with EGF-like domains 2
  Uniprot ID: Q6UXH1
  ENST ID: ENST00000403427
  CDS Start-End: 38-1015
ggagctccggctgcgtcttcccgcagcgctacccgccatgcgcctgccgcgccgggccgcgctggggctcctgccgcttctgctgctgctgccgcccgcgccggaggccgccaagaagccgacgccctgccaccggtgccgggggctggtggacaagtttaaccaggggatggtggacaccgcaaagaagaactttggcggcgggaacacggcttgggaggaaaagacgctgtccaagtacgagtccagcgagattcgcctgctggagatcctggaggggctgtgcgagagcagcgacttcgaatgcaatcagatgctagaggcgcaggaggagcacctggaggcctggtggctgcagctgaagagcgaatatcctgacttattcgagtggttttgtgtgaagacactgaaagtgtgctgctctccaggaacctacggtcccgactgtctcgcatgccagggcggatcccagaggccctgcagcgggaatggccactgcagcggagatgggagcagacagggcgacgggtcctgccggtgccacatggggtaccagggcccgctgtgcactgactgcatggacggctacttcagctcgctccggaacgagacccacagcatctgcacagcctgtgacgagtcctgcaagacgtgctcgggcctgaccaacagagactgcggcgagtgtgaagtgggctgggtgctggacgagggcgcctgtgtggagtgtgactccagctgtgtgggctgcacaggggaaggcccaggaaactgtaaagagtgtatctctggctacgcgagggagcacggacagtgtgcagatgtggacgagtgctcactagcagaaaaaacctgtgtgaggaaaaacgaaaactgctacaatactccagggagctacgtctgtgtgtgtcctgacggcttcgaagaaacggaagatgcctgtgtgccgccggcagaggctgaagccacagaaggagaaagcccgacacagctgccctcccgcgaagacctgtaatgtgccggacttaccctttaaattattcagaaggatgtcccgtggaaaatgtggccctgaggatgccgtctcctgcagtggacagcggcggggagaggctgcctgctctctaacggttgattctcatttgtcccttaaacagctgcatttcttggttgttcttaaacagacttgtatattttgatacagttctttgtaataaaattgaccattgtaggtaatcagga

SEQ ID NO: 124054 - DNA, 1230 bp, Homo sapiens
  Payload ID: 4357
  Gene Symbol: CRELD2
  Gene Name: cysteine-rich with EGF-like domains 2
  Uniprot ID: Q6UXH1
  ENST ID: ENST00000407217
  CDS Start-End: 38-1003
ggagctccggctgcgtcttcccgcagcgctacccgccatgcgcctgccgcgccgggccgcgctggggctcctgccgcttctgctgctgctgccgcccgcgccggaggccgccaagaagccgacgccctgccaccggtgccgggggctggtggacaagtttaaccaggggatggtggacaccgcaaagaagaactttggcggcgggaacacggcttgggaggaaaagacgctgtccaagtacgagtccagcgagattcgcctgctggagatcctggaggggctgtgcgagagcagcgacttcgaatgcaatcagatgctagaggcgcaggaggagcacctggaggcctggtggctgcagctgaagagcgaatatcctgacttattcgagtggttttgtgtgaagacactgaaagtgtgctgctctccaggaacctacggtcccgactgtctcgcatgccagggcggatcccagaggccctgcagcgggaatggccactgcagcggagatgggagcagacagggcgacgggtcctgccggtgccacatggggtaccagggcccgctgtgcactgactgcatggacggctacttcagctcgctccggaacgagacccacagcatctgcacagcctgtgacgagtcctgcaagacgtgctcgggcctgaccaacagagactgcggcgagtgtgaagtgggctgggtgctggacgagggcgcctgtgtggatgtggacgagtgtgcggccgagccgcctccctgcagcgctgcgcagttctgtaagaacgccaacggctcctacacgtgcgaagatgtggacgagtgctcactagcagaaaaaacctgtgtgaggaaaaacgaaaactgctacaatactccagggagctacgtctgtgtgtgtcctgacggcttcgaagaaacggaagatgcctgtgtgccgccggcagaggctgaagccacagaaggagaaagcccgacacagctgccctcccgcgaagacctgtaatgtgccggacttaccctttaaattattcagaaggatgtcccgtggaaaatgtggccctgaggatgccgtctcctgcagtggacagcggcggggagaggctgcctgctctctaacggttgattctcatttgtcccttaaacagctgcatttcttggttgttcttaaacagacttgtatattttgatacagttctttgtaataaaattgaccattgtaggtaatcagga

SEQ ID NO: 124055 - DNA, 963 bp, Homo sapiens
  Payload ID: 4357
  Gene Symbol: CRELD2
  Gene Name: cysteine-rich with EGF-like domains 2
  ENST ID: ENST00000450207
  CDS Start-End: 276-963
gcgccagcgccagctcgggtcgcgccctcgcccgcctcctccctggtctcgccgcgcgcccgcctgaaggccccggtcgcggcagcgcgcactgacctccgcagctcccggcggcgtccttcgaagcgcggctgcctgggccagcctcggcaggaagcaggacggcggaaacagaacagagcccgaatctaaagtccttgcccaaatctaaagtggctaccgcagccccggccgctacggccgcagagaccctctgtgccctgacgctacccgccatgcgcctgccgcgccgggccgcgctggggctcctgccgcttctgctgctgctgccgcccgcgccggaggccgccaagaagccgacgccctgccaccggtgccgggggctggtggacaagtttaaccaggggatggtggacaccgcaaagaagaactttggcggcgggaacacggcttgggaggaaaagacgctgtccaagtacgagtccagcgagattcgcctgctggagatcctggaggggctgtgcgagagcagcgacttcgaatgcaatcagatgctagaggcgcaggaggagcacctggaggcctggtggctgcagctgaagagcgaatatcctgacttattcgagtggttttgtgtgaagacactgaaagtgtgctgctctccaggaacctacggtcccgactgtctcgcatgccagggcggatcccagaggccctgcagcgggaatggccactgcagcggagatgggagcagacagggcgacgggtcctgccggtgccacatggggtaccagggcccgctgtgcactgactgcatggacggctacttcagctcgctccggaacgagacccacagcatctgcacagcctgtgacgagtcctgcaagacgtgctcgggcctgaccaacagagactgcggcgagtgtgaagtgggctgggtgctggacgagggcgcctgtgtgg

SEQ ID NO: 124056 - DNA, 2290 bp, Homo sapiens
  Payload ID: 4358
  Gene Symbol: CYR61
  Gene Name: cysteine-rich, angiogenic inducer, 61
  Uniprot ID: O00622
  ENST ID: ENST00000451137
  CDS Start-End: 225-1370
agaccgcgagcgagagcgcccccgagcagcgcccgcgccctccgcgccttctccgccgggacctcgagcgaaagacgcccgcccgccgcccagccctcgcctccctgcccaccgggcccaccgcgccgccaccccgaccccgctgcgcacggcctgtccgctgcacaccagcttgttggcgtcttcgtcgccgcgctcgccccgggctactcctgcgcgccacaatgagctcccgcatcgccagggcgctcgccttagtcgtcacccttctccacttgaccaggctggcgctctccacctgccccgctgcctgccactgccccctggaggcgcccaagtgcgcgccgggagtcgggctggtccgggacggctgcggctgctgtaaggtctgcgccaagcagctcaacgaggactgcagcaaaacgcagccctgcgaccacaccaaggggctggaatgcaacttcggcgccagctccaccgctctgaaggggatctgcagagctcagtcagagggcagaccctgtgaatataactccagaatctaccaaaacggggaaagtttccagcccaactgtaaacatcagtgcacatgtattgatggcgccgtgggctgcattcctctgtgtccccaagaactatctctccccaacttgggctgtcccaaccctcggctggtcaaagttaccgggcagtgctgcgaggagtgggtctgtgacgaggatagtatcaaggaccccatggaggaccaggacggcctccttggcaaggagctgggattcgatgcctccgaggtggagttgacgagaaacaatgaattgattgcagttggaaaaggcagctcactgaagcggctccctgtttttggaatggagcctcgcatcctatacaaccctttacaaggccagaaatgtattgttcaaacaacttcatggtcccagtgctcaaagacctgtggaactggtatctccacacgagttaccaatgacaaccctgagtgccgccttgtgaaagaaacccggatttgtgaggtgcggccttgtggacagccagtgtacagcagcctgaaaaagggcaagaaatgcagcaagaccaagaaatcccccgaaccagtcaggtttacttacgctggatgtttgagtgtgaagaaataccggcccaagtactgcggttcctgcgtggacggccgatgctgcacgccccagctgaccaggactgtgaagatgcggttccgctgcgaagatggggagacattttccaagaacgtcatgatgatccagtcctgcaaatgcaactacaactgcccgcatgccaatgaagcagcgtttcccttctacaggctgttcaatgacattcacaaatttagggactaaatgctacctgggtttccagggcacacctagacaaacaagggagaagagtgtcagaatcagaatcatggagaaaatgggcgggggtggtgtgggtgatgggactcattgtagaaaggaagccttgctcattcttgaggagcattaaggtatttcgaaactgccaagggtgctggtgcggatggacactaatgcagccacgattggagaatactttgcttcatagtattggagcacatgttactgcttcattttggagcttgtggagttgatgactttctgttttctgtttgtaaattatttgctaagcatattttctctaggcttttttccttttggggttctacagtcgtaaaagagataataagattagttggacagtttaaagcttttattcgtcctttgacaaaagtaaatgggagggcattccatcccttcctgaagggggacactccatgagtgtctgtgagaggcagctatctgcactctaaactgcaaacagaaatcaggtgttttaagactgaatgttttatttatcaaaatgtagcttttggggagggaggggaaatgtaatactggaataatttgtaaatgattttaattttatattcagtgaaaagattttatttatggaattaaccatttaataaagaaatatttacctaatatctgagtgtatgccattcggtatttttagaggtgctccaaagtcattaggaacaacctagctcacgtactcaattattcaaacaggacttattgggatacagcagtgaattaagctattaaaataagataatgattgcttttataccttcagtagagaaaagtctttgcatataaagtaatgtttaaaaaacatgtattgaacacgacattgtatgaagcacaataaagattctgaagctaaatttgtgatttaa

SEQ ID NO: 124057 - DNA, 1364 bp, Homo sapiens
  Payload ID: 4358
  Gene Symbol: CYR61
  Gene Name: cysteine-rich, angiogenic inducer, 61
  ENST ID: ENST00000617517
  CDS Start-End: 225-1364
agaccgcgagcgagagcgcccccgagcagcgcccgcgccctccgcgccttctccgccgggacctcgagcgaaagacgcccgcccgccgcccagccctcgcctccctgcccaccgggcccaccgcgccgccaccccgaccccgctgcgcacggcctgtccgctgcacaccagcttgttggcgtcttcgtcgccgcgctcgccccgggctactcctgcgcgccacaatgagctcccgcatcgccagggcgctcgccttagtcgtcacccttctccacttgaccaggctggcgctctccacctgccccgctgcctgccactgccccctggaggcgcccaagtgcgcgccgggagtcgggctggtccgggacggctgcggctgctgtaaggtctgcgccaagcagctcaacgaggactgcagcaaaacgcagccctgcgaccacaccaaggggctggaatgcaacttcggcgccagctccaccgctctgaaggggatctgcagagctcagtcagagggcagaccctgtgaatataactccagaatctaccaaaacggggaaagtttccagcccaactgtaaacatcagtgcacatgtattgatggcgccgtgggctgcattcctctgtgtccccaagaactatctctccccaacttgggctgtcccaaccctcggctggtcaaagttaccgggcagtgctgcgaggagtgggtctgtgacgaggatagtatcaaggaccccatggaggaccaggacggcctccttggcaaggagctgggattcgatgcctccgaggtggagttgacgagaaacaatgaattgattgcagttggaaaaggcagctcactgaagcggctccctgtttttggaatggagcctcgcatcctatacaaccctttacaaggccagaaatgtattgttcaaacaacttcatggtcccagtgctcaaagacctgtggaactggtatctccacacgagttaccaatgacaaccctgagtgccgccttgtgaaagaaacccggatttgtgaggtgcggccttgtggacagccagtgtacagcagcctgaaaaagggcaagaaatgcagcaagaccaagaaatcccccgaaccagtcaggtttacttacgctggatgtttgagtgtgaagaaataccggcccaagtactgcggttcctgcgtggacggccgatgctgcacgccccagctgaccaggtgtgaagatgcggttccgctgcgaagatggggagacattttccaagaacgtcatgatgatccagtcaaatgcaactacaactgcccgcatgccaatgaagcagcgtttcccttctacaggctgttcaatgacattcacaaatttagggactaa

SEQ ID NO: 124058 - DNA, 1875 bp, Homo sapiens
  Payload ID: 4359
  Gene Symbol: CDPF1
  Gene Name: cysteine-rich, DPF motif domain containing 1
  Uniprot ID: Q6NVV7
  ENST ID: ENST00000314567
  CDS Start-End: 425-796
gcagcctagtccgcggcgcgggagggcaggtgggagactggaggcgccctcgcgcccctcagctatccgggagcctcgcgccggcgacctcgaccctgtcgaacccggcggaacactcagaaagaagctgagcgcctcgcagcggccaggacagcgggccaggcccgcgcgctcccgcagcgcacggccagacgcgacgcccctcagcacggaacccagcctcgcggactaccccgaagctcagagccacatcccgcgcagaggaccgcggcgaccggaaaagcaaggcagaggcggaaaaccaccgcgaggtcccgcctcccgctccgcgcctgcgtctgcggctgcaccggggttggccgggccgcggtggggcggggccgctcaggcgccttggacgcggagccgtgggacgagggcggcgatggcgtcccatgtagagtgccgtcctctgggagtgtttgagtgtgaactctgtaccttgacagctccgtacagctatgtgggacagaagccccccaacacccagtcgatggtcctcctggaggaaagctatgtcatgaaggatcccttcacctccgacaaggacagattcctggtcctcggctcgtgctgcagtttgtgcagcaggctggtgtgtgtgggcccggaatgcagtttattctactccaagagattctgcctcccttgtgtccgggagaacatcaatgcttttcctcaggaaattcggcaagacttggagaaaaggaaagctccatcaaagaggacccccagccagcccggttctcggacgtgagtgcaactggggctaggtcatcgggcggcaccctgcacagagctcctgggccagcctgcgccagggatgctgctgagctgggagccgccatgcctggccttgtttctggaccactgggagcagcactgcagcccaggggagctggagtccagcttggagcagccacaggcccagggagctgtagcaagagggtagtccaaaggcagatgccagacaagacacagccaggaacccggccaggtccccccacatgcccctcagggcccaggcctgagtgagtgctgctcagatgtgactgagagggatgacctccttcagcagggcagctcctaagaggctgcgtgcaggtgcgtgtggggggagatgccacactgtgtcggggccatggtgcactgtaggtggctgcaatggtctctctgtaaggaaaatcactgacagcagctccttctggacccagtctggaaggtctagagggggatagaatttttatttcatatccttatgtggtgcttggaaaatgtttttaaccttgaccatgtattatgtttataattaaaaacccaaagaaccagctcatgtttggaaaaggaatcttccactgaaacatttggatacccgacgttctccctggacacttggcccggcaatagttggggtctcctgggaagctgagtgctggcttctagcctctccagttccctcagactctgtcttcagctcgggcccctccgttctgtctccctcgactccaagtcaggaataccgtgggcttcctgccctcaccccacacctcaagaccatcccactgcttgcctgcttgccccctgccatctcgcactcagccctgggtgcctgtgaagcctggccccactgcctgccgggggttcctgcagcacccccctactccaggctccccatctccctgaagcttccagggtagcagctggtgggacactgatctgtgagctctggaatgtctgcttagaattctgagaggcaggaactgctctgtctttgtaactactcaaggccaactgtcacatgaaggaatgaataaagagtttttactgacttgtgca

SEQ ID NO: 124059 - DNA, 1600 bp, Homo sapiens
  Payload ID: 4359
  Gene Symbol: CDPF1
  Gene Name: cysteine-rich, DPF motif domain containing 1
  ENST ID: ENST00000381037
  CDS Start-End: 35-304
gccttggacgcggagccgtgggacgagggcggcgatggcgtcccatgtagagtgccgtcctctgggagtgtttgagtgtgaactctgtaccttgacagctccgtacagctatgtgggacagaagccccccaacacccagtcgatggtcctcctggaggaaagctatgtcatgaaggatcccttcacctccgacaaggacagattcctggtcctcggctcgtgctgcagtttgtgcagcaggctggtgtgtgtgggcccgatgttcttggagggatctccaggagaagggactgtcctttcatgagcacttgttgtgtgccaggtcctgtgcttgggacctgttttactgctgaggcttcattcagtcctgccccttagtcaggaatgcagtttattctactccaagagattctgcctcccttgtgtccgggagaacatcaatgcttttcctcaggaaattcggcaagacttggagaaaaggaaagctccatcaaagaggacccccagccagcccggttctcggacgtgagtgcaactggggctaggtcatcgggcggcaccctgcacagagctcctgggccagcctgcgccagggatgctgctgagctgggagccgccatgcctggccttgtttctggaccactgggagcagcactgcagcccaggggagctggagtccagcttggagcagccacaggcccagggagctgtagcaagagggtagtccaaaggcagatgccagacaagacacagccaggaacccggccaggtccccccacatgcccctcagggcccaggcctgagtgagtgctgctcagatgtgactgagagggatgacctccttcagcagggcagctcctaagaggctgcgtgcaggtgcgtgtggggggagatgccacactgtgtcggggccatggtgcactgtaggtggctgcaatggtctctctgtaaggaaaatcactgacagcagctccttctggacccagtctggaaggtctagagggggatagaatttttatttcatatccttatgtggtgcttggaaaatgtttttaaccttgaccatgtattatgtttataattaaaaacccaaagaaccagctcatgtttggaaaaggaatcttccactgaaacatttggatacccgacgttctccctggacacttggcccggcaatagttggggtctcctgggaagctgagtgctggcttctagcctctccagttccctcagactctgtcttcagctcgggcccctccgttctgtctccctcgactccaagtcaggaataccgtgggcttcctgccctcaccccacacctcaagaccatcccactgcttgcctgcttgccccctgccatctcgcactcagccctgggtgcctgtgaagcctggccccactgcctgccgggggttcctgcagcacccccctactccaggctccccatctccctgaagcttccagggtagcagctggtgggacactgatctgtgagctctggaatgtctgcttagaattctgagaggcaggaactgctctgtctttgtaactactcaaggccaactgtcacatgaaggaatgaataaagagtttttactga

SEQ ID NO: 124060 - DNA, 1439 bp, Homo sapiens
  Payload ID: 4359
  Gene Symbol: CDPF1
  Gene Name: cysteine-rich, DPF motif domain containing 1
  ENST ID: ENST00000404583
  CDS Start-End: 2-358
gatggcgtcccatgtagagtgccgtcctctgggagtgtttgagtgtgaactctgtaccttgacagctccgtacagctatgtgggacagaagccccccaacacccagtcgatggtcctcctggaggaaagctatgtcatgaaggatcccttcacctccgacaaggacagattcctggtcctcggctcgtgctgcagtttgtgcagcaggctggaatgcagtttattctactccaagagattctgcctcccttgtgtccgggagaacatcaatgcttttcctcaggaaattcggcaagacttggagaaaaggaaagctccatcaaagaggacccccagccagcccggttctcggacgtgagtgcaactggggctaggtcatcgggcggcaccctgcacagagctcctgggccagcctgcgccagggatgctgctgagctgggagccgccatgcctggccttgtttctggaccactgggagcagcactgcagcccaggggagctggagtccagcttggagcagccacaggcccagggagctgtagcaagagggtagtccaaaggcagatgccagacaagacacagccaggaacccggccaggtccccccacatgcccctcagggcccaggcctgagtgagtgctgctcagatgtgactgagagggatgacctccttcagcagggcagctcctaagaggctgcgtgcaggtgcgtgtggggggagatgccacactgtgtcggggccatggtgcactgtaggtggctgcaatggtctctctgtaaggaaaatcactgacagcagctccttctggacccagtctggaaggtctagagggggatagaatttttatttcatatccttatgtggtgcttggaaaatgtttttaaccttgaccatgtattatgtttataattaaaaacccaaagaaccagctcatgtttggaaaaggaatcttccactgaaacatttggatacccgacgttctccctggacacttggcccggcaatagttggggtctcctgggaagctgagtgctggcttctagcctctccagttccctcagactctgtcttcagctcgggcccctccgttctgtctccctcgactccaagtcaggaataccgtgggcttcctgccctcaccccacacctcaagaccatcccactgcttgcctgcttgccccctgccatctcgcactcagccctgggtgcctgtgaagcctggccccactgcctgccgggggttcctgcagcacccccctactccaggctccccatctccctgaagcttccagggtagcagctggtgggacactgatctgtgagctctggaatgtctgcttagaattctgagaggcaggaactgctctgtctttgtaactactcaaggccaactgtcacatgaaggaatgaataaagagtttttactgacttgtgcact

SEQ ID NO: 124061 - DNA, 1541 bp, Homo sapiens
  Payload ID: 4359
  Gene Symbol: CDPF1
  Gene Name: cysteine-rich, DPF motif domain containing 1
  ENST ID: ENST00000404744
  CDS Start-End: 2-349
gatggcgtcccatgtagagtgccgtcctctgggagtgtttgagtgtgaactctgtaccttgacagctccgtacagctatgtgggacagaagccccccaacacccagtcgatggtcctcctggaggaaagctatgtcatgaaggatcccttcacctccgacaaggacagattcctggtcctcggctcgtgctgcagtttgtgcagcaggctggtgtgtgtgggcccggtggatgttcttggagggatctccaggagaagggactgtcctttcatgagcacttgttgtgtgccaggtcctgtgcttgggacctgttttactgctgaggcttcattcagtcctgccccttagtcaggaatgcagtttattctactccaagagattctgcctcccttgtgtccgggagaacatcaatgcttttcctcaggaaattcggcaagacttggagaaaaggaaagctccatcaaagaggacccccagccagcccggttctcggacgtgagtgcaactggggctaggtcatcgggcggcaccctgcacagagctcctgggccagcctgcgccagggatgctgctgagctgggagccgccatgcctggccttgtttctggaccactgggagcagcactgcagcccaggggagctggagtccagcttggagcagccacaggcccagggagctgtagcaagagggtagtccaaaggcagatgccagacaagacacagccaggaacccggccaggtccccccacatgcccctcagggcccaggcctgagtgagtgctgctcagatgtgactgagagggatgacctccttcagcagggcagctcctaagaggctgcgtgcaggtgcgtgtggggggagatgccacactgtgtcggggccatggtgcactgtaggtggctgcaatggtctctctgtaaggaaaatcactgacagcagctccttctggacccagtctggaaggtctagagggggatagaatttttatttcatatccttatgtggtgcttggaaaatgtttttaaccttgaccatgtattatgtttataattaaaaacccaaagaaccagctcatgtttggaaaaggaatcttccactgaaacatttggatacccgacgttctccctggacacttggcccggcaatagttggggtctcctgggaagctgagtgctggcttctagcctctccagttccctcagactctgtcttcagctcgggcccctccgttctgtctccctcgactccaagtcaggaataccgtgggcttcctgccctcaccccacacctcaagaccatcccactgcttgcctgcttgccccctgccatctcgcactcagccctgggtgcctgtgaagcctggccccactgcctgccgggggttcctgcagcacccccctactccaggctccccatctccctgaagcttccagggtagcagctggtgggacactgatctgtgagctctggaatgtctgcttagaattctgagaggcaggaactgctctgtctttgtaactactcaaggccaactgtcac

SEQ ID NO: 124062 - DNA, 3148 bp, Homo sapiens
  Payload ID: 4360
  Gene Symbol: CSRNP1
  Gene Name: cysteine-serine-rich nuclear protein 1
  Uniprot ID: Q96S65
  ENST ID: ENST00000273153
  CDS Start-End: 179-1948
cgccgctgccggacgcgcagagcgaggggcggctggaccgacggctgccgggccgagcgcacagagtcgcggcgcagggggcgtccccggccgggacgcgggtcgcgtcgttgtcctccgcgagcgtccggattgcaggctgtctgtccccagaccccagagcacgtccggcaccaccatgactgggctgttgaagaggaaatttgaccagctggatgaggacaactcctcggtctcctcctcctcctcttcctctgggtgccagtctcgctcctgctccccaagctcttctgtctcccgtgcctgggactcagaggaggaaggcccctgggatcagatgcccctgcctgaccgtgacttctgcggccccagaagtttcacccccctgtctatcctgaagcgggctcgccgggagcgcccaggccgtgtagcctttgatgggatcaccgtcttctacttcccccgctgccagggcttcaccagtgtgcccagccgtggtggctgtactctgggtatggcccttcgccacagtgcttgccgtcgcttctctttggctgagtttgcgcaggagcaagcccgtgcacggcacgagaagctccgccagcgcttgaaagaggagaagttggagatgctgcagtggaagctttcggcagctggggtaccccaggcagaggcagggctgccacctgtggtggatgccattgatgacgcctctgtggaggaggacttggcagtcgctgtggcaggtggccggttggaagaagtgagcttcctacagccctacccagcccggcgacgtcgagctctgctgagggcttcaggtgtgcgaaggatcgatcgggaggagaagcgggagctgcaggcactgcgccaatcccgggaggattgtggctgtcactgcgataggatctgcgaccctgagacctgcagctgcagcctggcaggcatcaagtgccagatggaccacacagcattcccctgtggctgctgcagggagggctgtgagaaccccatgggccgtgtggaatttaatcaggcaagagttcagacccatttcatccacacactcacccgcctgcagttggaacaggaggctgagagctttagggagctggaggcccctgcccagggcagcccacccagccctggtgaggaggccctggtccctactttcccactggccaagccccccatgaacaatgagctgggagacaacagctgcagcagcgacatgactgattcttctacagcatcttcatcagcatcgggcactagtgaggctcctgactgccccacccacccaggcctgcctggccctggcttccagcctggcgttgatgatgacagcctggcacgcatcttgagtttcagtgactctgacttcggtggggaggaggaggaagaggaggaagggagcgtggggaacctggacaacctcagctgcttccatccagctgacatctttggtactagtgaccctggtggcctggccagctggacccacagctattctggctgtagcttcacatcaggcgtcctggatgagaatgccaacctggatgccagctgcttcctaaatggtggccttgaagggtcaagggaaggcagccttcctggcacctcagtgccacccagcatggacgctggccggagtagctcagtggatctcagcttgtcttcttgtgactcctttgagttactccaggctctgccagattatagtctggggcctcactacacatcacagaaggtgtctgacagcctggacaacatcgaggcacctcacttccccctgcctggcctgtctccacctggggatgccagcagttgcttcctggagtccctcatgggcttctccgagccagccgccgaagccctagatccctttattgacagccagtttgaggacactgtcccagcatctctaatggagcctgtgccggtgtgaggaccaggatgtcttttcccagccccaagagacctgttgctgctttcttgtaattatggggctccccagagtctgcgtaacagtctcccactggctggctcacccacaggtgccatgtgcacactcctggttttcaaacaattctctggatttatttatttgttttaacttttctgtgctgaagagaggactggggggagggggcttcccctttcagctgcccggccccccacacccacagcttgctcttctatctccacaacgtgagcctggaagaggagaaaatgtggctcctctggagcttggcagaccacttttcggtctttgcgtgatgttccttagcccaaagacggtgagacagggctgaaatcaggtggcttctgccaccctgagccctagacccatgggtggctaaatccactggactgtgaagactataatttatttccataatttatttggagattgaggaggctttggttgcacttctttggctggtgggtaatgccaggggtggggtgggcacaggccctcaagagccccttttgccttgtagtcctacaccttgccctgcctgggctttggtgcagactaggtgtggatttgagctctgtgatctatgtctgctgcctggctcctagatggctctgtgggcaggtgctggccaaggacatcatctaggcagggggagagcctgggctgaacagctgtgaccaaaactcccttctgccccaccctgccccctccacttcctgccctctgttccatcttcccccttcccaaaggccacagcctttattccaggcccagggatgtaggagggggaaggaggaaacaggaagcccagagagggcaaagggcctacctcggggcgcgaaccatgccccagactattatctcagggctttctgggcactgcacttcagcgtggcccacctgcccatgccctgaggccagttggcgaggggtggctcctgagggtttttataccctttgtttgctaatgtttaattttgcatcataatttctacattgtccctgagtgtcagaactataatttattccatttctctctgtgtctgtgccaagaaacgcaggctctgggcctgccccttgcccaggaggccttgccagcctgtgtgcttgtgggaacaccttgtacctgagcttacaggtaccaataaagaggctttattttta

SEQ ID NO: 124063 - DNA, 2593 bp, Homo sapiens
  Payload ID: 4360
  Gene Symbol: CSRNP1
  Gene Name: cysteine-serine-rich nuclear protein 1
  Uniprot ID: Q96S65
  ENST ID: ENST00000514182
  CDS Start-End: 107-1876
gggcaggagagcattccagtcgagaagaccggctgcagtaaaagcgtgagggtggaaacgctcgaggctgtctgtccccagaccccagagcacgtccggcaccaccatgactgggctgttgaagaggaaatttgaccagctggatgaggacaactcctcggtctcctcctcctcctcttcctctgggtgccagtctcgctcctgctccccaagctcttctgtctcccgtgcctgggactcagaggaggaaggcccctgggatcagatgcccctgcctgaccgtgacttctgcggccccagaagtttcacccccctgtctatcctgaagcgggctcgccgggagcgcccaggccgtgtagcctttgatgggatcaccgtcttctacttcccccgctgccagggcttcaccagtgtgcccagccgtggtggctgtactctgggtatggcccttcgccacagtgcttgccgtcgcttctctttggctgagtttgcgcaggagcaagcccgtgcacggcacgagaagctccgccagcgcttgaaagaggagaagttggagatgctgcagtggaagctttcggcagctggggtaccccaggcagaggcagggctgccacctgtggtggatgccattgatgacgcctctgtggaggaggacttggcagtcgctgtggcaggtggccggttggaagaagtgagcttcctacagccctacccagcccggcgacgtcgagctctgctgagggcttcaggtgtgcgaaggatcgatcgggaggagaagcgggagctgcaggcactgcgccaatcccgggaggattgtggctgtcactgcgataggatctgcgaccctgagacctgcagctgcagcctggcaggcatcaagtgccagatggaccacacagcattcccctgtggctgctgcagggagggctgtgagaaccccatgggccgtgtggaatttaatcaggcaagagttcagacccatttcatccacacactcacccgcctgcagttggaacaggaggctgagagctttagggagctggaggcccctgcccagggcagcccacccagccctggtgaggaggccctggtccctactttcccactggccaagccccccatgaacaatgagctgggagacaacagctgcagcagcgacatgactgattcttctacagcatcttcatcagcatcgggcactagtgaggctcctgactgccccacccacccaggcctgcctggccctggcttccagcctggcgttgatgatgacagcctggcacgcatcttgagtttcagtgactctgacttcggtggggaggaggaggaagaggaggaagggagcgtggggaacctggacaacctcagctgcttccatccagctgacatctttggtactagtgaccctggtggcctggccagctggacccacagctattctggctgtagcttcacatcaggcgtcctggatgagaatgccaacctggatgccagctgcttcctaaatggtggccttgaagggtcaagggaaggcagccttcctggcacctcagtgccacccagcatggacgctggccggagtagctcagtggatctcagcttgtcttcttgtgactcctttgagttactccaggctctgccagattatagtctggggcctcactacacatcacagaaggtgtctgacagcctggacaacatcgaggcacctcacttccccctgcctggcctgtctccacctggggatgccagcagttgcttcctggagtccctcatgggcttctccgagccagccgccgaagccctagatccctttattgacagccagtttgaggacactgtcccagcatctctaatggagcctgtgccggtgtgaggaccaggatgtcttttcccagccccaagagacctgttgctgctttcttgtaattatggggctccccagagtctgcgtaacagtctcccactggctggctcacccacaggtgccatgtgcacactcctggttttcaaacaattctctggatttatttatttgttttaacttttctgtgctgaagagaggactggggggagggggcttcccctttcagctgcccggccccccacacccacagcttgctcttctatctccacaacgtgagcctggaagaggagaaaatgtggctcctctggagcttggcagaccacttttcggtctttgcgtgatgttccttagcccaaagacggtgagacagggctgaaatcaggtggcttctgccaccctgagccctagacccatgggtggctaaatccactggactgtgaagactataatttatttccataatttatttggagattgaggaggctttggttgcacttctttggctggtgggtaatgccaggggtggggtgggcacaggccctcaagagccccttttgccttgtagtcctacaccttgccctgcctgggctttggtgcagactaggtgtggatttgagctctgtgatctatgtctgctgcctggctcctagatggctctgtgggcaggtgctggccaaggacatcatctaggcagggggagagcctgggctgaacagctgtgaccaa

SEQ ID NO: 124064 - DNA, 4471 bp, Homo sapiens
  Payload ID: 4361
  Gene Symbol: CSRNP2
  Gene Name: cysteine-serine-rich nuclear protein 2
  Uniprot ID: Q9H175
  ENST ID: ENST00000228515
  CDS Start-End: 299-1930
cgcccgagttgccggagacgcccggccctctctgcctgccggctgggctgcccaccgccctccctccccgccctgccgccctgggagctccccggccgtcgccgcggggcccgggactcgctcgctcctccctccttcccaccgggctagggcggcggcggcagcgggggcggcagagaccatcacgggaggaggcagctgcggcggggccgaatcctaatgtacctggctagctggtggtgagtaggggctttggggccaacttggtgggctccccaaggaaacccctttgaaaccaatggatgcattcacgggctcgggtctcaagaggaagtttgatgatgtggatgtgggctcatcagtttccaactcagatgatgagatctccagcagtgatagtgctgacagctgcgacagcctcaatcctcctaccactgccagcttcacacccacatccatcctgaagcggcagaagcagctgcggaggaagaatgtacgctttgaccaggtgactgtatactactttgcccggcgccaaggttttaccagtgtgcccagccagggtggtagctctctgggcatggcccagcgccataactctgtacggagctatacactctgtgagtttgcccaggaacaggaggtgaaccatcgagagattctgcgtgagcacctgaaggaagagaaactccatgccaagaaaatgaagctgaccaagaatgggacagtggagtcggtggaggctgatggcctgacgctggatgatgtgtcagatgaagatattgatgtggaaaatgtggaggtggatgattacttcttcctgcagcctctgcccaccaaacggcgacgggccctgctgagggcttctggggtccaccgtattgatgctgaagagaagcaagaacttcgagccatccgcctgtcacgggaagaatgtggttgtgactgccgactgtattgtgacccagaagcgtgtgcctgcagccaggctgggattaaatgccaggtggatcgcatgtcctttccatgtggctgctcccgggatggctgtgggaacatggcaggacgcattgaatttaatccaatccgggtccggactcattacctccacaccattatgaagctggagctggagagcaagcggcaggtgagccgcccagcagccccagatgaggagccctccccgactgccagttgcagcctgacaggagcacagggctctgagacccaggacttccaggagttcattgctgagaatgagacagcagtgatgcacctgcagagtgcagaggaactggagcggctcaaggcagaagaagattccagcggctctagtgccagcctggactcgagcatcgagagcctgggtgtgtgcatcctagaggagcctctggctgtccccgaagagctgtgcccaggccttacagcccccattctcatccaggctcagctgcccccaggctcctctgtcctgtgttttaccgagaactcagaccacccaactgcctcaacggtgaacagcccatcctacttgaacagtgggcccctggtctattatcaagtggagcagaggccagtcttgggagtgaaaggagagcctggtacggaagaaggctcagcctctttcccaaaggagaaggatctgaatgtcttctctctccctgttacctcactcgtggcttgtagctccacagacccagctgccctctgtaaatcagaggtggggaaaacacccaccctagaagctctattgcccgaagattgtaaccctgaggagcctgaaaatgaagacttccacccttcctggtccccctcaagcctccccttccgcacggacaatgaagagggctgtgggatggtgaagacctcccagcagaatgaggatcggccccctgaagattcttccttagaactccctctggcagtgtgacaggcgctagaggtcctgcctcttacccattctctatttattcccttattttatctaacaccatttcaaaacaaaactgtagaagcagctgctgctcccatgttattttattggggtctttggggaatgggtgggaaaggattgtttgagtattttttaaaagggaaacagtaccaaggagaccagccctaccttgatctggggatagtcttggggcaaagaaagctgcgtagtgctgaacattaagctttctgggccactggaacaaagaactaggatctcacaggaaaagctgggtaactcaagcagctattctttctgtagggaccagaacacgagaatttgaagagcatggcaaagccctttctctcccaagccccaggcagagtacaagctcatttttctcggtggttattctgatatcccattttggtgtgtcataatacttcaaactggaaagtcacctggtcgagtctagggaggagggagtggaagggtctctgcttctgtacaaaatctccaggatttacaaaaatgtaacctgccttccttcaatcccatatttggtaaataagttaatatttgacatgtttggtgttctctgacctgttccccacactggggattcctggtctgtaacttgaattgtttcttccacatgttcttaagtactagagttaaacttgtctatgtgtcttttttctctccatcctttttccttcggagaaagagctggattggctggggatatggtataacgagcctgagccttctgtacgtgtctgacactagcactgtcaggcagctttcggctggggctcacccatcccataggaggcctatgtggagcattaactgtggccaaaggaggcagcgggaacaggctgcttgctatctggaaagatgacatatttgtgccatgcttgttttttcacccaggtttttccctctttgtgagatctgagctttagtggaatgtagaatgtggcaatcttaaggtcaccaatcagtttttgttcttttttcctggatctaccctcatggtcgttttcaacatagcgggttagagttcttatactgttccagttcaattccaagaattgcaaatgtttattggacccctccatcttgatgatatataaaaattggaagccaaaccagttcttaaatgctacatgcaactcccagattccaaaggattcaagttctaattataacctttgaagcgtatagaatggaactcattcagtttgattcagttcttacctctgtcaggaggaatacagttcctgttcatcctgtgttctaagatctccattgaacagcactgatttcctttcattagcaaagtgatctttgtctctgttctaaaatggaggcagtagggagcaaaactattcttctcaagcatcctttacaccatactttacttctggtatggtttattaaccacacacacacacaaaagtgaaaaactgtgttgggggggagacactactcctacttatcttgctcataaagccttttctggtgggatattaaggccctggtgtcttacagaaaccatcacgtatgtcgcagcagcatttcacccctgaagtctctaaactctgagcctgaaaagatttgtatttaatacacataacattttttagttcattctgcctttcctatttgttccagtttttgcttggttttagtttggaggggaacttaagtacacagatccttatctctccccatcccctagcctcacaaaacacagttgagagtcttttaagtacctgagctctcgaagctacccagaactgaactagactcccctaccttagactggtaccctcaaacacaggactgaagcttaattgggaatttggctttatggagaaaagaatctttttcaaagtttgtgtcggaaggggagggtgaggtttgcccactgtctctgcaggaaggctccggcttaatctaggaagtagattccagctgcacgatgaggaacacattagcttttgggatcaaaccaggaatatgaatctgtaattattaagctcattgccaacccacaagatatgtttctgaaaacctgtagtttcttaatttaagtccatccccttcattaacgctacagttgtgactcacactgatcccaaacttttaagtgctaaatattaacatttagcattaactgtcttgtcaagcgaaaggccttctctacaacctagtccatctcacttctggtgctacctgagttggacagaattctagctcatggttgctaggaaagctaggcctctgatcatagaagcagatagcttcagtcccagtctaggcctagataaatgactcttattaccacaacccttattattttccaatttcctttctcacatactgtacacaggtagtattttcaatgtgaatccaaagcttgtctggttctctgaaaataattttttcccctttaggttctttacattgtgataatgctgtatttaaagagaatatttaaatgtaatattaaagaaatattcaaaagaa

SEQ ID NO: 124065 - DNA, 449 bp, Homo sapiens
  Payload ID: 4361
  Gene Symbol: CSRNP2
  Gene Name: cysteine-serine-rich nuclear protein 2
  ENST ID: ENST00000552899
  CDS Start-End: 191-449
actgcgggggcagctcgcgggagaccgatgggcggcttggaagcctgcaggattgcagatgaggattgagttcggaatggagtggagaatgatgtaggatggagaatcctaatgtacctggctagctggtggtgagtaggggctttggggccaacttggtgggctccccaaggaaacccctttgaaaccaatggatgcattcacgggctcgggtctcaagaggaagtttgatgatgtggatgtgggctcatcagtttccaactcagatgatgagatctccagcagtgatagtgctgacagctgcgacagcctcaatcctcctaccactgccagcttcacacccacatccatcctgaagcggcagaagcagctgcggaggaagaatgtacgctttgaccaggtgactgtatactactttgcccggcgccaaggttttaccagtgtgccca

SEQ ID NO: 124066 - DNA, 845 bp, Homo sapiens
  Payload ID: 4361
  Gene Symbol: CSRNP2
  Gene Name: cysteine-serine-rich nuclear protein 2
  ENST ID: ENST00000548981
  CDS Start-End: 502-845
aggacgtgccggcgcctataagagccagtgcgctgcggccggatcctattgttagccggagccggggcggttctgggcgtctgctgccgggggcgcccgagttgccggagacgcccggccctctctgcctgccggctgggctgcccaccgccctccctccccgccctgccgccctgggagctccccggccgtcgccgcggggcccgggactcgctcgctcctccctccttcccaccgggctagggcggcggcggcagcgggggcggcagagaccatcacgggaggaggcagctgcggcggggccggtaatgggcctaggggtgcggggcggagggtgccgcctcgtcctttctcgggatcggccctcgggcggccgtggaggagtggtcaagcccagagccgtgcggatggagggaatcctaatgtacctggctagctggtggtgagtaggggctttggggccaacttggtgggctccccaaggaaacccctttgaaaccaatggatgcattcacgggctcgggtctcaagaggaagtttgatgatgtggatgtgggctcatcagtttccaactcagatgatgagatctccagcagtgatagtgctgacagctgcgacagcctcaatcctcctaccactgccagcttcacacccacatccatcctgaagcggcagaagcagctgcggaggaagaatgtacgctttgaccaggtgactgtatactactttgcccggcgccaaggttttaccagtgtgcccagccagggtggtagctctctgggcatggcccagcgccataactctgtacggagctatacactctgtgagtttgcccaggaacagga

SEQ ID NO: 124067 - DNA, 685 bp, Homo sapiens
  Payload ID: 4361
  Gene Symbol: CSRNP2
  Gene Name: cysteine-serine-rich nuclear protein 2
  ENST ID: ENST00000548206
  CDS Start-End: 486-685
ccggggcggttctgggcgtctgctgccgggggcgcccgagttgccggagacgcccggccctctctgcctgccggctgggctgcccaccgccctccctccccgccctgccgccctgggagctccccggccgtcgccgcggggcccgggactcgctcgctcctccctccttcccaccgggctagggcggcggcggcagcgggggcggcagagaccatcacgggaggaggcagctgcggcggggccggtaatgggcctaggggtgcggggcggagggtgccgcctcgtcctttctcgggatcggccctcgggcggccgtggaggagtggtcaagcccagagccgtgcggatggagggccacatccatcctgaagcggcagaagcagctgcggaggaagaatgtacgctttgaccaggtgactgtatactactttgcccggcgccaaggttttaccagtgtgcccagccagggtggtagctctctgggcatggcccagcgccataactctgtacggagctatacactctgtgagtttgcccaggaacaggaggtgaaccatcgagagattctgcgtgagcacctgaaggaagagaaactccatgccaagaaaatgaagctgaccaagaatgggacagtggagtcggtggaggctgatggcctgacgctggatgatgtgtcagatgaaga

SEQ ID NO: 124068 - DNA, 681 bp, Homo sapiens
  Payload ID: 4361
  Gene Symbol: CSRNP2
  Gene Name: cysteine-serine-rich nuclear protein 2
  ENST ID: ENST00000546935
  CDS Start-End: 506-681
gccggggcggttctgggcgtctgctgccgggggcgcccgagttgccggagacgcccggccctctctgcctgccggctgggctgcccaccgccctccctccccgccctgccgccctgggagctccccggccgtcgccgcggggcccgggactcgctcgctcctccctccttcccaccgggctagggcggcggcggcagcgggggcggcagagaccatcacgggaggaggcagctgcggcggggccggcccaattacgcagccaactgccacccgtcccttttagtgctgtggtcttgattcatccttttaaaggggttgagagtggcagtgtgacacacaaactgttcttcagaatgaaatgctagaagttatccccacaagacaacactgtccccttgtcctgcagttttcagttcaagaatcctaatgtacctggctagctggtggtgagtaggggctttggggccaacttggtgggctccccaaggaaacccctttgaaaccaatggatgcattcacgggctcgggtctcaagaggaagtttgatgatgtggatgtgggctcatcagtttccaactcagatgatgagatctccagcagtgatagtgctgacagctgcgacagcctcaatcctcctaccactgccagcttcacacccacatccatcctgaagcggcagaa

SEQ ID NO: 124069 - DNA, 11788 bp, Homo sapiens
  Payload ID: 4362
  Gene Symbol: CSRNP3
  Gene Name: cysteine-serine-rich nuclear protein 3
  Uniprot ID: Q8WYN3
  ENST ID: ENST00000314499
  CDS Start-End: 377-2134
attggttggctgccgcctgatggatagacgagggaggagtgtactctcttcagtgtgttctgacggagccgaagtacagaaaccatatttacaggtacatgtgacagcgttgcagctatgagtggaattttaaaggggaagtttgaagaagtcaacggctcctcaccctgctcttcagtgcaggaatcagatgatgaagttttcagctgtgacagtactgagagtgttgatagtgtcaatcgttcagttttaatgattttaccagaaaaaatgaggaaatatcaacagactgaaaatatgttttcagaggcatagaatcttcaggaaaatactggagttcctgagatctcaaggtacatgtgacagcactgcagcgatgagtggaattttaaagaggaagtttgaagaagttgacggctcctcaccctgctcctctgtgagggaatcagatgatgaagtttccagcagtgaaagtgctgacagtggggacagtgtcaatccatccacttctagtcattttaccccttcctccattctcaaaagggagaaacgactgaggacaaagaatgtacattttagttgtgtcaccgtgtactacttcaccaggaggcaaggcttcacaagtgtgcccagtcaagggggaagcaccctggggatgtccagccgccataacagcgtgcgccagtacactcttggcgagtttgcaagggagcaggagaggctccaccgggagatgttgagagaacaccttagggaggaaaagctgaactccttaaaactaaagatgactaagaatggcacagtagaatcagaagaagccagcactcttacactggatgacatttctgatgatgacattgacctggacaacacagaggtagatgagtacttcttcctacaacctttgccaacaaaaaaacgaagagctctgctgcgtgcctctggagtgaaaaagattgacgtggaagaaaagcacgaactccgagccatccgcctctcacgagaggactgtggctgtgactgccgagtgttctgtgatccagacacgtgcacctgcagcctggctggcattaagtgccaggtggatcgtatgtctttcccatgcggctgcactaaagaaggatgtagtaacacagcaggtagaattgaatttaatcctatccgtgttcggactcactttttgcacacaataatgaaacttgaactggagaaaaaccgagagcagcaaatccccacgctgaatggctgccacagtgagataagtgctcacagtagttctatgggccctgtcgctcactccgtagaatattcaatcgcagacagttttgagattgaaactgagccccaggctgcagtgctgcacctgcagtcggctgaagaattagattgccaaggagaggaggaggaagaagaggaggatgggagcagcttttgcagcggagtcacagattctagcacgcaaagcttggcacctagtgagtcagacgaggaggaggaggaagaagaagaggaagaggaggaggaggatgacgatgatgacaaaggagatggcttcgtggaaggtttgggcacccatgccgaagttgtccctcttccttcagttctttgttattctgatggcaccgccgttcacgaaagccatgcaaagaatgcttctttttatgccaactcttcaactctgtattaccaaatagatagccacattccaggaactccaaatcagatctctgagaactattctgaaagagacactgtcaaaaatggtaccctttcgctggtgccttacaccatgaccccggagcaattcgttgactatgcccgacaagcagaagaggcctatggtgcctcccactacccagctgccaacccctctgtaatcgtttgctgctcctcttccgaaaatgatagcggtgtgccctgcaatagtttatatcctgaacacaggtccaatcaccctcaagtggaatttcactcatacttgaaaggcccctcccaagaagggtttgtctctgcattgaatggtgacagtcacatttcagagcatcctgctgaaaattctttgagccttgcagaaaagagcatattgcatgaagagtgcatcaaatcacccgtggttgagacagtccctgtttagtagcttaaattattctaggaccaactcttctcttatttaaggcactgtatttaattggatttcctgggctcatcattgtttaaactgaagaccaagaaaacttggacggtggttaatcttccagactgtattttgttttttcctttctagccacatgactgtggcattgcacaaatacagtctctgtagggattttaaaagatttcagactgttttgatagaaaaagctaaattttaaaatgcatatctcacagttgcctacctgtcaaactgtgtgaaacctgccaatctgtgtagatcagagctccaaattttggattatcgggcctgtgcaagattgttaactaaggctgggaaataataagatttagagtcctaattttcaatatatctgaagataatgatgactttttaatgtaaaagtaattattgtaagaaaaagatttaattgttccatgtgtattttatttatggtagtttagaagacatgttttgatgaaaatgaacagccgcatgttcattcaagctgaagatgcatagctagttccacagagcatgcccacatggattgcatctggaatccattcacatttttatgatcatgactgatcagatttgcaaattcttaagggtgaaataggcctatttttgctattttggacaaataaatgattctatatgtgcaggtccttacacagttttctctaaagttaagagttaggacaatcctctggggagagtctagttcactgccctccctcagctgactccagagatggaggtagaaggaattgcctttcttttttaaacagcatcatcttgattcttagcttggacagcacctttaagctctaccccctacatcaaaatgcactttagtgccccttcacggtacctcgtgtggggtggggactgagaactctttgagatgaaaaaatttaaaaaaaaattaaaaagatctttaactattataaggttcatataattaatatagaggaatcatccaatgatacttatgaagggaaaatgacctattttccttcaccactctgaggacctaactcagtaaatgcagaggaggctgaggaaacatggaagagacacgacctcagcaaccagccttttctccagcgtgatcaatccatctctacaaaatcagtgtataatgagatttccacttagtgactagctgattgaaggggggcctctacccaaatactcaactaggcctttcttttctgaagcattttgatttgtcttgcctgggacaactagcagaacagtccagaatgcattgcatactttctaattacctcacattctcttattaaagagaacagatagaaataaaacatgcactccccacctttagattacctgcacttggttcgtcggaggacttctaggatcccgtttccctgtaaattaatttaggtaactaaatagtgtaattctgcctttttttttccaatgcaatatgactatgctaaacctgtttcatatttttgaccttctattgttatatcacttcacatgttttataactatttgaaatgcggacatgacttgctattcagtgactgcatcgctacttattttttatgtcttttagacttgggtgtttagaattatggatataaatatattgtagatctcaatttctaaaaaaaatattttatttaattgaacttaaaaatgcttgatctagagaaagtcctccagtggaaaagtttctactaaactttgttttggggaaaaaatgtttacttggcagctcttccactgtgcagttggtttctgccccttctcttcccccctacattgggccaaatttataactcttaatattaacattaaaagagctttgggtttgtctttatgtaggttgcagtaatgagagcagggttgttccttttgaatgattggccctttgggctaatcagaatgaggatttgttgaaatctcaaatatacatatatatatatatatatatatatatatatatatacacacacacacacacatacacatatatatacacatatatgtatgtgtgtgtgtgtgtgtgtgtgtgtgtatatatatatatcccatgttgtctgcaaagtgacagtttttagtgcttaatctccaaaattttccccctactgatacaatctaaagagcacaggcccaaagagaaaatgacaagaggctattgttccttcattcaagcacatgaaaggatcatgtgtactgtatttgctggaccattacaagctcttgaaggatctgcttgtgaagtactctgaggttattcttggaacacagagtgtgggagagtggggaagagccagctccagcctgagcaaagctgaagggtagaatgacagtccagtttctgaaaagagatattttaattttagttcagctttattttcctaagacgatatgaagcctacttttttatttttggctaggtctttgttttctagctttgtttccaaaaggatgcttaagaaaacagagtttttttcccctatccatttatctagggtagaaagtcactgccctgtgagaagaattacccttccaatcatgacagcttctattccaacttttcatatacctgactaacctgtaaacatatcccacaaaccacatacacaggctacctattaaaactctcccatatacctaacacatacacatgcacacacatacaaaatatatacatatcacacacttagagaatgacagatttcaggcaatggccaatagtcagtattgagtttttctaaccccagaatctggttgggctttatgatctaaaaaaatgtggtttagaaaagaggataattggtagagctgtagtttgaaaatatcaggtcaaagttgcaaacatacttatgatggaatcatttcatttttagttcctttcccagaaaagctgagagagcacactgttccagctgacttttttttccattaatagccgttctattcaacaaagagctgcccacatgccaggaaagtgctacagtccttctaagcttttaaaaatggggatcaagctacatgcagccagttggaatacttaagatctttatgccaagacacaataacctgacctgcagctgttgtattgcctccatagtatatctagccaaactgtagtctttgacacacaactttttagtcattcactatcaattgcaaagcttcatgctccagccctggctattctagtaccagtcctatacctttaaatgggacttaattcccagttataatcctggccgaattgatttgaaagtcaagtggctgaagcagcttgcatctcctttgtcattcccaatttcctttgggagaagtcaatgaaagagatttacttaagtttttcctccttatctcttgatcattaattattaagacatgggtaaaattcatttgtctcatgtcttttggttgattgaataatatagttactttttgaaagcccatcatttctttgtgataaaaccattttctcaatgtgacagccacatgtaaaatgtgaaactaatgtttcttagtatgtttaaaatcttcacaatcatatatggccctgcaatactccctgaattccttccctccaaaaaaaaactatgagttgcaaaaacactagttacgaattaatcaagaagcaaagagagtatgttaagtggctatgttctttaaaattttacattctaatagatgacttctaggcaaaattttggtatgattaccattaaacaggaaaacataccatgatttactttctataacttgctaatcactgtttcttttatttcaatttttgatattgttgcacaagtttatgactctttggtctttatattcaaaatttattaagtatcaattctttctttcaacaaatatgtactgaacacatgctgtgttagaacaactgtcttgggtagtaaaaagaggggaacactacaaattataatggataatattaatgaagggtggcatgaaataatcaagctttctcaaatcctcttaatatgtgattttatcaagtgacattagaaaaactgacatcagttcttgtctaattatatgtgagctgcaactaaaagatgcttcctttacctaaattatagaactcactggatcgcccttcatctctctccctccatctgaaatgtatgaattaaatcaggactcagctaggactgaatcaaatgaaaaagaaattttcgattaattgcttcttcaatgttagacctatataagtgatgctaaatttacaccagcaaactcctatcagacagtttcaaggaggatttgactcatgcataacccaggaaacatttcaggaaacttttaagacaacagtgtggaacacaatcactcttacttctatttataaaaagcctatcaaaacagcaaaatcctgttgcaaattccaaagacatcactttgcagcaggtggaaaacagagaggttgttagactccatcactttcagctggagttacaaaccatcaaattagcaggtggaaaatttatattctcagaagccaacaggagactgcctttttaaaaggtgtcatgaagccttctatttctccaaacaactcaatatttctctttaaaatggcatctctgttccttattctcttgatgacagtttgcagtgccattatagccagtgtattaaataccaggctttaatgggaagcacctttgtgctttcaaaggcaagacttgtctgtaattttaaattagaactgttggttgtattcttaccacaaccaaaacccaaagtttaaaggcttgattactctatattaggtctaatatgaattttcaccttctgattgcattactttttctgaaatctgctaactagtgctggaataacaaaaatgcctaagccaaaatgctgtagctctgcaccaacagcacagctcatcagatgttttctatagtagtaaagaatttgattgacttaattgaatatcagcaattttaatacccactagaattatggaagtatcagagtggaagtgaggacgcaataaaagcttaataagtggtggtgtcttctaggaattatgaaaaaaaaagctcagcagagctaagccagatcttattacatcataaagactagagttacaaatggcagccccaaacctagaaggggcagttacaatgtggacaccctttcagcccagttggtgctcacatctgctgaccaacattcatatcaattacatttttacagtctgtaagtcatttgatgctttagaaaataaaaacacacacctacagcattctaaagaaactattttgttaaaaaatttaaacacattttatattaaaataagtgatcaatgactttcatgattgtcaaaagtaaaaagtgcagacatttaaaaaagctcttctttcacattttacctaccaaatctagatattcaacgtgagtccttaaaacagtcacttctaaattttattttgactcctttcttggctttttcaaactggaccatgagacccccttcctaaacaatgcagttgttttgttttattctttttttccagaaattcaagctgaaacatttgatatgacctgtgttttacctggtgatcagttctcaggctagtctaagtctgtgctgtcttggcatgccttgggtttcctatcctgagagtggtaatgccagtagaatgatgggaaccaggagagtgaatacgaccagattcaaagcctaaaacaatatgtttcagtttacttttatatgtagattttttaaatattcacatctagcctggaattttagtaaatacagatacttgttgtatccatgggaaatgaggtcatttcaaagatgtaagtcacgttggtgactactttcttttacttgtgataaatatatcactatacagggtaattgcttttataaatttgatcctttgcattggcttataattcaagaaatgtcaacttcactgtgtcactttatgtcatctctcataaaagtttctggcaggactaaagtttcaaaggaatgtgatagaatttattttggataacatttgtattcagcatgctaatgatgtaactcctctctttatcattaccacggtgatagttaagttcattcgttaactcattttagtgacatgtgaggccatttaaatatttttaagataatgtatattgattagaaagggttagaaggagacaaatttatggtagaaattagccttgccattgtctaagttaatttatgtgacctgattgaacagttttagttgtaactttagagtagcttctttgttagaggatctctttcctttctcttttggttttctcccaatatttttatctgtcttgggattatcttaaaaggtatttattaatgagtatttggaagaaaattgacctagaaaatgtctcttttaaatttatctaggtacttgtatcaccagagaccttcatcaagtcctactgccacactggataaggccactacccccgacccttcttgtcagggacatggcttcctaataatggttttgctgttgtctctacataggggacctatggaaaaggagtttgaaatttctacctttgtagtacattgtatccaattttgttttgctcctccttttcatgtggtcaccaagcttttttccttagccattaaaaaagccacccctctttaaaacaaatttaaagatctatatacatttttgcaactttatttaataaaaaagagaagaaaaaataaaatctaaatctcaattaccctaaagtggaaaaacctaagtatctaacctaggaacttgttgcctggtggtggttgttgttgttgttgttttttaatttatttagtgttgatccttgagttatttaatggtatccaaatgatatctgaaagtgattgattttaagatgtaatagttggcaaagtcatttcatttgtgtctcaaacaaataaagcccactgccatgggttaccatctgaaccctgattcattaggcactagtcatgccaaatggggatctcagaatagtttaatcttttcaaagatactcacaatggccaactgtgtgtgaatactggaaagtttgagattcttctatattcttcaaatttatggtcctgagactaggagggatctccagaggtcatatggctcatcgatctaccaccagggaagactgtcacttaggcatgcccaacaggagagatcgccatctattcttaacatctctagggaaggcagtttccttggcaacacaattcagctctcttaggttttctcacaataagaaaatatcttggccagtctttgagggttaggcacctggcaacagttgtggtgatttgggccattgtactaggggattcaagggaagttgggtttccccctacatttggtgattattacattaatatatgatcattccataagtctcctaagaaatcagatttttaaagaaagacacggattcagagacaatggtctgtaacatgaccaacttttgacaaatatggctgtactaggttttcatttttgctgttgttgttgtttgtttttgtgattgctcttatgtcggtaggtaatgtcaggaaaagtgactgtttcagatccccagtacaaacatcagaactaggatcaaatgacttgacttttaagctgttccattttctaagaagttacaattacaaaaagtaagcattttctacattcttacttctaagtaatgaccttctcattaatctttccttggcttaaaatgacaaataagaatccaaagtttttccactcctcctgtgggagataggaatagttgtgaagagtctgatggaataaaatgactccagagatttacacagccaccatttgatcccagcctttgtccttgtgttatttaaacaatggcttcctgctttctcaggggtcaggaaaatgatttaaaaatttgtcttcttgacaaggcctgaaaacgaagggaggtgtcgtggagaaatggtgatttttctggttacatcacttgattcaagcactccctggagctttcaaagccttttttatctgctcagagttgacacccaactcagagtcagaactcaccagaagatgaggaacacccccgaaatcaatgtttcctttctccatgggatttttttcaatcttggtacagctgcatatctcccaaactcggatgctcttgtgaaatgacagccacatcagtgtggttactccccacaaataacactagggggaaatgaccttttttatttaaaaaaaaaaaaaaggctaatgctatagaatgatcatgtaaagaatgttgaataaaatttggcccatgttttaattgactctaggcacctctattgaaataagtctgaggcatagtttgtgaaacatgtttcaaaagtgtttgatgtataataaatgctagaaatttacagtacagaaatagtaaaaaaataaaataaaaataaacctgtagattacagctctgttcctaagaacctcagcctttattgtgtcttagtaaagttgatctgctttatttttagtttattgaatttctggtgtactagcctcttaagatagaacttttaatacatatgtactggttaatgcctgtttacgcagaaaatggcactttgttctttcagtgtgtttccctcagtgtcacagggtatatcaatttgatagatcatttgacatttgtcaaaaatacgtttcccattttaaaaatatgtataattggttgcatagacatatgtcactttttgcagtgtcttcatcttgatcatagttttagacatcaactatgtctcactttccaactgccatagaaatttggtacatttgcaaattctggtggaatctagtgagctgaatgtattggtagatcaaatgatccaaaggacttgggtgttatccttcagtctgtgttgaaccattcagatattgggaatggtccttacacaagggaagtcttttgagaatatttgttctcttattttttgtttgtttgttgctggcaaaaaaaaaagtaactttaaaaactcagaaaagccactgaactgtattttgtgaccttatgattagttttatctttcaactgatttttattgttacttttactcaatatcaacagtacttcaatagatatttattagttatgttcaatctaatgacttaaaacagttgaaaaggaggaaaatcaactccagtccacacatacagtcatgttacattaagatgtcatgttgtatgtcacacagtttctagattgatttctcttgtgtataagttataacatcaaaaatgccaaagggtatataaaataagctacaataatattcaacagaacttaacctggaccttatgttgtaataatttattcatattagctgtagtcttctgtatttatattttcagtatttattatgaatgacatggaaattcgtgtatttattgtggctttttattgcagtgtgtatatatatataacaaataagcatttttaagtcttatccttaagtttcttttattagtggcacttgtattatgctgtactttttattacatattgtacaatatcttgtccatttgtttgcagcagagtaaaaccggtttctaagttgta

SEQ ID NO: 124070 - DNA, 11684 bp, Homo sapiens
  Payload ID: 4362
  Gene Symbol: CSRNP3
  Gene Name: cysteine-serine-rich nuclear protein 3
  Uniprot ID: Q8WYN3
  ENST ID: ENST00000342316
  CDS Start-End: 273-2030
ctcagtgaggctgatgccgtgcagcaagcagtaggtaatgagtctttgtgcagagtgaagctcttgttgctgaacaataaagcatatggtacaagcaataaaacacagggctgggaaatttaagaagattcctctgaaccaggaagaactgtgtcttcggtgatgctgacacatatgataaaatgatcatttattttggatcctaatgaataaagagtgcaaggactaagactacagttatttgaacaggtacatgtgacagcactgcagcgatgagtggaattttaaagaggaagtttgaagaagttgacggctcctcaccctgctcctctgtgagggaatcagatgatgaagtttccagcagtgaaagtgctgacagtggggacagtgtcaatccatccacttctagtcattttaccccttcctccattctcaaaagggagaaacgactgaggacaaagaatgtacattttagttgtgtcaccgtgtactacttcaccaggaggcaaggcttcacaagtgtgcccagtcaagggggaagcaccctggggatgtccagccgccataacagcgtgcgccagtacactcttggcgagtttgcaagggagcaggagaggctccaccgggagatgttgagagaacaccttagggaggaaaagctgaactccttaaaactaaagatgactaagaatggcacagtagaatcagaagaagccagcactcttacactggatgacatttctgatgatgacattgacctggacaacacagaggtagatgagtacttcttcctacaacctttgccaacaaaaaaacgaagagctctgctgcgtgcctctggagtgaaaaagattgacgtggaagaaaagcacgaactccgagccatccgcctctcacgagaggactgtggctgtgactgccgagtgttctgtgatccagacacgtgcacctgcagcctggctggcattaagtgccaggtggatcgtatgtctttcccatgcggctgcactaaagaaggatgtagtaacacagcaggtagaattgaatttaatcctatccgtgttcggactcactttttgcacacaataatgaaacttgaactggagaaaaaccgagagcagcaaatccccacgctgaatggctgccacagtgagataagtgctcacagtagttctatgggccctgtcgctcactccgtagaatattcaatcgcagacagttttgagattgaaactgagccccaggctgcagtgctgcacctgcagtcggctgaagaattagattgccaaggagaggaggaggaagaagaggaggatgggagcagcttttgcagcggagtcacagattctagcacgcaaagcttggcacctagtgagtcagacgaggaggaggaggaagaagaagaggaagaggaggaggaggatgacgatgatgacaaaggagatggcttcgtggaaggtttgggcacccatgccgaagttgtccctcttccttcagttctttgttattctgatggcaccgccgttcacgaaagccatgcaaagaatgcttctttttatgccaactcttcaactctgtattaccaaatagatagccacattccaggaactccaaatcagatctctgagaactattctgaaagagacactgtcaaaaatggtaccctttcgctggtgccttacaccatgaccccggagcaattcgttgactatgcccgacaagcagaagaggcctatggtgcctcccactacccagctgccaacccctctgtaatcgtttgctgctcctcttccgaaaatgatagcggtgtgccctgcaatagtttatatcctgaacacaggtccaatcaccctcaagtggaatttcactcatacttgaaaggcccctcccaagaagggtttgtctctgcattgaatggtgacagtcacatttcagagcatcctgctgaaaattctttgagccttgcagaaaagagcatattgcatgaagagtgcatcaaatcacccgtggttgagacagtccctgtttagtagcttaaattattctaggaccaactcttctcttatttaaggcactgtatttaattggatttcctgggctcatcattgtttaaactgaagaccaagaaaacttggacggtggttaatcttccagactgtattttgttttttcctttctagccacatgactgtggcattgcacaaatacagtctctgtagggattttaaaagatttcagactgttttgatagaaaaagctaaattttaaaatgcatatctcacagttgcctacctgtcaaactgtgtgaaacctgccaatctgtgtagatcagagctccaaattttggattatcgggcctgtgcaagattgttaactaaggctgggaaataataagatttagagtcctaattttcaatatatctgaagataatgatgactttttaatgtaaaagtaattattgtaagaaaaagatttaattgttccatgtgtattttatttatggtagtttagaagacatgttttgatgaaaatgaacagccgcatgttcattcaagctgaagatgcatagctagttccacagagcatgcccacatggattgcatctggaatccattcacatttttatgatcatgactgatcagatttgcaaattcttaagggtgaaataggcctatttttgctattttggacaaataaatgattctatatgtgcaggtccttacacagttttctctaaagttaagagttaggacaatcctctggggagagtctagttcactgccctccctcagctgactccagagatggaggtagaaggaattgcctttcttttttaaacagcatcatcttgattcttagcttggacagcacctttaagctctaccccctacatcaaaatgcactttagtgccccttcacggtacctcgtgtggggtggggactgagaactctttgagatgaaaaaatttaaaaaaaaattaaaaagatctttaactattataaggttcatataattaatatagaggaatcatccaatgatacttatgaagggaaaatgacctattttccttcaccactctgaggacctaactcagtaaatgcagaggaggctgaggaaacatggaagagacacgacctcagcaaccagccttttctccagcgtgatcaatccatctctacaaaatcagtgtataatgagatttccacttagtgactagctgattgaaggggggcctctacccaaatactcaactaggcctttcttttctgaagcattttgatttgtcttgcctgggacaactagcagaacagtccagaatgcattgcatactttctaattacctcacattctcttattaaagagaacagatagaaataaaacatgcactccccacctttagattacctgcacttggttcgtcggaggacttctaggatcccgtttccctgtaaattaatttaggtaactaaatagtgtaattctgcctttttttttccaatgcaatatgactatgctaaacctgtttcatatttttgaccttctattgttatatcacttcacatgttttataactatttgaaatgcggacatgacttgctattcagtgactgcatcgctacttattttttatgtcttttagacttgggtgtttagaattatggatataaatatattgtagatctcaatttctaaaaaaaatattttatttaattgaacttaaaaatgcttgatctagagaaagtcctccagtggaaaagtttctactaaactttgttttggggaaaaaatgtttacttggcagctcttccactgtgcagttggtttctgccccttctcttcccccctacattgggccaaatttataactcttaatattaacattaaaagagctttgggtttgtctttatgtaggttgcagtaatgagagcagggttgttccttttgaatgattggccctttgggctaatcagaatgaggatttgttgaaatctcaaatatacatatatatatatatatatatatatatatatatatacacacacacacacacatacacatatatatacacatatatgtatgtgtgtgtgtgtgtgtgtgtgtgtgtatatatatatatcccatgttgtctgcaaagtgacagtttttagtgcttaatctccaaaattttccccctactgatacaatctaaagagcacaggcccaaagagaaaatgacaagaggctattgttccttcattcaagcacatgaaaggatcatgtgtactgtatttgctggaccattacaagctcttgaaggatctgcttgtgaagtactctgaggttattcttggaacacagagtgtgggagagtggggaagagccagctccagcctgagcaaagctgaagggtagaatgacagtccagtttctgaaaagagatattttaattttagttcagctttattttcctaagacgatatgaagcctacttttttatttttggctaggtctttgttttctagctttgtttccaaaaggatgcttaagaaaacagagtttttttcccctatccatttatctagggtagaaagtcactgccctgtgagaagaattacccttccaatcatgacagcttctattccaacttttcatatacctgactaacctgtaaacatatcccacaaaccacatacacaggctacctattaaaactctcccatatacctaacacatacacatgcacacacatacaaaatatatacatatcacacacttagagaatgacagatttcaggcaatggccaatagtcagtattgagtttttctaaccccagaatctggttgggctttatgatctaaaaaaatgtggtttagaaaagaggataattggtagagctgtagtttgaaaatatcaggtcaaagttgcaaacatacttatgatggaatcatttcatttttagttcctttcccagaaaagctgagagagcacactgttccagctgacttttttttccattaatagccgttctattcaacaaagagctgcccacatgccaggaaagtgctacagtccttctaagcttttaaaaatggggatcaagctacatgcagccagttggaatacttaagatctttatgccaagacacaataacctgacctgcagctgttgtattgcctccatagtatatctagccaaactgtagtctttgacacacaactttttagtcattcactatcaattgcaaagcttcatgctccagccctggctattctagtaccagtcctatacctttaaatgggacttaattcccagttataatcctggccgaattgatttgaaagtcaagtggctgaagcagcttgcatctcctttgtcattcccaatttcctttgggagaagtcaatgaaagagatttacttaagtttttcctccttatctcttgatcattaattattaagacatgggtaaaattcatttgtctcatgtcttttggttgattgaataatatagttactttttgaaagcccatcatttctttgtgataaaaccattttctcaatgtgacagccacatgtaaaatgtgaaactaatgtttcttagtatgtttaaaatcttcacaatcatatatggccctgcaatactccctgaattccttccctccaaaaaaaaactatgagttgcaaaaacactagttacgaattaatcaagaagcaaagagagtatgttaagtggctatgttctttaaaattttacattctaatagatgacttctaggcaaaattttggtatgattaccattaaacaggaaaacataccatgatttactttctataacttgctaatcactgtttcttttatttcaatttttgatattgttgcacaagtttatgactctttggtctttatattcaaaatttattaagtatcaattctttctttcaacaaatatgtactgaacacatgctgtgttagaacaactgtcttgggtagtaaaaagaggggaacactacaaattataatggataatattaatgaagggtggcatgaaataatcaagctttctcaaatcctcttaatatgtgattttatcaagtgacattagaaaaactgacatcagttcttgtctaattatatgtgagctgcaactaaaagatgcttcctttacctaaattatagaactcactggatcgcccttcatctctctccctccatctgaaatgtatgaattaaatcaggactcagctaggactgaatcaaatgaaaaagaaattttcgattaattgcttcttcaatgttagacctatataagtgatgctaaatttacaccagcaaactcctatcagacagtttcaaggaggatttgactcatgcataacccaggaaacatttcaggaaacttttaagacaacagtgtggaacacaatcactcttacttctatttataaaaagcctatcaaaacagcaaaatcctgttgcaaattccaaagacatcactttgcagcaggtggaaaacagagaggttgttagactccatcactttcagctggagttacaaaccatcaaattagcaggtggaaaatttatattctcagaagccaacaggagactgcctttttaaaaggtgtcatgaagccttctatttctccaaacaactcaatatttctctttaaaatggcatctctgttccttattctcttgatgacagtttgcagtgccattatagccagtgtattaaataccaggctttaatgggaagcacctttgtgctttcaaaggcaagacttgtctgtaattttaaattagaactgttggttgtattcttaccacaaccaaaacccaaagtttaaaggcttgattactctatattaggtctaatatgaattttcaccttctgattgcattactttttctgaaatctgctaactagtgctggaataacaaaaatgcctaagccaaaatgctgtagctctgcaccaacagcacagctcatcagatgttttctatagtagtaaagaatttgattgacttaattgaatatcagcaattttaatacccactagaattatggaagtatcagagtggaagtgaggacgcaataaaagcttaataagtggtggtgtcttctaggaattatgaaaaaaaaagctcagcagagctaagccagatcttattacatcataaagactagagttacaaatggcagccccaaacctagaaggggcagttacaatgtggacaccctttcagcccagttggtgctcacatctgctgaccaacattcatatcaattacatttttacagtctgtaagtcatttgatgctttagaaaataaaaacacacacctacagcattctaaagaaactattttgttaaaaaatttaaacacattttatattaaaataagtgatcaatgactttcatgattgtcaaaagtaaaaagtgcagacatttaaaaaagctcttctttcacattttacctaccaaatctagatattcaacgtgagtccttaaaacagtcacttctaaattttattttgactcctttcttggctttttcaaactggaccatgagacccccttcctaaacaatgcagttgttttgttttattctttttttccagaaattcaagctgaaacatttgatatgacctgtgttttacctggtgatcagttctcaggctagtctaagtctgtgctgtcttggcatgccttgggtttcctatcctgagagtggtaatgccagtagaatgatgggaaccaggagagtgaatacgaccagattcaaagcctaaaacaatatgtttcagtttacttttatatgtagattttttaaatattcacatctagcctggaattttagtaaatacagatacttgttgtatccatgggaaatgaggtcatttcaaagatgtaagtcacgttggtgactactttcttttacttgtgataaatatatcactatacagggtaattgcttttataaatttgatcctttgcattggcttataattcaagaaatgtcaacttcactgtgtcactttatgtcatctctcataaaagtttctggcaggactaaagtttcaaaggaatgtgatagaatttattttggataacatttgtattcagcatgctaatgatgtaactcctctctttatcattaccacggtgatagttaagttcattcgttaactcattttagtgacatgtgaggccatttaaatatttttaagataatgtatattgattagaaagggttagaaggagacaaatttatggtagaaattagccttgccattgtctaagttaatttatgtgacctgattgaacagttttagttgtaactttagagtagcttctttgttagaggatctctttcctttctcttttggttttctcccaatatttttatctgtcttgggattatcttaaaaggtatttattaatgagtatttggaagaaaattgacctagaaaatgtctcttttaaatttatctaggtacttgtatcaccagagaccttcatcaagtcctactgccacactggataaggccactacccccgacccttcttgtcagggacatggcttcctaataatggttttgctgttgtctctacataggggacctatggaaaaggagtttgaaatttctacctttgtagtacattgtatccaattttgttttgctcctccttttcatgtggtcaccaagcttttttccttagccattaaaaaagccacccctctttaaaacaaatttaaagatctatatacatttttgcaactttatttaataaaaaagagaagaaaaaataaaatctaaatctcaattaccctaaagtggaaaaacctaagtatctaacctaggaacttgttgcctggtggtggttgttgttgttgttgttttttaatttatttagtgttgatccttgagttatttaatggtatccaaatgatatctgaaagtgattgattttaagatgtaatagttggcaaagtcatttcatttgtgtctcaaacaaataaagcccactgccatgggttaccatctgaaccctgattcattaggcactagtcatgccaaatggggatctcagaatagtttaatcttttcaaagatactcacaatggccaactgtgtgtgaatactggaaagtttgagattcttctatattcttcaaatttatggtcctgagactaggagggatctccagaggtcatatggctcatcgatctaccaccagggaagactgtcacttaggcatgcccaacaggagagatcgccatctattcttaacatctctagggaaggcagtttccttggcaacacaattcagctctcttaggttttctcacaataagaaaatatcttggccagtctttgagggttaggcacctggcaacagttgtggtgatttgggccattgtactaggggattcaagggaagttgggtttccccctacatttggtgattattacattaatatatgatcattccataagtctcctaagaaatcagatttttaaagaaagacacggattcagagacaatggtctgtaacatgaccaacttttgacaaatatggctgtactaggttttcatttttgctgttgttgttgtttgtttttgtgattgctcttatgtcggtaggtaatgtcaggaaaagtgactgtttcagatccccagtacaaacatcagaactaggatcaaatgacttgacttttaagctgttccattttctaagaagttacaattacaaaaagtaagcattttctacattcttacttctaagtaatgaccttctcattaatctttccttggcttaaaatgacaaataagaatccaaagtttttccactcctcctgtgggagataggaatagttgtgaagagtctgatggaataaaatgactccagagatttacacagccaccatttgatcccagcctttgtccttgtgttatttaaacaatggcttcctgctttctcaggggtcaggaaaatgatttaaaaatttgtcttcttgacaaggcctgaaaacgaagggaggtgtcgtggagaaatggtgatttttctggttacatcacttgattcaagcactccctggagctttcaaagccttttttatctgctcagagttgacacccaactcagagtcagaactcaccagaagatgaggaacacccccgaaatcaatgtttcctttctccatgggatttttttcaatcttggtacagctgcatatctcccaaactcggatgctcttgtgaaatgacagccacatcagtgtggttactccccacaaataacactagggggaaatgaccttttttatttaaaaaaaaaaaaaaggctaatgctatagaatgatcatgtaaagaatgttgaataaaatttggcccatgttttaattgactctaggcacctctattgaaataagtctgaggcatagtttgtgaaacatgtttcaaaagtgtttgatgtataataaatgctagaaatttacagtacagaaatagtaaaaaaataaaataaaaataaacctgtagattacagctctgttcctaagaacctcagcctttattgtgtcttagtaaagttgatctgctttatttttagtttattgaatttctggtgtactagcctcttaagatagaacttttaatacatatgtactggttaatgcctgtttacgcagaaaatggcactttgttctttcagtgtgtttccctcagtgtcacagggtatatcaatttgatagatcatttgacatttgtcaaaaatacgtttcccattttaaaaatatgtataattggttgcatagacatatgtcactttttgcagtgtcttcatcttgatcatagttttagacatcaactatgtctcactttccaactgccatagaaatttggtacatttgcaaattctggtggaatctagtgagctgaatgtattggtagatcaaatgatccaaaggacttgggtgttatccttcagtctgtgttgaaccattcagatattgggaatggtccttacacaagggaagtcttttgagaatatttgttctcttattttttgtttgtttgttgctggcaaaaaaaaaagtaactttaaaaactcagaaaagccactgaactgtattttgtgaccttatgattagttttatctttcaactgatttttattgttacttttactcaatatcaacagtacttcaatagatatttattagttatgttcaatctaatgacttaaaacagttgaaaaggaggaaaatcaactccagtccacacatacagtcatgttacattaagatgtcatgttgtatgtcacacagtttctagattgatttctcttgtgtataagttataacatcaaaaatgccaaagggtatataaaataagctacaataatattcaacagaacttaacctggaccttatgttgtaataatttattcatattagctgtagtcttctgtatttatattttcagtatttattatgaatgacatggaaattcgtgtatttattgtggctttttattgcagtgtgtatatatatataacaaataagcatttttaagtcttatccttaagtttcttttattagtggcacttgtattatgctgtactttttattacatattgtacaatatcttgtccatttgtttgcagcagagtaaaaccggtttctaagttgta

SEQ ID NO: 124071 - DNA, 482 bp, Homo sapiens
  Payload ID: 4362
  Gene Symbol: CSRNP3
  Gene Name: cysteine-serine-rich nuclear protein 3
  ENST ID: ENST00000409664
  CDS Start-End: 67-482
agtgtgttctgacggagccgaagtacagaaaccatatttacaggtacatgtgacagcactgcagcgatgagtggaattttaaagaggaagtttgaagaagttgacggctcctcaccctgctcctctgtgagggaatcagatgatgaagtttccagcagtgaaagtgctgacagtggggacagtgtcaatccatccacttctagtcattttaccccttcctccattctcaaaagggagaaacgactgaggacaaagaatgtacattttagttgtgtcaccgtgtactacttcaccaggaggcaaggcttcacaagtgtgcccagtcaagggggaagcaccctggggatgtccagccgccataacagcgtgcgccagtacactcttggcgagtttgcaagggagcaggagaggctccaccgggagatgttgagagaacaccttagggaggaaaagctgaactccttaaaactaaagatgactaa

SEQ ID NO: 124072 - DNA, 2545 bp, Homo sapiens
  Payload ID: 4362
  Gene Symbol: CSRNP3
  Gene Name: cysteine-serine-rich nuclear protein 3
  ENST ID: ENST00000409420
  CDS Start-End: 251-2104
tcctgctctcccgtgattcaggtagcctggcagaaccgcagttccacaattccttacccagcattccgtttcagctgctggaggactgcctgagccttatgcaaatgagaccagctcggaggctttgactgcagaagcgagaggagggggcagaagggagttcaaaggtcacagggctggtggaaagctggatcagttgcctgaaaaaaatgtactggggttctctgcagcagtgttttgcagcagttaaatgaagtgtgctttatttctgagagtgaagattttacagcgtgtgtgccgtagtcgttatatagtgcacgcaggtacatgtgacagcactgcagcgatgagtggaattttaaagaggaagtttgaagaagttgacggctcctcaccctgctcctctgtgagggaatcagatgatgaagtttccagcagtgaaagtgctgacagtggggacagtgtcaatccatccacttctagtcattttaccccttcctccattctcaaaagggagaaacgactgaggacaaagaatgtacattttagttgtgtcaccgtgtactacttcaccaggaggcaaggcttcacaagtgtgcccagtcaagggggaagcaccctggggatgtccagccgccataacagcgtgcgccagtacactcttggcgagtttgcaagggagcaggagaggctccaccgggagatgttgagagaacaccttagggaggaaaagctgaactccttaaaactaaagatgactaagaatggcacagtagaatcagaagaagccagcactcttacactggatgacatttctgatgatgacattgacctggacaacacagaggtagatgagtacttcttcctacaacctttgccaacaaaaaaacgaagagctctgctgcgtgcctctggagtgaaaaagattgacgtggaagaaaagcacgaactccgagccatccgcctctcacgagaggactgtggctgtgactgccgagtgttctgtgatccagacacgtgcacctgcagcctggctggcattaagtgccaggtggatcgtatgtctttcccatgcggctgcactaaagaaggatgtagtaacacagcaggtagaattgaatttaatcctatccgtgttcggactcactttttgcacacaataatgaaacttgaactggagaaaaaccgagagcagcaaatccccacgctgaatggctgccacagtgagataagtgctcacagtagttctatgggccctgtcgctcactccgtagaatattcaatcgcagacagttttgagattgaaactgagccccaggctgcagtgctgcacctgcagtcggctgaagaattagattgccaaggagaggaggaggaagaagaggaggatgggagcagcttttgcagcggagtcacagattctagcacgcaaagcttggcacctagtgagtcagacgaggaggaggaggaagaagaagaggaagaggaggaggaggatgacgatgatgacaaaggagatggcttcgtggaaggtttgggcacccatgccgaagttgtccctcttccttcagttctttgttattctgatggcaccgccgttcacgaaagccatgcaaagaatgcttctttttatgccaactcttcaactctgtattaccaaatagatagccacattccaggaactccaaatcagatctctgagaactattctgaaagagacactgtcaaaaatggtaccctttcgctggtgccttacaccatgaccccggagcaattcgttgactatgcccgacaagcagaagaggcctatggtgcctcccactacccagctgccaacccctctgtaatcgtttgctgctcctcttccgaaaatgatagcggtgtgccctgcaatagtttatatcctgaacacaggtccaatcaccctcaagtggaatttcactcatacttgaaaggcccctcccaagaagggtttgtctctgcattgaatggtgacagtcacatttcagagcatcctgctgaaaattctttgagccttgcagaaaagagcatattgcatgaagagtgcatcaaatcacccgtggttgagacagtccctgtttagtagcttaaattattctaggaccaactcttctcttatttaaggcactgtatttaattggatttcctgggctcatcattgtttaaactgaagaccaagaaaacttggacggtggttaatcttccagactgtattttgttttttcctttctagccacatgactgtggcattgcacaaatacagtctctgtagggattttaaaagatttcagactgttttgatagaaaaagctaaattttaaaatgcatatctcacagttgcctacctgtcaaactgtgtgaaacctgccaatctgtgtagatcagagctccaaattttggattatcgggcctgtgcaagattgttaactaaggctgggaaataataagatttagagtcctaattttcaatatatctgaagataatgatgactttttaatgtaaaagtaattattgtaagaaaaa

SEQ ID NO: 124073 - DNA, 1688 bp, Homo sapiens
  Payload ID: 4362
  Gene Symbol: CSRNP3
  Gene Name: cysteine-serine-rich nuclear protein 3
  ENST ID: ENST00000421875
  CDS Start-End: 377-1688
attggttggctgccgcctgatggatagacgagggaggagtgtactctcttcagtgtgttctgacggagccgaagtacagaaaccatatttacaggtacatgtgacagcgttgcagctatgagtggaattttaaaggggaagtttgaagaagtcaacggctcctcaccctgctcttcagtgcaggaatcagatgatgaagttttcagctgtgacagtactgagagtgttgatagtgtcaatcgttcagttttaatgattttaccagaaaaaatgaggaaatatcaacagactgaaaatatgttttcagaggcatagaatcttcaggaaaatactggagttcctgagatctcaaggtacatgtgacagcactgcagcgatgagtggaattttaaagaggaagtttgaagaagttgacggctcctcaccctgctcctctgtgagggaatcagatgatgaagtttccagcagtgaaagtgctgacagtggggacagtgtcaatccatccacttctagtcattttaccccttcctccattctcaaaagggagaaacgactgaggacaaagaatgtacattttagttgtgtcaccgtgtactacttcaccaggaggcaaggcttcacaagtgtgcccagtcaagggggaagcaccctggggatgtccagccgccataacagcgtgcgccagtacactcttggcgagtttgcaagggagcaggagaggctccaccgggagatgttgagagaacaccttagggaggaaaagctgaactccttaaaactaaagatgactaagaatggcacagtagaatcagaagaagccagcactcttacactggatgacatttctgatgatgacattgacctggacaacacagaggtagatgagtacttcttcctacaacctttgccaacaaaaaaacgaagagctctgctgcgtgcctctggagtgaaaaagattgacgtggaagaaaagcacgaactccgagccatccgcctctcacgagaggactgtggctgtgactgccgagtgttctgtgatccagacacgtgcacctgcagcctggctggcattaagtgccaggtggatcgtatgtctttcccatgcggctgcactaaagaaggatgtagtaacacagcaggtagaattgaatttaatcctatccgtgttcggactcactttttgcacacaataatgaaacttgaactggagaaaaaccgagagcagcaaatccccacgctgaatggctgccacagtgagataagtgctcacagtagttctatgggccctgtcgctcactccgtagaatattcaatcgcagacagttttgagattgaaactgagccccaggctgcagtgctgcacctgcagtcggctgaagaattagattgccaaggagaggaggaggaagaagaggaggatgggagcagcttttgcagcggagtcacagattctagcacgcaaagcttggcacctagtgagtcagacgaggaggaggaggaagaagaagaggaagaggaggaggaggatgacgatgatgacaaaggagatggcttcgtggaaggtttgggcacccatgccgaagttgtccctcttccttcagttctttgttattctgatggcaccgccgttcacgaaagccatgcaaagaatgcttctttttatgccaactcttcaactctgtattacc

SEQ ID NO: 124074 - DNA, 2576 bp, Homo sapiens
  Payload ID: 4363
  Gene Symbol: CYSLTR1
  Gene Name: cysteinyl leukotriene receptor 1
  Uniprot ID: Q9Y271
  ENST ID: ENST00000373304
  CDS Start-End: 294-1307
gagcaggcactctgtgaatggactgtgcttttacgaccctacagggtatcaagatactgtgcagctcgccaacaaggattaattgcaaggactggtagatcgaatttactgaagacttggagcttgcttctgagaacaaacgcaaaaggacagtaaactgtggaccttgaagttagcagcgtgggcttcctctaatattacaccgtaaaaggcattgatcaccataagaaggaacatttgtgaaggtactccagtgccagaaagaggcacaaagcagacattcgtagagaaacatggatgaaacaggaaatctgacagtatcttctgccacatgccatgacactattgatgacttccgcaatcaagtgtattccaccttgtactctatgatctctgttgtaggcttctttggcaatggctttgtgctctatgtcctcataaaaacctatcacaagaagtcagccttccaagtatacatgattaatttagcagtagcagatctactttgtgtgtgcacactgcctctccgtgtggtctattatgttcacaaaggcatttggctctttggtgacttcttgtgccgcctcagcacctatgctttgtatgtcaacctctattgtagcatcttctttatgacagccatgagctttttccggtgcattgcaattgtttttccagtccagaacattaatttggttacacagaaaaaagccaggtttgtgtgtgtaggtatttggatttttgtgattttgaccagttctccatttctaatggccaaaccacaaaaagatgagaaaaataataccaagtgctttgagcccccacaagacaatcaaactaaaaatcatgttttggtcttgcattatgtgtcattgtttgttggctttatcatcccttttgttattataattgtctgttacacaatgatcattttgaccttactaaaaaaatcaatgaaaaaaaatctgtcaagtcataaaaaggctataggaatgatcatggtcgtgaccgctgcctttttagtcagtttcatgccatatcatattcaacgtaccattcaccttcattttttacacaatgaaactaaaccctgtgattctgtccttagaatgcagaagtccgtggtcataaccttgtctctggctgcatccaattgttgctttgaccctctcctatatttcttttctgggggtaactttaggaaaaggctgtctacattcagaaagcattctttgtccagcgtgacttatgtacccagaaagaaggcctctttgccagaaaaaggagaagaaatatgtaaagtatagtttaaacccatttccagtccaaaccaatgaaaatagtttcccaaataagtattttgtcaaatcatttacaaaaaaaataaaaattttacttaatattttacaaatacttaactatttgggcctacaactctatctcatttatgcatccacatgattagatatttatagatattttaagtgctaaaaattcggtccacaactatgaactgaattataaataattttgaccactcaccagaatttggagaatatttttatctttgcactataaaatatgtcttatattaaagttttcctcttcaaataaaagctttacaaacgataaaatatataaaattagtcaataaaaatacatgcaagctaaaagttataaaatataaaactagatataaaattggcaaatagttctgaatcattctaacatattcctttgcatgcatgccatcagatgagaactggagatgactcaggagctacataaaacgtactgtcacccttctttgtagtactgattcgctaggcaaattagggccatttcttccaaaagagaatgtaaaagtgctagaacagactagtattcagctaaagggtcctaaaagcaccatacaatgttcaatatggcaacaggagaaatctggtcaaaagccagtttgtctccagttttcttctgcctttgcctcaggctcccaaaattgaatagtggagttttagctgctcagtgaggttcctgtagagatttctctccatccatgacatataattcttccttaagaagccagacaactggcactcctatatataaatagaagtaattaaaaacttatctgaagaagagaaaaggaaaaggaatctacttttctatatgccaattgctgggatcaaaataaactacaaaggatttatgaagaaaattgtgaatgttcacattacaaattcttttaagaagtgcatacatttatgtatatgtatacaactatatgtaagagattttgctgtatgatatgcattatgggtgaaagttcacgataagttttattattgctttattactttttattggtatgttgacaggaatatcatggatatgtttacagtgacttttatattacagtggacgctttgatcttaaaacagccacaacaactcatctacggctgaaatataatatgcgtggacaagcttttgctgaagtgtagtgtgtcctttaagtttgttttttaaaaagtaacttacctcagaagaaataaataactataaagaaaaaagaaa

SEQ ID NO: 124075 - DNA, 2681 bp, Homo sapiens
  Payload ID: 4363
  Gene Symbol: CYSLTR1
  Gene Name: cysteinyl leukotriene receptor 1
  Uniprot ID: Q9Y271
  ENST ID: ENST00000614798
  CDS Start-End: 415-1428
gtttctattcttccttcctctttgacccttcccctcccccactttgcaccagagaagtcagactccgggagtgctttaacagtttgaaggctaatctgaaagaggaagaagaatctgtatatctgtatatattggctagcaaatgtgccctgctctctcccctcttaaaaatagcagcaacccatctttgcaaagaagcttgcctatagagcaggcactctgtgaatggactgtgcttttacgaccctacagggtatcaagatactgtgcagctcgccaacaaggattaattgcaaggactggtagatcgaatttactgaagacttggagcttgcttctgagaacaaacgcaaaaggacagtaaactgtggaccttgaagttagcaggcacaaagcagacattcgtagagaaacatggatgaaacaggaaatctgacagtatcttctgccacatgccatgacactattgatgacttccgcaatcaagtgtattccaccttgtactctatgatctctgttgtaggcttctttggcaatggctttgtgctctatgtcctcataaaaacctatcacaagaagtcagccttccaagtatacatgattaatttagcagtagcagatctactttgtgtgtgcacactgcctctccgtgtggtctattatgttcacaaaggcatttggctctttggtgacttcttgtgccgcctcagcacctatgctttgtatgtcaacctctattgtagcatcttctttatgacagccatgagctttttccggtgcattgcaattgtttttccagtccagaacattaatttggttacacagaaaaaagccaggtttgtgtgtgtaggtatttggatttttgtgattttgaccagttctccatttctaatggccaaaccacaaaaagatgagaaaaataataccaagtgctttgagcccccacaagacaatcaaactaaaaatcatgttttggtcttgcattatgtgtcattgtttgttggctttatcatcccttttgttattataattgtctgttacacaatgatcattttgaccttactaaaaaaatcaatgaaaaaaaatctgtcaagtcataaaaaggctataggaatgatcatggtcgtgaccgctgcctttttagtcagtttcatgccatatcatattcaacgtaccattcaccttcattttttacacaatgaaactaaaccctgtgattctgtccttagaatgcagaagtccgtggtcataaccttgtctctggctgcatccaattgttgctttgaccctctcctatatttcttttctgggggtaactttaggaaaaggctgtctacattcagaaagcattctttgtccagcgtgacttatgtacccagaaagaaggcctctttgccagaaaaaggagaagaaatatgtaaagtatagtttaaacccatttccagtccaaaccaatgaaaatagtttcccaaataagtattttgtcaaatcatttacaaaaaaaataaaaattttacttaatattttacaaatacttaactatttgggcctacaactctatctcatttatgcatccacatgattagatatttatagatattttaagtgctaaaaattcggtccacaactatgaactgaattataaataattttgaccactcaccagaatttggagaatatttttatctttgcactataaaatatgtcttatattaaagttttcctcttcaaataaaagctttacaaacgataaaatatataaaattagtcaataaaaatacatgcaagctaaaagttataaaatataaaactagatataaaattggcaaatagttctgaatcattctaacatattcctttgcatgcatgccatcagatgagaactggagatgactcaggagctacataaaacgtactgtcacccttctttgtagtactgattcgctaggcaaattagggccatttcttccaaaagagaatgtaaaagtgctagaacagactagtattcagctaaagggtcctaaaagcaccatacaatgttcaatatggcaacaggagaaatctggtcaaaagccagtttgtctccagttttcttctgcctttgcctcaggctcccaaaattgaatagtggagttttagctgctcagtgaggttcctgtagagatttctctccatccatgacatataattcttccttaagaagccagacaactggcactcctatatataaatagaagtaattaaaaacttatctgaagaagagaaaaggaaaaggaatctacttttctatatgccaattgctgggatcaaaataaactacaaaggatttatgaagaaaattgtgaatgttcacattacaaattcttttaagaagtgcatacatttatgtatatgtatacaactatatgtaagagattttgctgtatgatatgcattatgggtgaaagttcacgataagttttattattgctttattactttttattggtatgttgacaggaatatcatggatatgtttacagtgacttttatattacagtggacgctttgatcttaaaacagccacaacaactcatctacggctgaaatataatatgcgtggacaagcttttgctgaagtgtagtgtgtcctttaagtttgttttttaaaaagtaacttacctcagaagaaataaataact

SEQ ID NO: 124076 - DNA, 4672 bp, Homo sapiens
  Payload ID: 4364
  Gene Symbol: CYSLTR2
  Gene Name: cysteinyl leukotriene receptor 2
  Uniprot ID: Q9NS75
  ENST ID: ENST00000282018
  CDS Start-End: 264-1304
aagttctctaagtttgaagcgtcagcttcaaccaaacaaattaatggctattctacattcaaaaatcaggaaatttaaatttattatgaaatgtaatgcagcatgtagtaaagacttaaccagtgttttaaaactcaactttcaaagaaaagatagtattgctccctgtttcattaaaacctagagagatgtaatcagtaagcaagaaggaaaaagggaaattcacaaagtaactttttgtgtctgtttctttttaacccagcatggagagaaaatttatgtccttgcaaccatccatctccgtatcagaaatggaaccaaatggcaccttcagcaataacaacagcaggaactgcacaattgaaaacttcaagagagaatttttcccaattgtatatctgataatatttttctggggagtcttgggaaatgggttgtccatatatgttttcctgcagccttataagaagtccacatctgtgaacgttttcatgctaaatctggccatttcagatctcctgttcataagcacgcttcccttcagggctgactattatcttagaggctccaattggatatttggagacctggcctgcaggattatgtcttattccttgtatgtcaacatgtacagcagtatttatttcctgaccgtgctgagtgttgtgcgtttcctggcaatggttcacccctttcggcttctgcatgtcaccagcatcaggagtgcctggatcctctgtgggatcatatggatccttatcatggcttcctcaataatgctcctggacagtggctctgagcagaacggcagtgtcacatcatgcttagagctgaatctctataaaattgctaagctgcagaccatgaactatattgccttggtggtgggctgcctgctgccatttttcacactcagcatctgttatctgctgatcattcgggttctgttaaaagtggaggtcccagaatcggggctgcgggtttctcacaggaaggcactgaccaccatcatcatcaccttgatcatcttcttcttgtgtttcctgccctatcacacactgaggaccgtccacttgacgacatggaaagtgggtttatgcaaagacagactgcataaagctttggttatcacactggccttggcagcagccaatgcctgcttcaatcctctgctctattactttgctggggagaattttaaggacagactaaagtctgcactcagaaaaggccatccacagaaggcaaagacaaagtgtgttttccctgttagtgtgtggttgagaaaggaaacaagagtataaggagctcttagatgagacctgttcttgtatccttgtgtccatcttcattcactcatagtctccaaatgactttgtatttacatcactcccaacaaatgttgattcttaatatttagttgaccattacttttgttaataagacctacttcaaaaattttattcagtgtattttcagttgttgagtcttaatgagggatacaggaggaaaaatccctactagagtcctgtgggctgaaatatcagactgggaaaaaatgcaaagcacattggatcctacttttcttcagatattgaaccagatctctggcccatcaggctttctaaattcttcaaaagagccacaacttccccagcttctccagctcccctgtcctcttcaatcccttgagatatagccaactaacgacgctactggaagccccagagcagaaaagaagcacatcctaagattcagggaaagactaactgtgaaaaggaaggctgtcctataacaaagcagcatcaagtcccaagtaaggacagtgagagaaaagggggagaaggattggagcaaaagagaactggcaataagtaggggaaggaagaatttcattttgcattgggagagaggttctaacacactgaaggcaaccctatttctactgtttctctcttgccagggtattaggaaggacaggaaaagtaggaggaggatctggggcattgccctaggaaatgaaagaattgtgtatagaatggaagggggatcatcaaggacatgtatctcaaattttctttgagatgcaggttagttgaccttgctgcagttctccttcccattaattcattgggatggaagccaaaaataaaagaggtgcctctgaggattagggttgagcactcaagggaaagatggagtagagggcaaatagcaaaagttgttgcactcctgaaattctattaacatttccgcagaagatgagtagggagatgctgccttcccttttgagatagtgtagaaaaacactagatagtgtgagaggttcctttctgtccactgaaacaaggctaaggatactaccaactactatcaccatgaccattgtactgacaacaattgaatgcagtctccctgcagggcagattatgccaggcactttacatttgttgatcccatttgacattcacaccaaagctctgagttccattttacagctgaagaaattgaagcttagagaaattaagaagcttgtttaagtttacacagctagtaagagttttaaaaatctctgtgcagaagtgttggctgggtgctctccccaccactacccttgtaaacttccaggaagattggttgaaagtctgaataaaagctgtcctttcctaccaatttcctccccctcctcactctcacaagaaaaccaaaagtttctcttcagagttgttgactcatagtacagtaaagggtggaggtgatatggcattctgaaagtagggagggactaagtcagtcatcatactaaacaaaaatcccagtaccctttccttatttagctaccagaatgatgacagacagactcaaaccctgtcaagacaggaccctggaggatcctcctatggggaaactgcataatctgaaaaaaaggctgacagatacaaatagttgaggatccttcaacacaaaagctgcgtgtctgccctattactcacctgacgatgaagcccacaatgcaacaaatcccttccactcacagcatttggtcaacctgtcagagcctcattcttaattatgaaaagtagtcaatgaacacaatacatttgagggaaaggccgtaacatgaaaggcaccaacaaataaatgtgagagtagatagagaccttttgagtataaaagatcctccaaaataagagattaaaccaagatagaggaaaacacagtagctgggaaacaaggaatccaacgcaggagaaagtgaagagaattcccaggatgttggtgtgtagcaggcttagaaagcaagtcattcatgttggagcaggactcttaaaggactctaggagagatgtctcccagaaaaagaagaaattaattgattcatacacattgagagggatttagatttctcttgcagagattgagataaactagtcgtaaatacatagaaaaataagcaagtaaaaacgcaatacagtttttaagtgctagaggaaaagaaacttttgtattagagaggaaatataaccacagtacactacatggctcagctgtgaataatatttacatagaggataatgtgaatataatagtctcccattatctgtggttttgctttctgcagttcagttacagccagccagtctgaaaatattaaatggaaaattccagaaataattcttaagttttaaaacatgtgctgttttgagtagcatgttgaaatctcgcactatcaccctccacccatgttctgggcagggcaaagtgggatggtgtgagatttctccagtggatccacaatgtatatgctacccacccatgagtcacttagtcatcatccagttgctcagatcaactgttgtggtataacagtgcttgtgttaaagtcactcttattttacttactaatgtccccaaagcataagagtagtgatgctggcaaataagatacaccaaagagaagctgtaaagtgcttcctctaacagaaaatgtgaaagttcttgacttaataaggaaagaaaaaaaacacatgctgaagttgctaagatctacagtaagaacaaatccatctgtaaaattgtgaagaaggcaaaagaaatttgtgctagttttgctgttgcaccacaagctgcaaaaattatttattacaccccacggtgtgtgataaacacttagttaagatgaaaaggtattaaatttgtgggtggaagacatgaacagaaatgtgttccaattgacagcaatcgggtttggtactatttgggtttggtgctattcgtattcagggtcttggaatgcaactcccacagataagggggtgctgctggagtgaaatactgtgatataacctttttttcaggaaatgaagggagaagatgtgtacgtgtgtgggagaggtataagagacctaggttgccatattctatcacagaaaatgcataataactaaatctggaaaatgatgaatagctgtacaaccatattatttagcaataggaggtaaatacaggtagaagcagaagaaagaatgggcaggggttacctctatggagaagctggggtgggaggatagggtggggacttattttacgaactgtgtaattgcctaacttgtgaatatgtatttctgaagtaaaataaaaattaagttaaaattaaattttaaaattcaaa

SEQ ID NO: 124077 - DNA, 1908 bp, Homo sapiens
  Payload ID: 4364
  Gene Symbol: CYSLTR2
  Gene Name: cysteinyl leukotriene receptor 2
  Uniprot ID: Q9NS75
  ENST ID: ENST00000614739
  CDS Start-End: 550-1590
aatgacaaaaaaccagtcattagaggggcagggcaattttaggtttcttctttttagacatagcccctaactggaaattttcacccttcttgagaagggagcttgcactaacatctacaatggcttctaaaaagcacagatgacctgctacacttcctgacttgcttgctattggttggcactgttcataaatataatttgctctttcacttttctttgaaatgagcaacctgaattactcggaggagaaaggcaggagagatagaggcagcagaagccagggcagctgaaagacagagaccttcagtctgaaccaacaacaagcaaagttaaattatggatatccaagggagtctatagaaggtccatgcaagacattttgactacttgtctgaactagatatcccttgaatgtgcacacaaaaagtgaatgggtcatttgataagggaaaactaggttccaagatggctgaataggaagagctccaatctgcagatcccagtgtgagcaacgtggaagacgggtgatttctgcatttccaactgagcatggagagaaaatttatgtccttgcaaccatccatctccgtatcagaaatggaaccaaatggcaccttcagcaataacaacagcaggaactgcacaattgaaaacttcaagagagaatttttcccaattgtatatctgataatatttttctggggagtcttgggaaatgggttgtccatatatgttttcctgcagccttataagaagtccacatctgtgaacgttttcatgctaaatctggccatttcagatctcctgttcataagcacgcttcccttcagggctgactattatcttagaggctccaattggatatttggagacctggcctgcaggattatgtcttattccttgtatgtcaacatgtacagcagtatttatttcctgaccgtgctgagtgttgtgcgtttcctggcaatggttcacccctttcggcttctgcatgtcaccagcatcaggagtgcctggatcctctgtgggatcatatggatccttatcatggcttcctcaataatgctcctggacagtggctctgagcagaacggcagtgtcacatcatgcttagagctgaatctctataaaattgctaagctgcagaccatgaactatattgccttggtggtgggctgcctgctgccatttttcacactcagcatctgttatctgctgatcattcgggttctgttaaaagtggaggtcccagaatcggggctgcgggtttctcacaggaaggcactgaccaccatcatcatcaccttgatcatcttcttcttgtgtttcctgccctatcacacactgaggaccgtccacttgacgacatggaaagtgggtttatgcaaagacagactgcataaagctttggttatcacactggccttggcagcagccaatgcctgcttcaatcctctgctctattactttgctggggagaattttaaggacagactaaagtctgcactcagaaaaggccatccacagaaggcaaagacaaagtgtgttttccctgttagtgtgtggttgagaaaggaaacaagagtataaggagctcttagatgagacctgttcttgtatccttgtgtccatcttcattcactcatagtctccaaatgactttgtatttacatcactcccaacaaatgttgattcttaatatttagttgaccattacttttgttaataagacctacttcaaaaattttattcagtgtattttcagttgttgagtcttaatgagggatacaggaggaaaaatccctactagagtcctgtgggctgaaatatcagactgggaaaaaatgcaaagcacattggatcctacttttcttcagatattgaaccagatctctggcccatcaggct

SEQ ID NO: 124078 - DNA, 727 bp, Homo sapiens
  Payload ID: 4364
  Gene Symbol: CYSLTR2
  Gene Name: cysteinyl leukotriene receptor 2
  ENST ID: ENST00000622559
  CDS Start-End: 684-727
attagaggggcagggcaattttaggtttcttctttttagacatagcccctaactggaaattttcacccttcttgagaagggagcttgcactaacatctacaatggcttctaaaaagcacagatgacctgctacacttcctgacttgcttgctattggttggcactgttcataaatataatttgctctttcacttttctttgaaatgagcaacctgaattactcggaggagaaaggcaggagagatagaggcagcagaagccagggcagctgaaagacagagaccttcagtctgaaccaacaacaagcaaagttaaattatggatatccaagggagtctatagaaggtccatgcaaggtatggagagttcctcaacagagacattttgactacttgtctgaactagatatcccttgaatgtgcacacaaaaagtgaatgggtcatttgataagagcccaagaccaccagaaaccctcctgtaatggaacaagttggctttattactaattgcaacaaggcttttgaaagccttctgtcatcttcctggggatcacctcttcaggtgtacagagacagcatagggaaaactaggttccaagatggctgaataggaagagctccaatctgcagatcccagtgtgagcaacgtggaagacgggtgatttctgcatttccaactgagcatggagagaaaatttatgtccttgcaaccatccatctccgtatc

SEQ ID NO: 124079 - DNA, 334 bp, Homo sapiens
  Payload ID: 4364
  Gene Symbol: CYSLTR2
  Gene Name: cysteinyl leukotriene receptor 2
  ENST ID: ENST00000621321
  CDS Start-End: 291-334
attagaggggcagggcaattttaggtttcttctttttagacatagcccctaactggaaattttcacccttcttgagaagggagcttgcactaacatctacaatggcttctaaaaagcacagatgacctgctacacttcctgacttgcttgctattggttggcactgttcataaatataatttgctctttcacttttctttgaaatgagcaacctgaattactcggaggagaaaggcaggagagatagaggcagcagaagccagggcagctgaaagacagagaccttcagcatggagagaaaatttatgtccttgcaaccatccatctccgtatc

SEQ ID NO: 124080 - DNA, 704 bp, Homo sapiens
  Payload ID: 4364
  Gene Symbol: CYSLTR2
  Gene Name: cysteinyl leukotriene receptor 2
  ENST ID: ENST00000617562
  CDS Start-End: 661-704
attagaggggcagggcaattttaggtttcttctttttagacatagcccctaactggaaattttcacccttcttgagaagggagcttgcactaacatctacaatggcttctaaaaagcacagatgacctgctacacttcctgacttgcttgctattggttggcactgttcataaatataatttgctctttcacttttctttgaaatgagcaacctgaattactcggaggagaaaggcaggagagatagaggcagcagaagccagggcagctgaaagacagagaccttcagtctgaaccaacaacaagcaaagttaaattatggatatccaagggagtctatagaaggtccatgcaagacattttgactacttgtctgaactagatatcccttgaatgtgcacacaaaaagtgaatgggtcatttgataagagcccaagaccaccagaaaccctcctgtaatggaacaagttggctttattactaattgcaacaaggcttttgaaagccttctgtcatcttcctggggatcacctcttcaggtgtacagagacagcatagggaaaactaggttccaagatggctgaataggaagagctccaatctgcagatcccagtgtgagcaacgtggaagacgggtgatttctgcatttccaactgagcatggagagaaaatttatgtccttgcaaccatccatctccgtatc

SEQ ID NO: 124081 - DNA, 2491 bp, Homo sapiens
  Payload ID: 4365
  Gene Symbol: CARS
  Gene Name: cysteinyl-tRNA synthetase
  Uniprot ID: P49589
  ENST ID: ENST00000278224
  CDS Start-End: 52-2232
agattctaggaagtgtctgtagccgcagctgcgggtccgggattcccagccatggcagattcctccgggcagcagggcaaaggccggcgtgtgcagccccagtggtcccctcctgctgggacccagccatgcagactccacctttacaacagcctcaccaggaacaaggaagtgttcatacctcaagatgggaaaaaggtgacgtggtattgctgtgggccaaccgtctatgacgcatctcacatggggcacgccaggtcctacatctcttttgatatcttgagaagagtgttgaaggattacttcaaatttgatgtcttttattgcatgaacattacggatattgatgacaagatcatcaagagggcccggcagaaccacctgttcgagcagtatcgggagaagaggcctgaagcggcacagctcttggaggatgttcaggccgccctgaagccattttcagtaaaattaaatgagaccacggatcccgataaaaagcagatgctcgaacggattcagcacgcagtgcagcttgccacagagccacttgagaaagctgtgcagtccagactcacgggagaggaagtcaacagctgtgtggaggtgttgctggaagaagccaaggatttgctctctgactggctggattctacacttggctgtgatgtcactgacaattccatcttctccaagctgcccaagttctgggagggggacttccacagagacatggaagctctgaatgttctccctccagatgtcttaacccgggttagtgagtatgtgccagaaattgtgaactttgtccagaagattgtggacaacggttacggctatgtctccaatgggtctgtctactttgatacagcgaagtttgcttctagcgagaagcactcctatgggaagctggtgcctgaggccgttggagatcagaaagcccttcaagaaggggaaggtgacctgagcatctctgcagaccgcctgagtgagaagcgctctcccaacgactttgccttatggaaggcctctaagcccggagaaccgtcctggccgtgcccttggggaaagggtcgtccgggctggcatatcgagtgctcggccatggcaggcaccctcctaggggcttcgatggacattcacggaggtgggttcgacctccggttcccccaccatgacaatgagctggcacagtcggaggcctactttgaaaacgactgctgggtcaggtacttcctgcacacaggccacctgaccattgcaggctgcaaaatgtcaaagtcactaaaaaacttcatcaccattaaagatgccttgaaaaagcactcagcacggcagttgcggctggccttcctcatgcactcgtggaaggacaccctggactactccagcaacaccatggagtcagcgcttcaatatgagaagttcttgaatgagtttttcttaaatgtgaaagatatccttcgcgctcctgttgacatcactggtcagtttgagaagtggggagaagaagaagcagaactgaataagaacttttatgacaagaagacagcaattcacaaagccctctgtgacaatgttgacacccgcaccgtcatggaagagatgcgggccttggtcagtcagtgcaacctctatatggcagcccggaaagccgtgaggaagaggcccaaccaggctctgctggagaacatcgccctgtacctcacccatatgctgaagatctttggggccgtagaagaggacagctccctgggattcccggtcggagggcctggaaccagcctcagtctcgaggccacagtcatgccctaccttcaggtgttatcagaattccgagaaggagtgcggaagattgcccgagagcaaaaagtccctgagattctgcagctcagcgatgccctgcgggacaacatcctgcccgagcttggggtgcggtttgaagaccacgaaggactgcccacagtggtgaaactggtagacagaaacaccttattaaaagagagagaagaaaagagacgggttgaagaggagaagaggaagaagaaagaggaggcggcccggaggaaacaggaacaagaagcagcaaagctggccaagatgaagattccccccagtgagatgttcttgtcagaaaccgacaaatactccaagtttgatgaaaatgtaagcatggtctgcccacacatgacatggagggcaaagagctcagcaaagggcaagccaagaagctgaagaagctcttcgaggctcaggagaagctctacaaggaatatctgcagatggcccagaatggaagcttccagtgagggggcacaggactgactttttaaaccattgtggactagtggctgctgtctgcctcagtgacaatgtcccagcgctcctatcatgtttacagtcacccttgggtcctaaattaagagttgtgttcatgtaggttcgtgtcgtcgttggctctgagacattgataataaatttttctcaacagtga

SEQ ID NO: 124082 - DNA, 2758 bp, Homo sapiens
  Payload ID: 4365
  Gene Symbol: CARS
  Gene Name: cysteinyl-tRNA synthetase
  Uniprot ID: P49589
  ENST ID: ENST00000380525
  CDS Start-End: 71-2566
ccggggcggcggttgcatcagattctaggaagtgtctgtagccgcagctgcgggtccgggattcccagccatggcagattcctccgggcagcaggctcctgactacaggtccattctgagcattagtgacgaggcagccagggcacaagccctgaacgagcacctcagcacgcgtagctatgtccaggggtactcactgtcccaggcagacgtggacgcgttcaggcagctctcggccccgcccgctgacccccagctcttccacgtggctcggtggttcaggcacatagaagcgctcctgggtagcccctgtggcaaaggccagccctgcaggctccaagcaagcaaaggccggcgtgtgcagccccagtggtcccctcctgctgggacccagccatgcagactccacctttacaacagcctcaccaggaacaaggaagtgttcatacctcaagatgggaaaaaggtgacgtggtattgctgtgggccaaccgtctatgacgcatctcacatggggcacgccaggtcctacatctcttttgatatcttgagaagagtgttgaaggattacttcaaatttgatgtcttttattgcatgaacattacggatattgatgacaagatcatcaagagggcccggcagaaccacctgttcgagcagtatcgggagaagaggcctgaagcggcacagctcttggaggatgttcaggccgccctgaagccattttcagtaaaattaaatgagaccacggatcccgataaaaagcagatgctcgaacggattcagcacgcagtgcagcttgccacagagccacttgagaaagctgtgcagtccagactcacgggagaggaagtcaacagctgtgtggaggtgttgctggaagaagccaaggatttgctctctgactggctggattctacacttggctgtgatgtcactgacaattccatcttctccaagctgcccaagttctgggagggggacttccacagagacatggaagctctgaatgttctccctccagatgtcttaacccgggttagtgagtatgtgccagaaattgtgaactttgtccagaagattgtggacaacggttacggctatgtctccaatgggtctgtctactttgatacagcgaagtttgcttctagcgagaagcactcctatgggaagctggtgcctgaggccgttggagatcagaaagcccttcaagaaggggaaggtgacctgagcatctctgcagaccgcctgagtgagaagcgctctcccaacgactttgccttatggaaggcctctaagcccggagaaccgtcctggccgtgcccttggggaaagggtcgtccgggctggcatatcgagtgctcggccatggcaggcaccctcctaggggcttcgatggacattcacggaggtgggttcgacctccggttcccccaccatgacaatgagctggcacagtcggaggcctactttgaaaacgactgctgggtcaggtacttcctgcacacaggccacctgaccattgcaggctgcaaaatgtcaaagtcactaaaaaacttcatcaccattaaagatgccttgaaaaagcactcagcacggcagttgcggctggccttcctcatgcactcgtggaaggacaccctggactactccagcaacaccatggagtcagcgcttcaatatgagaagttcttgaatgagtttttcttaaatgtgaaagatatccttcgcgctcctgttgacatcactggtcagtttgagaagtggggagaagaagaagcagaactgaataagaacttttatgacaagaagacagcaattcacaaagccctctgtgacaatgttgacacccgcaccgtcatggaagagatgcgggccttggtcagtcagtgcaacctctatatggcagcccggaaagccgtgaggaagaggcccaaccaggctctgctggagaacatcgccctgtacctcacccatatgctgaagatctttggggccgtagaagaggacagctccctgggattcccggtcggagggcctggaaccagcctcagtctcgaggccacagtcatgccctaccttcaggtgttatcagaattccgagaaggagtgcggaagattgcccgagagcaaaaagtccctgagattctgcagctcagcgatgccctgcgggacaacatcctgcccgagcttggggtgcggtttgaagaccacgaaggactgcccacagtggtgaaactggtagacagaaacaccttattaaaagagagagaagaaaagagacgggttgaagaggagaagaggaagaagaaagaggaggcggcccggaggaaacaggaacaagaagcagcaaagctggccaagatgaagattccccccagtgagatgttcttgtcagaaaccgacaaatactccaagtttgatgaaaatggtctgcccacacatgacatggagggcaaagagctcagcaaagggcaagccaagaagctgaagaagctcttcgaggctcaggagaagctctacaaggaatatctgcagatggcccagaatggaagcttccagtgagggggcacaggactgactttttaaaccattgtggactagtggctgctgtctgcctcagtgacaatgtcccagcgctcctatcatgtttacagtcacccttgggtcctaaattaagagttgtgttcatgtaggttcgtgtcgtcgttggctctgagacattgataataaatttttctcaacagtgagaccctc

SEQ ID NO: 124083 - DNA, 2685 bp, Homo sapiens
  Payload ID: 4365
  Gene Symbol: CARS
  Gene Name: cysteinyl-tRNA synthetase
  Uniprot ID: P49589
  ENST ID: ENST00000397111
  CDS Start-End: 247-2493
gactactcccagcacggccactgaacgcttggccgcgcgatgctccggagcgcgggtcgccattgggttgaactacagctcccagcatgctccgggccggcgacatccggagcccctggtagttgcctagcgaccgggcgtgtcccggaagacgggcccggcgtggggcgcgacttccggggcggcggttgcatcagattctaggaagtgtctgtagccgcagctgcgggtccgggattcccagccatggcagattcctccgggcagcagggcaaaggccggcgtgtgcagccccagtggtcccctcctgctgggacccagccatgcagactccacctttacaacagcctcaccaggaacaaggaagtgttcatacctcaagatgggaaaaaggtgacgtggtattgctgtgggccaaccgtctatgacgcatctcacatggggcacgccaggtcctacatctcttttgatatcttgagaagagtgttgaaggattacttcaaatttgatgtcttttattgcatgaacattacggatattgatgacaagatcatcaagagggcccggcagaaccacctgttcgagcagtatcgggagaagaggcctgaagcggcacagctcttggaggatgttcaggccgccctgaagccattttcagtaaaattaaatgagaccacggatcccgataaaaagcagatgctcgaacggattcagcacgcagtgcagcttgccacagagccacttgagaaagctgtgcagtccagactcacgggagaggaagtcaacagctgtgtggaggtgttgctggaagaagccaaggatttgctctctgactggctggattctacacttggctgtgatgtcactgacaattccatcttctccaagctgcccaagttctgggagggggacttccacagagacatggaagctctgaatgttctccctccagatgtcttaacccgggttagtgagtatgtgccagaaattgtgaactttgtccagaagattgtggacaacggttacggctatgtctccaatgggtctgtctactttgatacagcgaagtttgcttctagcgagaagcactcctatgggaagctggtgcctgaggccgttggagatcagaaagcccttcaagaaggggaaggtgacctgagcatctctgcagaccgcctgagtgagaagcgctctcccaacgactttgccttatggaaggcctctaagcccggagaaccgtcctggccgtgcccttggggaaagggtcgtccgggctggcatatcgagtgctcggccatggcaggcaccctcctaggggcttcgatggacattcacggaggtgggttcgacctccggttcccccaccatgacaatgagctggcacagtcggaggcctactttgaaaacgactgctgggtcaggtacttcctgcacacaggccacctgaccattgcaggctgcaaaatgtcaaagtcactaaaaaacttcatcaccattaaagatgccttgaaaaagcactcagcacggcagttgcggctggccttcctcatgcactcgtggaaggacaccctggactactccagcaacaccatggagtcagcgcttcaatatgagaagttcttgaatgagtttttcttaaatgtgaaagatatccttcgcgctcctgttgacatcactggtcagtttgagaagtggggagaagaagaagcagaactgaataagaacttttatgacaagaagacagcaattcacaaagccctctgtgacaatgttgacacccgcaccgtcatggaagagatgcgggccttggtcagtcagtgcaacctctatatggcagcccggaaagccgtgaggaagaggcccaaccaggctctgctggagaacatcgccctgtacctcacccatatgctgaagatctttggggccgtagaagaggacagctccctgggattcccggtcggagggcctggaaccagcctcagtctcgaggccacagtcatgccctaccttcaggtgttatcagaattccgagaaggagtgcggaagattgcccgagagcaaaaagtccctgagattctgcagctcagcgatgccctgcgggacaacatcctgcccgagcttggggtgcggtttgaagaccacgaaggactgcccacagtggtgaaactggtagacagaaacaccttattaaaagagagagaagaaaagagacgggttgaagaggagaagaggaagaagaaagaggaggcggcccggaggaaacaggaacaagaagcagcaaagctggccaagatgaagattccccccagtgagatgttcttgtcagaaaccgacaaatactccaagtttgatgaaaatggtctgcccacacatgacatggagggcaaagagctcagcaaagggcaagccaagaagctgaagaagctcttcgaggctcaggagaagctctacaaggaatatctgcagatggcccagaatggaagcttccagtgagggggcacaggactgactttttaaaccattgtggactagtggctgctgtctgcctcagtgacaatgtcccagcgctcctatcatgtttacagtcacccttgggtcctaaattaagagttgtgttcatgtaggttcgtgtcgtcgttggctctgagacattgataataaatttttctcaacagtgagaccctc

SEQ ID NO: 124084 - DNA, 1021 bp, Homo sapiens
  Payload ID: 4365
  Gene Symbol: CARS
  Gene Name: cysteinyl-tRNA synthetase
  ENST ID: ENST00000439280
  CDS Start-End: 63-200
gcggttgcatcagattctaggaagtgtctgtagccgcagctgcgggtccgggattcccagccatggcagattcctccgggcagcagggcaaaggccggcgtgtgcagccccagtggtcccctcctgctgggacccagccatgcagactccacctttacaacagcctcaccaggaacaagtgtttcttgcatttcttgtgatcgtcattccttcattcctaacaaaggaagtgttcatacctcaagatgggaaaaaggtgacgtggtattgctgtgggccaaccgtctatgacgcatctcacatggggcacgccaggtcctacatctcttttgatatcttgagaagagtgttgaaggattacttcaaatttgatgtcttttattgcatgaacattacggatattgatgacaagatcatcaagagggcccggcagaaccacctgttcgagcagtatcgggagaagaggcctgaagcggcacagctcttggaggatgttcaggccgccctgaagccattttcagtaaaattaaatgagaccacggatcccgataaaaagcagatgctcgaacggattcagcacgcagtgcagcttgccacagagccacttgagaaagctgtgcagtccagactcacgggagaggaagtcaacagctgtgtggaggtgttgctggaagaagccaaggatttgctctctgactggctggattctacacttggctgtgatgtcactgacaattccatcttctccaagctgcccaagttctgggagggggacttccacagagacatggaagctctgaatgtaagtgtcacgattgtcttgtgctggctctcttgcgctaagggccctgatttctaaattcctgttttggcaaggccagctcaattaagcggccaagtcaacattgaacttgagttgaggggcataatgggcttttcgttttatgaattgggaacgtttttatggagcgcgtggttttcagaagggaaaatcccaggacattctcatgtcttgcacagg

SEQ ID NO: 124085 - DNA, 2805 bp, Homo sapiens
  Payload ID: 4365
  Gene Symbol: CARS
  Gene Name: cysteinyl-tRNA synthetase
  ENST ID: ENST00000531387
  CDS Start-End: 71-457
ccggggcggcggttgcatcagattctaggaagtgtctgtagccgcagctgcgggtccgggattcccagccatggcagattcctccgggcagcaggctcctgactacaggtccattctgagcattagtgacgaggcagccagggcacaagccctgaacgagcacctcagcacgcgtagctatgtccaggggtactcactgtcccaggcagacgtggacgcgttcaggcagctctcggccccgcccgctgacccccagctcttccacgtggctcggtggttcaggcacatagaagcgctcctgggtagcccctgtggcaaaggccagccctgcaggctccaagcaagcaaaggccggcgtgtgcagccccagtggtcccctcctgctgggacccagccatgcagactccacctttacaacagcctcaccaggaacaagtgtttcttgcatttcttgtgatcgtcattccttcattcctaacaaaggaagtgttcatacctcaagatgggaaaaaggtgacgtggtattgctgtgggccaaccgtctatgacgcatctcacatggggcacgccaggtcctacatctcttttgatatcttgagaagagtgttgaaggattacttcaaatttgatgtcttttattgcatgaacattacggatattgatgacaagatcatcaagagggcccggcagaaccacctgttcgagcagtatcgggagaagaggcctgaagcggcacagctcttggaggatgttcaggccgccctgaagccattttcagtaaaattaaatgagaccacggatcccgataaaaagcagatgctcgaacggattcagcacgcagtgcagcttgccacagagccacttgagaaagctgtgcagtccagactcacgggagaggaagtcaacagctgtgtggaggtgttgctggaagaagccaaggatttgctctctgactggctggattctacacttggctgtgatgtcactgacaattccatcttctccaagctgcccaagttctgggagggggacttccacagagacatggaagctctgaatgttctccctccagatgtcttaacccgggttagtgagtatgtgccagaaattgtgaactttgtccagaagattgtggacaacggttacggctatgtctccaatgggtctgtctactttgatacagcgaagtttgcttctagcgagaagcactcctatgggaagctggtgcctgaggccgttggagatcagaaagcccttcaagaaggggaaggtgacctgagcatctctgcagaccgcctgagtgagaagcgctctcccaacgactttgccttatggaaggcctctaagcccggagaaccgtcctggccgtgcccttggggaaagggtcgtccgggctggcatatcgagtgctcggccatggcaggcaccctcctaggggcttcgatggacattcacggaggtgggttcgacctccggttcccccaccatgacaatgagctggcacagtcggaggcctactttgaaaacgactgctgggtcaggtacttcctgcacacaggccacctgaccattgcaggctgcaaaatgtcaaagtcactaaaaaacttcatcaccattaaagatgccttgaaaaagcactcagcacggcagttgcggctggccttcctcatgcactcgtggaaggacaccctggactactccagcaacaccatggagtcagcgcttcaatatgagaagttcttgaatgagtttttcttaaatgtgaaagatatccttcgcgctcctgttgacatcactggtcagtttgagaagtggggagaagaagaagcagaactgaataagaacttttatgacaagaagacagcaattcacaaagccctctgtgacaatgttgacacccgcaccgtcatggaagagatgcgggccttggtcagtcagtgcaacctctatatggcagcccggaaagccgtgaggaagaggcccaaccaggctctgctggagaacatcgccctgtacctcacccatatgctgaagatctttggggccgtagaagaggacagctccctgggattcccggtcggagggcctggaaccagcctcagtctcgaggccacagtcatgccctaccttcaggtgttatcagaattccgagaaggagtgcggaagattgcccgagagcaaaaagtccctgagattctgcagctcagcgatgccctgcgggacaacatcctgcccgagcttggggtgcggtttgaagaccacgaaggactgcccacagtggtgaaactggtagacagaaacaccttattaaaagagagagaagaaaagagacgggttgaagaggagaagaggaagaagaaagaggaggcggcccggaggaaacaggaacaagaagcagcaaagctggccaagatgaagattccccccagtgagatgttcttgtcagaaaccgacaaatactccaagtttgatgaaaatggtctgcccacacatgacatggagggcaaagagctcagcaaagggcaagccaagaagctgaagaagctcttcgaggctcaggagaagctctacaaggaatatctgcagatggcccagaatggaagcttccagtgagggggcacaggactgactttttaaaccattgtggactagtggctgctgtctgcctcagtgacaatgtcccagcgctcctatcatgtttacagtcacccttgggtcctaaattaagagttgtgttcatgtaggttcgtgtcgtcgttggctctgagacattgataataaatttttctcaacagtgagaccctc

SEQ ID NO: 124086 - DNA, 2637 bp, Homo sapiens
  Payload ID: 4365
  Gene Symbol: CARS
  Gene Name: cysteinyl-tRNA synthetase
  ENST ID: ENST00000529772
  CDS Start-End: 160-2379
ctgtagccgcagctgcgggtccgggattcccagccatggcagattcctccgggcagcaggcttttcctttgcggtcttgaaggtgcataggcttggtgcctgtccaagagcctgattatttcagaaggatgagtttcatttctgaggtttctggggtagatggagcctacctcagggcctttccgcacagacttgggataccacttggtcggctgctcatcaggcaaaggccggcgtgtgcagccccagtggtcccctcctgctgggacccagccatgcagactccacctttacaacagcctcaccaggaacaaggaagtgttcatacctcaagatgggaaaaaggtgacgtggtattgctgtgggccaaccgtctatgacgcatctcacatggggcacgccaggtcctacatctcttttgatatcttgagaagagtgttgaaggattacttcaaatttgatgtcttttattgcatgaacattacggatattgatgacaagatcatcaagagggcccggcagaaccacctgttcgagcagtatcgggagaagaggcctgaagcggcacagctcttggaggatgttcaggccgccctgaagccattttcagtaaaattaaatgagaccacggatcccgataaaaagcagatgctcgaacggattcagcacgcagtgcagcttgccacagagccacttgagaaagctgtgcagtccagactcacgggagaggaagtcaacagctgtgtggaggtgttgctggaagaagccaaggatttgctctctgactggctggattctacacttggctgtgatgtcactgacaattccatcttctccaagctgcccaagttctgggagggggacttccacagagacatggaagctctgaatgttctccctccagatgtcttaacccgggttagtgagtatgtgccagaaattgtgaactttgtccagaagattgtggacaacggttacggctatgtctccaatgggtctgtctactttgatacagcgaagtttgcttctagcgagaagcactcctatgggaagctggtgcctgaggccgttggagatcagaaagcccttcaagaaggggaaggtgacctgagcatctctgcagaccgcctgagtgagaagcgctctcccaacgactttgccttatggaaggcctctaagcccggagaaccgtcctggccgtgcccttggggaaagggtcgtccgggctggcatatcgagtgctcggccatggcaggcaccctcctaggggcttcgatggacattcacggaggtgggttcgacctccggttcccccaccatgacaatgagctggcacagtcggaggcctactttgaaaacgactgctgggtcaggtacttcctgcacacaggccacctgaccattgcaggctgcaaaatgtcaaagtcactaaaaaacttcatcaccattaaagatgccttgaaaaagcactcagcacggcagttgcggctggccttcctcatgcactcgtggaaggacaccctggactactccagcaacaccatggagtcagcgcttcaatatgagaagttcttgaatgagtttttcttaaatgtgaaagatatccttcgcgctcctgttgacatcactggtcagtttgagaagtggggagaagaagaagcagaactgaataagaacttttatgacaagaagacagcaattcacaaagccctctgtgacaatgttgacacccgcaccgtcatggaagagatgcgggccttggtcagtcagtgcaacctctatatggcagcccggaaagccgtgaggaagaggcccaaccaggctctgctggagaacatcgccctgtacctcacccatatgctgaagatctttggggccgtagaagaggacagctccctgggattcccggtcggagggcctggaaccagcctcagtctcgaggccacagtcatgccctaccttcaggtgttatcagaattccgagaaggagtgcggaagattgcccgagagcaaaaagtccctgagattctgcagctcagcgatgccctgcgggacaacatcctgcccgagcttggggtgcggtttgaagaccacgaaggactgcccacagtggtgaaactggtagacagaaacaccttattaaaagagagagaagaaaagagacgggttgaagaggagaagaggaagaagaaagaggaggcggcccggaggaaacaggaacaagaagcagcaaagctggccaagatgaagattccccccagtgagatgttcttgtcagaaaccgacaaatactccaagtttgatgaaaatgtaagcatggtctgcccacacatgacatggagggcaaagagctcagcaaagggcaagccaagaagctgaagaagctcttcgaggctcaggagaagctctacaaggaatatctgcagatggcccagaatggaagcttccagtgagggggcacaggactgactttttaaaccattgtggactagtggctgctgtctgcctcagtgacaatgtcccagcgctcctatcatgtttacagtcacccttgggtcctaaattaagagttgtgttcatgtaggttcgtgtcgtcgttggctctgagacattgataataaatttttctcaacagtg

SEQ ID NO: 124087 - DNA, 564 bp, Homo sapiens
  Payload ID: 4365
  Gene Symbol: CARS
  Gene Name: cysteinyl-tRNA synthetase
  ENST ID: ENST00000527330
  CDS Start-End: 50-280
attctaggaagtgtctgtagccgcagctgcgggtccgggattcccagccatggcagattcctccgggcagcagggcaaaggccggcgtgtgcagccccagtggtcccctcctgctgggacccagccatgcagactccacctttacaacagcctcaccaggaacaaggaagtgttcatacctcaagatgggaaaaaggtgacgtggtattgctgtgggccaaccgtctatgacgcatctcacatggggcacgccagctctcgtggggtccccagatgctgagttcccgtgacactcagacctgacaggcctgacgctgggttggctgtgaccgccccccgaccactggatggtcatggctgtagctcctgacgagtagctggctgttggggtcctacatctcttttgatatcttgagaagagtgttgaaggattacttcaaatttgatgtcttttattgcatgaacattacggatattgatgacaagatcatcaagagggcccggcagaaccacctgttcgagcagtatcgggagaagaggcctgaagcggcacagctcttggag

SEQ ID NO: 124088 - DNA, 2758 bp, Homo sapiens
  Payload ID: 4365
  Gene Symbol: CARS
  Gene Name: cysteinyl-tRNA synthetase
  Uniprot ID: P49589
  ENST ID: ENST00000612826
  CDS Start-End: 71-2566
ccggggcggcggttgcatcagattctaggaagtgtctgtagccgcagctgcgggtccgggattcccagccatggcagattcctccgggcagcaggctcctgactacaggtccattctgagcattagtgacgaggcagccagggcacaagccctgaacgagcacctcagcacgcgtagctatgtccaggggtactcactgtcccaggcagacgtggacgcgttcaggcagctctcggccccgcccgctgacccccagctcttccacgtggctcggtggttcaggcacatagaagcgctcctgggtagcccctgtggcaaaggccagccctgcaggctccaagcaagcaaaggccggcgtgtgcagccccagtggtcccctcctgctgggacccagccatgcagactccacctttacaacagcctcaccaggaacaaggaagtgttcatacctcaagatgggaaaaaggtgacgtggtattgctgtgggccaaccgtctatgacgcatctcacatggggcacgccaggtcctacatctcttttgatatcttgagaagagtgttgaaggattacttcaaatttgatgtcttttattgcatgaacattacggatattgatgacaagatcatcaagagggcccggcagaaccacctgttcgagcagtatcgggagaagaggcctgaagcggcacagctcttggaggatgttcaggccgccctgaagccattttcagtaaaattaaatgagaccacggatcccgataaaaagcagatgctcgaacggattcagcacgcagtgcagcttgccacagagccacttgagaaagctgtgcagtccagactcacgggagaggaagtcaacagctgtgtggaggtgttgctggaagaagccaaggatttgctctctgactggctggattctacacttggctgtgatgtcactgacaattccatcttctccaagctgcccaagttctgggagggggacttccacagagacatggaagctctgaatgttctccctccagatgtcttaacccgggttagtgagtatgtgccagaaattgtgaactttgtccagaagattgtggacaacggttacggctatgtctccaatgggtctgtctactttgatacagcgaagtttgcttctagcgagaagcactcctatgggaagctggtgcctgaggccgttggagatcagaaagcccttcaagaaggggaaggtgacctgagcatctctgcagaccgcctgagtgagaagcgctctcccaacgactttgccttatggaaggcctctaagcccggagaaccgtcctggccgtgcccttggggaaagggtcgtccgggctggcatatcgagtgctcggccatggcaggcaccctcctaggggcttcgatggacattcacggaggtgggttcgacctccggttcccccaccatgacaatgagctggcacagtcggaggcctactttgaaaacgactgctgggtcaggtacttcctgcacacaggccacctgaccattgcaggctgcaaaatgtcaaagtcactaaaaaacttcatcaccattaaagatgccttgaaaaagcactcagcacggcagttgcggctggccttcctcatgcactcgtggaaggacaccctggactactccagcaacaccatggagtcagcgcttcaatatgagaagttcttgaatgagtttttcttaaatgtgaaagatatccttcgcgctcctgttgacatcactggtcagtttgagaagtggggagaagaagaagcagaactgaataagaacttttatgacaagaagacagcaattcacaaagccctctgtgacaatgttgacacccgcaccgtcatggaagagatgcgggccttggtcagtcagtgcaacctctatatggcagcccggaaagccgtgaggaagaggcccaaccaggctctgctggagaacatcgccctgtacctcacccatatgctgaagatctttggggccgtagaagaggacagctccctgggattcccggtcggagggcctggaaccagcctcagtctcgaggccacagtcatgccctaccttcaggtgttatcagaattccgagaaggagtgcggaagattgcccgagagcaaaaagtccctgagattctgcagctcagcgatgccctgcgggacaacatcctgcctgagcttggggtgcggtttgaagaccacgaaggactgcccacagtggtgaaactggtagacagaaacaccttattaaaagagagagaagaaaagagacgggttgaagaggagaagaggaagaagaaagaggaggcggcccggaggaaacaggaacaagaagcagcaaagctggccaagatgaagattccccccagtgagatgttcttgtcagaaaccgacaaatactccaagtttgatgaaaatggtctgcccacacatgacatggagggcaaagagctcagcaaagggcaagccaagaagctgaagaagctcttcgaggctcaggagaagctctacaaggaatatctgcagatggcccagaatggaagcttccagtgagggggcacaggactgactttttaaaccattgtggactagtggctgctgtctgcctcagtgacaatgtcccagcgctcctatcatgtttacagtcacccttgggtcctaaattaagagttgtgttcatgtaggttcgtgtcgtcgttggctctgagacattgataataaatttttctcaacagtgagaccctc

SEQ ID NO: 124089 - DNA, 564 bp, Homo sapiens
  Payload ID: 4365
  Gene Symbol: CARS
  Gene Name: cysteinyl-tRNA synthetase
  ENST ID: ENST00000626648
  CDS Start-End: 50-280
attctaggaagtgtctgtagccgcagctgcgggtccgggattcccagccatggcagattcctccgggcagcagggcaaaggccggcgtgtgcagccccagtggtcccctcctgctgggacccagccatgcagactccacctttacaacagcctcaccaggaacaaggaagtgttcatacctcaagatgggaaaaaggtgacgtggtattgctgtgggccaaccgtctatgacgcatctcacatggggcacgccagctctcgtggggtccccagatgctgagttcccatgacactcagacctgacaggcctgacgctgggttggctgtgaccgccccccgaccactggatggtcatggctgtagctcctgacgagtagctggctgttggggtcctacatctcttttgatatcttgagaagagtgttgaaggattacttcaaatttgatgtcttttattgcatgaacattacggatattgatgacaagatcatcaagagggcccggcagaaccacctgttcgagcagtatcgggagaagaggcctgaagcggcacagctcttggag

SEQ ID NO: 124090 - DNA, 2491 bp, Homo sapiens
  Payload ID: 4365
  Gene Symbol: CARS
  Gene Name: cysteinyl-tRNA synthetase
  Uniprot ID: P49589
  ENST ID: ENST00000632612
  CDS Start-End: 52-2232
agattctaggaagtgtctgtagccgcagctgcgggtccgggattcccagccatggcagattcctccgggcagcagggcaaaggccggcgtgtgcagccccagtggtcccctcctgctgggacccagccatgcagactccacctttacaacagcctcaccaggaacaaggaagtgttcatacctcaagatgggaaaaaggtgacgtggtattgctgtgggccaaccgtctatgacgcatctcacatggggcacgccaggtcctacatctcttttgatatcttgagaagagtgttgaaggattacttcaaatttgatgtcttttattgcatgaacattacggatattgatgacaagatcatcaagagggcccggcagaaccacctgttcgagcagtatcgggagaagaggcctgaagcggcacagctcttggaggatgttcaggccgccctgaagccattttcagtaaaattaaatgagaccacggatcccgataaaaagcagatgctcgaacggattcagcacgcagtgcagcttgccacagagccacttgagaaagctgtgcagtccagactcacgggagaggaagtcaacagctgtgtggaggtgttgctggaagaagccaaggatttgctctctgactggctggattctacacttggctgtgatgtcactgacaattccatcttctccaagctgcccaagttctgggagggggacttccacagagacatggaagctctgaatgttctccctccagatgtcttaacccgggttagtgagtatgtgccagaaattgtgaactttgtccagaagattgtggacaacggttacggctatgtctccaatgggtctgtctactttgatacagcgaagtttgcttctagcgagaagcactcctatgggaagctggtgcctgaggccgttggagatcagaaagcccttcaagaaggggaaggtgacctgagcatctctgcagaccgcctgagtgagaagcgctctcccaacgactttgccttatggaaggcctctaagcccggagaaccgtcctggccgtgcccttggggaaagggtcgtccgggctggcatatcgagtgctcggccatggcaggcaccctcctaggggcttcgatggacattcacggaggtgggttcgacctccggttcccccaccatgacaatgagctggcacagtcggaggcctactttgaaaacgactgctgggtcaggtacttcctgcacacaggccacctgaccattgcaggctgcaaaatgtcaaagtcactaaaaaacttcatcaccattaaagatgccttgaaaaagcactcagcacggcagttgcggctggccttcctcatgcactcgtggaaggacaccctggactactccagcaacaccatggagtcagcgcttcaatatgagaagttcttgaatgagtttttcttaaatgtgaaagatatccttcgcgctcctgttgacatcactggtcagtttgagaagtggggagaagaagaagcagaactgaataagaacttttatgacaagaagacagcaattcacaaagccctctgtgacaatgttgacacccgcaccgtcatggaagagatgcgggccttggtcagtcagtgcaacctctatatggcagcccggaaagccgtgaggaagaggcccaaccaggctctgctggagaacatcgccctgtacctcacccatatgctgaagatctttggggccgtagaagaggacagctccctgggattcccggtcggagggcctggaaccagcctcagtctcgaggccacagtcatgccctaccttcaggtgttatcagaattccgagaaggagtgcggaagattgcccgagagcaaaaagtccctgagattctgcagctcagcgatgccctgcgggacaacatcctgcctgagcttggggtgcggtttgaagaccacgaaggactgcccacagtggtgaaactggtagacagaaacaccttattaaaagagagagaagaaaagagacgggttgaagaggagaagaggaagaagaaagaggaggcggcccggaggaaacaggaacaagaagcagcaaagctggccaagatgaagattccccccagtgagatgttcttgtcagaaaccgacaaatactccaagtttgatgaaaatgtaagcatggtctgcccacacatgacatggagggcaaagagctcagcaaagggcaagccaagaagctgaagaagctcttcgaggctcaggagaagctctacaaggaatatctgcagatggcccagaatggaagcttccagtgagggggcacaggactgactttttaaaccattgtggactagtggctgctgtctgcctcagtgacaatgtcccagcgctcctatcatgtttacagtcacccttgggtcctaaattaagagttgtgttcatgtaggttcgtgtcgtcgttggctctgagacattgataataaatttttctcaacagtga

SEQ ID NO: 124091 - DNA, 2637 bp, Homo sapiens
  Payload ID: 4365
  Gene Symbol: CARS
  Gene Name: cysteinyl-tRNA synthetase
  ENST ID: ENST00000633563
  CDS Start-End: 160-2379
ctgtagccgcagctgcgggtccgggattcccagccatggcagattcctccgggcagcaggcttttcctttgcagtcttgaaggtgcataggcttggtgcctgtccaagagcttgattatttcagaaggatgagtttcatttctgaggtttctggggtagatggagcctacctcagggcctttccgcacagacttgggataccacttggtcggctgctcatcaggcaaaggccggcgtgtgcagccccagtggtcccctcctgctgggacccagccatgcagactccacctttacaacagcctcaccaggaacaaggaagtgttcatacctcaagatgggaaaaaggtgacgtggtattgctgtgggccaaccgtctatgacgcatctcacatggggcacgccaggtcctacatctcttttgatatcttgagaagagtgttgaaggattacttcaaatttgatgtcttttattgcatgaacattacggatattgatgacaagatcatcaagagggcccggcagaaccacctgttcgagcagtatcgggagaagaggcctgaagcggcacagctcttggaggatgttcaggccgccctgaagccattttcagtaaaattaaatgagaccacggatcccgataaaaagcagatgctcgaacggattcagcacgcagtgcagcttgccacagagccacttgagaaagctgtgcagtccagactcacgggagaggaagtcaacagctgtgtggaggtgttgctggaagaagccaaggatttgctctctgactggctggattctacacttggctgtgatgtcactgacaattccatcttctccaagctgcccaagttctgggagggggacttccacagagacatggaagctctgaatgttctccctccagatgtcttaacccgggttagtgagtatgtgccagaaattgtgaactttgtccagaagattgtggacaacggttacggctatgtctccaatgggtctgtctactttgatacagcgaagtttgcttctagcgagaagcactcctatgggaagctggtgcctgaggccgttggagatcagaaagcccttcaagaaggggaaggtgacctgagcatctctgcagaccgcctgagtgagaagcgctctcccaacgactttgccttatggaaggcctctaagcccggagaaccgtcctggccgtgcccttggggaaagggtcgtccgggctggcatatcgagtgctcggccatggcaggcaccctcctaggggcttcgatggacattcacggaggtgggttcgacctccggttcccccaccatgacaatgagctggcacagtcggaggcctactttgaaaacgactgctgggtcaggtacttcctgcacacaggccacctgaccattgcaggctgcaaaatgtcaaagtcactaaaaaacttcatcaccattaaagatgccttgaaaaagcactcagcacggcagttgcggctggccttcctcatgcactcgtggaaggacaccctggactactccagcaacaccatggagtcagcgcttcaatatgagaagttcttgaatgagtttttcttaaatgtgaaagatatccttcgcgctcctgttgacatcactggtcagtttgagaagtggggagaagaagaagcagaactgaataagaacttttatgacaagaagacagcaattcacaaagccctctgtgacaatgttgacacccgcaccgtcatggaagagatgcgggccttggtcagtcagtgcaacctctatatggcagcccggaaagccgtgaggaagaggcccaaccaggctctgctggagaacatcgccctgtacctcacccatatgctgaagatctttggggccgtagaagaggacagctccctgggattcccggtcggagggcctggaaccagcctcagtctcgaggccacagtcatgccctaccttcaggtgttatcagaattccgagaaggagtgcggaagattgcccgagagcaaaaagtccctgagattctgcagctcagcgatgccctgcgggacaacatcctgcctgagcttggggtgcggtttgaagaccacgaaggactgcccacagtggtgaaactggtagacagaaacaccttattaaaagagagagaagaaaagagacgggttgaagaggagaagaggaagaagaaagaggaggcggcccggaggaaacaggaacaagaagcagcaaagctggccaagatgaagattccccccagtgagatgttcttgtcagaaaccgacaaatactccaagtttgatgaaaatgtaagcatggtctgcccacacatgacatggagggcaaagagctcagcaaagggcaagccaagaagctgaagaagctcttcgaggctcaggagaagctctacaaggaatatctgcagatggcccagaatggaagcttccagtgagggggcacaggactgactttttaaaccattgtggactagtggctgctgtctgcctcagtgacaatgtcccagcgctcctatcatgtttacagtcacccttgggtcctaaattaagagttgtgttcatgtaggttcgtgtcgtcgttggctctgagacattgataataaatttttctcaacagtg

SEQ ID NO: 124092 - DNA, 1021 bp, Homo sapiens; identical to SEQ ID NO: 124084
  Payload ID: 4365
  Gene Symbol: CARS
  Gene Name: cysteinyl-tRNA synthetase
  ENST ID: ENST00000632806
  CDS Start-End: 63-200

SEQ ID NO: 124093 - DNA, 2685 bp, Homo sapiens
  Payload ID: 4365
  Gene Symbol: CARS
  Gene Name: cysteinyl-tRNA synthetase
  Uniprot ID: P49589
  ENST ID: ENST00000633248
  CDS Start-End: 247-2493
gactactcccagcacggccactgaacgcttggccgcgcgatgctccggagcgcgggtcgccattgggttgaactacagctcccagcatgctccgggccggcgacatccggagcccctggtagttgcctagcgaccgggcgtgtcccggaagacgggcccggcgtggggcgcgacttccggggcggcggttgcatcagattctaggaagtgtctgtagccgcagctgcgggtccgggattcccagccatggcagattcctccgggcagcagggcaaaggccggcgtgtgcagccccagtggtcccctcctgctgggacccagccatgcagactccacctttacaacagcctcaccaggaacaaggaagtgttcatacctcaagatgggaaaaaggtgacgtggtattgctgtgggccaaccgtctatgacgcatctcacatggggcacgccaggtcctacatctcttttgatatcttgagaagagtgttgaaggattacttcaaatttgatgtcttttattgcatgaacattacggatattgatgacaagatcatcaagagggcccggcagaaccacctgttcgagcagtatcgggagaagaggcctgaagcggcacagctcttggaggatgttcaggccgccctgaagccattttcagtaaaattaaatgagaccacggatcccgataaaaagcagatgctcgaacggattcagcacgcagtgcagcttgccacagagccacttgagaaagctgtgcagtccagactcacgggagaggaagtcaacagctgtgtggaggtgttgctggaagaagccaaggatttgctctctgactggctggattctacacttggctgtgatgtcactgacaattccatcttctccaagctgcccaagttctgggagggggacttccacagagacatggaagctctgaatgttctccctccagatgtcttaacccgggttagtgagtatgtgccagaaattgtgaactttgtccagaagattgtggacaacggttacggctatgtctccaatgggtctgtctactttgatacagcgaagtttgcttctagcgagaagcactcctatgggaagctggtgcctgaggccgttggagatcagaaagcccttcaagaaggggaaggtgacctgagcatctctgcagaccgcctgagtgagaagcgctctcccaacgactttgccttatggaaggcctctaagcccggagaaccgtcctggccgtgcccttggggaaagggtcgtccgggctggcatatcgagtgctcggccatggcaggcaccctcctaggggcttcgatggacattcacggaggtgggttcgacctccggttcccccaccatgacaatgagctggcacagtcggaggcctactttgaaaacgactgctgggtcaggtacttcctgcacacaggccacctgaccattgcaggctgcaaaatgtcaaagtcactaaaaaacttcatcaccattaaagatgccttgaaaaagcactcagcacggcagttgcggctggccttcctcatgcactcgtggaaggacaccctggactactccagcaacaccatggagtcagcgcttcaatatgagaagttcttgaatgagtttttcttaaatgtgaaagatatccttcgcgctcctgttgacatcactggtcagtttgagaagtggggagaagaagaagcagaactgaataagaacttttatgacaagaagacagcaattcacaaagccctctgtgacaatgttgacacccgcaccgtcatggaagagatgcgggccttggtcagtcagtgcaacctctatatggcagcccggaaagccgtgaggaagaggcccaaccaggctctgctggagaacatcgccctgtacctcacccatatgctgaagatctttggggccgtagaagaggacagctccctgggattcccggtcggagggcctggaaccagcctcagtctcgaggccacagtcatgccctaccttcaggtgttatcagaattccgagaaggagtgcggaagattgcccgagagcaaaaagtccctgagattctgcagctcagcgatgccctgcgggacaacatcctgcctgagcttggggtgcggtttgaagaccacgaaggactgcccacagtggtgaaactggtagacagaaacaccttattaaaagagagagaagaaaagagacgggttgaagaggagaagaggaagaagaaagaggaggcggcccggaggaaacaggaacaagaagcagcaaagctggccaagatgaagattccccccagtgagatgttcttgtcagaaaccgacaaatactccaagtttgatgaaaatggtctgcccacacatgacatggagggcaaagagctcagcaaagggcaagccaagaagctgaagaagctcttcgaggctcaggagaagctctacaaggaatatctgcagatggcccagaatggaagcttccagtgagggggcacaggactgactttttaaaccattgtggactagtggctgctgtctgcctcagtgacaatgtcccagcgctcctatcatgtttacagtcacccttgggtcctaaattaagagttgtgttcatgtaggttcgtgtcgtcgttggctctgagacattgataataaatttttctcaacagtgagaccctc

SEQ ID NO: 124094 - DNA, 2805 bp, Homo sapiens
  Payload ID: 4365
  Gene Symbol: CARS
  Gene Name: cysteinyl-tRNA synthetase
  ENST ID: ENST00000634057
  CDS Start-End: 71-457
ccggggcggcggttgcatcagattctaggaagtgtctgtagccgcagctgcgggtccgggattcccagccatggcagattcctccgggcagcaggctcctgactacaggtccattctgagcattagtgacgaggcagccagggcacaagccctgaacgagcacctcagcacgcgtagctatgtccaggggtactcactgtcccaggcagacgtggacgcgttcaggcagctctcggccccgcccgctgacccccagctcttccacgtggctcggtggttcaggcacatagaagcgctcctgggtagcccctgtggcaaaggccagccctgcaggctccaagcaagcaaaggccggcgtgtgcagccccagtggtcccctcctgctgggacccagccatgcagactccacctttacaacagcctcaccaggaacaagtgtttcttgcatttcttgtgatcgtcattccttcattcctaacaaaggaagtgttcatacctcaagatgggaaaaaggtgacgtggtattgctgtgggccaaccgtctatgacgcatctcacatggggcacgccaggtcctacatctcttttgatatcttgagaagagtgttgaaggattacttcaaatttgatgtcttttattgcatgaacattacggatattgatgacaagatcatcaagagggcccggcagaaccacctgttcgagcagtatcgggagaagaggcctgaagcggcacagctcttggaggatgttcaggccgccctgaagccattttcagtaaaattaaatgagaccacggatcccgataaaaagcagatgctcgaacggattcagcacgcagtgcagcttgccacagagccacttgagaaagctgtgcagtccagactcacgggagaggaagtcaacagctgtgtggaggtgttgctggaagaagccaaggatttgctctctgactggctggattctacacttggctgtgatgtcactgacaattccatcttctccaagctgcccaagttctgggagggggacttccacagagacatggaagctctgaatgttctccctccagatgtcttaacccgggttagtgagtatgtgccagaaattgtgaactttgtccagaagattgtggacaacggttacggctatgtctccaatgggtctgtctactttgatacagcgaagtttgcttctagcgagaagcactcctatgggaagctggtgcctgaggccgttggagatcagaaagcccttcaagaaggggaaggtgacctgagcatctctgcagaccgcctgagtgagaagcgctctcccaacgactttgccttatggaaggcctctaagcccggagaaccgtcctggccgtgcccttggggaaagggtcgtccgggctggcatatcgagtgctcggccatggcaggcaccctcctaggggcttcgatggacattcacggaggtgggttcgacctccggttcccccaccatgacaatgagctggcacagtcggaggcctactttgaaaacgactgctgggtcaggtacttcctgcacacaggccacctgaccattgcaggctgcaaaatgtcaaagtcactaaaaaacttcatcaccattaaagatgccttgaaaaagcactcagcacggcagttgcggctggccttcctcatgcactcgtggaaggacaccctggactactccagcaacaccatggagtcagcgcttcaatatgagaagttcttgaatgagtttttcttaaatgtgaaagatatccttcgcgctcctgttgacatcactggtcagtttgagaagtggggagaagaagaagcagaactgaataagaacttttatgacaagaagacagcaattcacaaagccctctgtgacaatgttgacacccgcaccgtcatggaagagatgcgggccttggtcagtcagtgcaacctctatatggcagcccggaaagccgtgaggaagaggcccaaccaggctctgctggagaacatcgccctgtacctcacccatatgctgaagatctttggggccgtagaagaggacagctccctgggattcccggtcggagggcctggaaccagcctcagtctcgaggccacagtcatgccctaccttcaggtgttatcagaattccgagaaggagtgcggaagattgcccgagagcaaaaagtccctgagattctgcagctcagcgatgccctgcgggacaacatcctgcctgagcttggggtgcggtttgaagaccacgaaggactgcccacagtggtgaaactggtagacagaaacaccttattaaaagagagagaagaaaagagacgggttgaagaggagaagaggaagaagaaagaggaggcggcccggaggaaacaggaacaagaagcagcaaagctggccaagatgaagattccccccagtgagatgttcttgtcagaaaccgacaaatactccaagtttgatgaaaatggtctgcccacacatgacatggagggcaaagagctcagcaaagggcaagccaagaagctgaagaagctcttcgaggctcaggagaagctctacaaggaatatctgcagatggcccagaatggaagcttccagtgagggggcacaggactgactttttaaaccattgtggactagtggctgctgtctgcctcagtgacaatgtcccagcgctcctatcatgtttacagtcacccttgggtcctaaattaagagttgtgttcatgtaggttcgtgtcgtcgttggctctgagacattgataataaatttttctcaacagtgagaccctc

SEQ ID NO: 124095 - DNA, 1879 bp, Homo sapiens
  Payload ID: 4366
  Gene Symbol: CARS2
  Gene Name: cysteinyl-tRNA synthetase 2, mitochondrial (putative)
  Uniprot ID: Q9HA77
  ENST ID: ENST00000257347
  CDS Start-End: 65-1759
agcgaccggcagcgtacccggcgtggctcccgtctccgcccagtcgtaggcgctggccgctgacatgttgaggactacgcgcggcccaggcctgggccccccgctgctccaggccgcgctgggccttgggcgggctgggtggcactggcctgcgggccgggcggcgagcggggggcgcgggcgggcctggctgcagcccacgggccgggagacgggtgtgcaggtgtacaacagcctcaccgggaggaaggaacccctaatcgtggcgcacgccgaagccgcctcctggtatagctgtggaccaactgtatatgatcatgcgcaccttggccatgcttgctcatatgttagatttgatatcattcgaaggatcctaaccaaggtttttggatgcagcatagtcatggtgatgggtattacagatgtagatgataaaatcatcaaaagagccaatgagatgaatatttcccccgcttccctcgccagtctttatgaggaagacttcaagcaggacatggcagccctgaaggttctcccacccacggtgtacctgagggtaaccgaaaatattcctcagataatttctttcattgaaggaatcattgctcgtgggaacgcttattcaacggcaaaaggcaatgtctacttcgatctgaagtctagaggagacaagtatggcaaattggtcggcgtggtccctggtccagtcggagagccagcggactctgacaagcgtcatgccagtgacttcgccctgtggaaggcggccaaaccccaggaggtgttctgggcctctccctggggacccgggaggccgggctggcacatcgagtgctctgccatcgctagtatggtatttggaagtcaactggatatccattcaggtgggatagatttagcttttccacatcatgaaaacgaaattgcacagtgcgaagtctttcatcagtgcgagcagtggggaaattattttctgcattctgggcatttgcacgccaaaggcaaagaagaaaaaatgtccaaatcattaaagaactacattactattaaggactttctgaagaccttttcccccgatgtcttccggttcttctgcctgcggagcagctaccgctcagccatcgactacagtgacagcgccatgctccaagctcagcagctgctcctggggctgggctctttcctggaggacgcacgtgcctacatgaaggggcagctggcctgcggctccgtcagggaagcgatgctgtgggagaggctctccagcaccaagagggccgtgaaggcggccttggcagatgattttgacacacccagggtggttgatgccatcctgggccttgcacaccacgggaatggacagctcagggcgtccctgaaggaacctgaagggccgagaagtcctgctgtgtttggtgccatcatctcttactttgaacagttttttgaaactgttggaatttctctggcaaatcaacagtacgtttcaggagacggcagcgaggctaccttgcatggtgtggtggacgagctggtgcggttccggcagaaggtccggcagtttgcgctggccatgcccgaggccacgggggacgcccggcggcagcagctcctagaaaggcagcccctgctggaagcatgcgacaccctgcgccggggcctgactgcccacggcatcaacatcaaggacagaagcagtacaacatccacgtgggaactgctggatcaaaggacaaaagaccaaaaatcagcgggctgaggatggagcacagccatgaacctgctcacgacaagacgcacccatgcttctcagggtcaaggctttatgttaaagcttcctgtcggggctgctaggtcagcattaaagtaaggcaaccaa

SEQ ID NO: 124096 - DNA, 720 bp, Homo sapiens
  Payload ID: 4366
  Gene Symbol: CARS2
  Gene Name: cysteinyl-tRNA synthetase 2, mitochondrial (putative)
  ENST ID: ENST00000537394
  CDS Start-End: 41-505
ggctcccgtctccgcccagtcgtaggcgctggccgctgacatgttgaggactacgcgcggcccaggcctgggccccccgctgctccaggccgcgctgggccttgggcgggctgggtggcactggcctgcgggccgggcggcgagcggggggcgcgggcgggcctggctgcagcccacgggccgggagacgggtgtgcaggtgtacaacagcctcaccgggaggaaggaacccctaatcgtggcgcacgccgaagccgcctcctggtatagctgtggaccaactgtatatgatcatgcgcaccttggccatgcttgctcatatgttagatttgatatcattcgaaggatcctaaccaaggtttttggatgcagcatagtcatggtgatgggtattacagatgtagatgataaaatcatcaaaagagccaatgagagagtcttgctctgtcgcccaggctggagtgcagtggcaccttcttggctgactgcaacctccgcctcctgagttcaagtgattctcctgcctcagccacctgagtctctgggattacagatgaatatttcccccgcttccctcgccagtctttatgaggaagacttcaagcaggacatggcagccctgaaggttctcccacccacggtgtacctgagggtaaccgaaaatattcctcagataatttctttcattgaaggaatcattgctcgtgggaacgcttattc

SEQ ID NO: 124097 - DNA, 844 bp, Homo sapiens
  Payload ID: 4366
  Gene Symbol: CARS2
  Gene Name: cysteinyl-tRNA synthetase 2, mitochondrial (putative)
  ENST ID: ENST00000487253
  CDS Start-End: 1-530
ggcatttgcacgccaaaggcaaagaagaaaaaatgtccaaatcattaaagaactacattactattaaggactttctgaagaccttttcccccgatgtcttccggttcttctgcctgcggagcagctaccgctcagccatcgactacagtgacagcgccatgctccaagctcagcagctgctcctggggctgggctctttcctggaggacgcacgtgcctacatgaaggggcagctggcctgcggctccgtcagggaagcgatgctgtgggagaggctctccagcaccaagagggccgtgaaggcggccttggcagatgattttgacacacccagggtggttgatgccatcctgggccttgcacaccacgggaatggacagctcagggcgtccctgaaggaacctgaagggccgagaagtcctgctgtgtttggtgccatcatctcttactttgaacagttttttgaaactgttggaatttctctggcaaatcaacagttggcaaactctcgtgcgcagaaccagagatgagtccatctcagcaacagaatgtcgccagctctgcacacacgtttatgttcaaagactctcagaatgtgcagaagtcacaggcacatacgtttcaggagacggcagcgaggctaccttgcatggtgtggtggacgagctggtgcggttccggcagaaggtccggcagtttgcgctggccatgcccgaggccacgggggacgcccggcggcagcagctcctagaaaggcagcccctgctggaagcatgcgacaccctgcgccggggcctgactgcccacggcatcaacatcaaggacagaagcagtacaacatcca

SEQ ID NO: 124098 - DNA, 795 bp, Homo sapiens
  Payload ID: 4366
  Gene Symbol: CARS2
  Gene Name: cysteinyl-tRNA synthetase 2, mitochondrial (putative)
  ENST ID: ENST00000539269
  CDS Start-End: 1-359
tgctccaggccgcgctgggccttgggcgggctgggtggcactggcctgcgggccgggcggcgagcggggggcgcgggcgggcctggctgcagcccacgggccgggagacgggtgtgcaggtgtacaacagcctcaccgggaggaaggaacccctaatcgtggcgcacgccgaagccgcctcctggtatagctgtggaccaactgtatatgatcatgcgcaccttggccatgcttgctcatatgttagatttgatatcattcgaaggatcctaaccaaggtttttggatgcagcatagtcatggtgatgggtattacagatgtagatgataaaatcatcaaaagagccaatgaggcatgagtcaaaggaatggtgtgaggtccttgaggaacattttcactgagatgaatatttcccccgcttccctcgccagtctttatgaggaagacttcaagcaggacatggcagccctgaaggttctcccacccacggtgtacctgagggtaaccgaaaatattcctcagataatttctttcattgaaggaatcattgctcgtgggaacgcttattcaacggcaaaaggcaatgtctacttcgatctgaagtctagaggagacaagtatggcaaattggtcggcgtggtccctggtccagtcggagagccagcggactctgacaagcgtcatgccagtgacttcgccctgtggaaggcggccaaaccccaggaggtgttctgggcctctccctggggacccgggaggccgggctggcacatcgagtgctctgccatcgctag

SEQ ID NO: 124099 - DNA, 466 bp, Homo sapiens
  Payload ID: 4366
  Gene Symbol: CARS2
  Gene Name: cysteinyl-tRNA synthetase 2, mitochondrial (putative)
  ENST ID: ENST00000537743
  CDS Start-End: 1-277
ctggggacccgggaggccgggctggcacatcgagtgctctgccatcgctagtatggtatttggaagtcaactggatatccattcaggtgggatagatttagcttttccacatcatgaaaacgaaattgcacagtgcgaagtctttcatcagtgcgagcagtggggaaattattttctgcattctgggcatttgcacgccaaaggcaaagaagaaaaaatgtccaaatcattaaagaactacattactattaaggctcagagctggctggatccttaaccaacctgaaaaatggcatcatgctatgctgctgacacatggaatgtgaattttcgtgtgaatggaaaacaggcacacccacggagggctctggctgacatagtttgaactcctcctttgtcttctggcctgtctttaaagccagatttaatttaattgcaaaataaatggagaagaatagtatccaga

SEQ ID NO: 124100 - DNA, 572 bp, Homo sapiens
  Payload ID: 4366
  Gene Symbol: CARS2
  Gene Name: cysteinyl-tRNA synthetase 2, mitochondrial (putative)
  ENST ID: ENST00000542709
  CDS Start-End: 30-572
gggctcggggagggcgtttaggaagctgcatggagggcgccgttctagaagctgggggtgcgcggtgcttttgcaggtttgggtgtgaattgagcaagtatgaaaaccccggctattcatcccccagaagtgattactttaaaaattatatgatcattataactcagaatcgaatgtcctttcttgcaaatatgttccacacgatggattttaactttgtttccaggtatagctgtggaccaactgtatatgatcatgcgcaccttggccatgcttgctcatatgttagatttgatatcattcgaaggatcctaaccaaggtttttggatgcagcatagtcatggtgatgggtattacagatgtagatgataaaatcatcaaaagagccaatgagatgaatatttcccccgcttccctcgccagtctttatgaggaagacttcaagcaggacatggcagccctgaaggttctcccacccacggtgtacctgagggtaaccgaaaatattcctcagataatttctttcattgaaggaatcattgctcgtgggaacgcttattcaacggcaaaa

SEQ ID NO: 124101 - DNA, 668 bp, Homo sapiens
  Payload ID: 4366
  Gene Symbol: CARS2
  Gene Name: cysteinyl-tRNA synthetase 2, mitochondrial (putative)
  ENST ID: ENST00000620794
  CDS Start-End: 1-271
gatgctgtgggagaggctctccagcaccaagagggccgtgaaggcggccttggcagatgattttgacacacccagggtggttgatgccatcctgggccttgcacaccacgggaatggacagctcagggcgtccctgaaggaacctgaagggccgagaagtcctgctgtgtttggtgccatcatctcttactttgaacagttttttgaaactgttggaatttctctggcaaatcaacagttggcaaactctcgtgcgcagaaccagagatgagtccatctcagcaacagaatgtcgccagctctgcacacacgtttatgttcaaagactctcagaatgtgcagaagtcacaggcacagtaagagaacattttttcctgacccatttgagggcaagttggcgacctgagcccccttgcctggcacatgttttgtacggacaggacgggctccccgacaggcacgagtcacctgcaccttcccagcgaggctcaccctggctgtgcagtgaaggtggacgctgccaggcttctccacattccttctcttccgttgtaactcaagagcatttttgcaaagagacttggatcctatgaaaatgtcctcttccttatcaggctcacctgaaactcgtttattctatcaatacagatttgaggtttcctgcctta

SEQ ID NO: 124102 - DNA, 6132 bp, Homo sapiens
  Payload ID: 4367
  Gene Symbol: CFTR
  Gene Name: cystic fibrosis transmembrane conductance regulator (ATP-binding cassette sub-family C, member 7)
  Uniprot ID: P13569
  ENST ID: ENST00000003084
  CDS Start-End: 133-4575
aattggaagcaaatgacatcacagcaggtcagagaaaaagggttgagcggcaggcacccagagtagtaggtctttggcattaggagcttgagcccagacggccctagcagggaccccagcgcccgagagaccatgcagaggtcgcctctggaaaaggccagcgttgtctccaaactttttttcagctggaccagaccaattttgaggaaaggatacagacagcgcctggaattgtcagacatataccaaatcccttctgttgattctgctgacaatctatctgaaaaattggaaagagaatgggatagagagctggcttcaaagaaaaatcctaaactcattaatgcccttcggcgatgttttttctggagatttatgttctatggaatctttttatatttaggggaagtcaccaaagcagtacagcctctcttactgggaagaatcatagcttcctatgacccggataacaaggaggaacgctctatcgcgatttatctaggcataggcttatgccttctctttattgtgaggacactgctcctacacccagccatttttggccttcatcacattggaatgcagatgagaatagctatgtttagtttgatttataagaagactttaaagctgtcaagccgtgttctagataaaataagtattggacaacttgttagtctcctttccaacaacctgaacaaatttgatgaaggacttgcattggcacatttcgtgtggatcgctcctttgcaagtggcactcctcatggggctaatctgggagttgttacaggcgtctgccttctgtggacttggtttcctgatagtccttgccctttttcaggctgggctagggagaatgatgatgaagtacagagatcagagagctgggaagatcagtgaaagacttgtgattacctcagaaatgattgaaaatatccaatctgttaaggcatactgctgggaagaagcaatggaaaaaatgattgaaaacttaagacaaacagaactgaaactgactcggaaggcagcctatgtgagatacttcaatagctcagccttcttcttctcagggttctttgtggtgtttttatctgtgcttccctatgcactaatcaaaggaatcatcctccggaaaatattcaccaccatctcattctgcattgttctgcgcatggcggtcactcggcaatttccctgggctgtacaaacatggtatgactctcttggagcaataaacaaaatacaggatttcttacaaaagcaagaatataagacattggaatataacttaacgactacagaagtagtgatggagaatgtaacagccttctgggaggagggatttggggaattatttgagaaagcaaaacaaaacaataacaatagaaaaacttctaatggtgatgacagcctcttcttcagtaatttctcacttcttggtactcctgtcctgaaagatattaatttcaagatagaaagaggacagttgttggcggttgctggatccactggagcaggcaagacttcacttctaatggtgattatgggagaactggagccttcagagggtaaaattaagcacagtggaagaatttcattctgttctcagttttcctggattatgcctggcaccattaaagaaaatatcatctttggtgtttcctatgatgaatatagatacagaagcgtcatcaaagcatgccaactagaagaggacatctccaagtttgcagagaaagacaatatagttcttggagaaggtggaatcacactgagtggaggtcaacgagcaagaatttctttagcaagagcagtatacaaagatgctgatttgtatttattagactctccttttggatacctagatgttttaacagaaaaagaaatatttgaaagctgtgtctgtaaactgatggctaacaaaactaggattttggtcacttctaaaatggaacatttaaagaaagctgacaaaatattaattttgcatgaaggtagcagctatttttatgggacattttcagaactccaaaatctacagccagactttagctcaaaactcatgggatgtgattctttcgaccaatttagtgcagaaagaagaaattcaatcctaactgagaccttacaccgtttctcattagaaggagatgctcctgtctcctggacagaaacaaaaaaacaatcttttaaacagactggagagtttggggaaaaaaggaagaattctattctcaatccaatcaactctatacgaaaattttccattgtgcaaaagactcccttacaaatgaatggcatcgaagaggattctgatgagcctttagagagaaggctgtccttagtaccagattctgagcagggagaggcgatactgcctcgcatcagcgtgatcagcactggccccacgcttcaggcacgaaggaggcagtctgtcctgaacctgatgacacactcagttaaccaaggtcagaacattcaccgaaagacaacagcatccacacgaaaagtgtcactggcccctcaggcaaacttgactgaactggatatatattcaagaaggttatctcaagaaactggcttggaaataagtgaagaaattaacgaagaagacttaaaggagtgcttttttgatgatatggagagcataccagcagtgactacatggaacacataccttcgatatattactgtccacaagagcttaatttttgtgctaatttggtgcttagtaatttttctggcagaggtggctgcttctttggttgtgctgtggctccttggaaacactcctcttcaagacaaagggaatagtactcatagtagaaataacagctatgcagtgattatcaccagcaccagttcgtattatgtgttttacatttacgtgggagtagccgacactttgcttgctatgggattcttcagaggtctaccactggtgcatactctaatcacagtgtcgaaaattttacaccacaaaatgttacattctgttcttcaagcacctatgtcaaccctcaacacgttgaaagcaggtgggattcttaatagattctccaaagatatagcaattttggatgaccttctgcctcttaccatatttgacttcatccagttgttattaattgtgattggagctatagcagttgtcgcagttttacaaccctacatctttgttgcaacagtgccagtgatagtggcttttattatgttgagagcatatttcctccaaacctcacagcaactcaaacaactggaatctgaaggcaggagtccaattttcactcatcttgttacaagcttaaaaggactatggacacttcgtgccttcggacggcagccttactttgaaactctgttccacaaagctctgaatttacatactgccaactggttcttgtacctgtcaacactgcgctggttccaaatgagaatagaaatgatttttgtcatcttcttcattgctgttaccttcatttccattttaacaacaggagaaggagaaggaagagttggtattatcctgactttagccatgaatatcatgagtacattgcagtgggctgtaaactccagcatagatgtggatagcttgatgcgatctgtgagccgagtctttaagttcattgacatgccaacagaaggtaaacctaccaagtcaaccaaaccatacaagaatggccaactctcgaaagttatgattattgagaattcacacgtgaagaaagatgacatctggccctcagggggccaaatgactgtcaaagatctcacagcaaaatacacagaaggtggaaatgccatattagagaacatttccttctcaataagtcctggccagagggtgggcctcttgggaagaactggatcagggaagagtactttgttatcagcttttttgagactactgaacactgaaggagaaatccagatcgatggtgtgtcttgggattcaataactttgcaacagtggaggaaagcctttggagtgataccacagaaagtatttattttttctggaacatttagaaaaaacttggatccctatgaacagtggagtgatcaagaaatatggaaagttgcagatgaggttgggctcagatctgtgatagaacagtttcctgggaagcttgactttgtccttgtggatgggggctgtgtcctaagccatggccacaagcagttgatgtgcttggctagatctgttctcagtaaggcgaagatcttgctgcttgatgaacccagtgctcatttggatccagtaacataccaaataattagaagaactctaaaacaagcatttgctgattgcacagtaattctctgtgaacacaggatagaagcaatgctggaatgccaacaatttttggtcatagaagagaacaaagtgcggcagtacgattccatccagaaactgctgaacgagaggagcctcttccggcaagccatcagcccctccgacagggtgaagctctttccccaccggaactcaagcaagtgcaagtctaagccccagattgctgctctgaaagaggagacagaagaagaggtgcaagatacaaggctttagagagcagcataaatgttgacatgggacatttgctcatggaattggagctcgtgggacagtcacctcatggaattggagctcgtggaacagttacctctgcctcagaaaacaaggatgaattaagtttttttttaaaaaagaaacatttggtaaggggaattgaggacactgatatgggtcttgataaatggcttcctggcaatagtcaaattgtgtgaaaggtacttcaaatccttgaagatttaccacttgtgttttgcaagccagattttcctgaaaacccttgccatgtgctagtaattggaaaggcagctctaaatgtcaatcagcctagttgatcagcttattgtctagtgaaactcgttaatttgtagtgttggagaagaactgaaatcatacttcttagggttatgattaagtaatgataactggaaacttcagcggtttatataagcttgtattcctttttctctcctctccccatgatgtttagaaacacaactatattgtttgctaagcattccaactatctcatttccaagcaagtattagaataccacaggaaccacaagactgcacatcaaaatatgccccattcaacatctagtgagcagtcaggaaagagaacttccagatcctggaaatcagggttagtattgtccaggtctaccaaaaatctcaatatttcagataatcacaatacatcccttacctgggaaagggctgttataatctttcacaggggacaggatggttcccttgatgaagaagttgatatgccttttcccaactccagaaagtgacaagctcacagacctttgaactagagtttagctggaaaagtatgttagtgcaaattgtcacaggacagcccttctttccacagaagctccaggtagagggtgtgtaagtagataggccatgggcactgtgggtagacacacatgaagtccaagcatttagatgtataggttgatggtggtatgttttcaggctagatgtatgtacttcatgctgtctacactaagagagaatgagagacacactgaagaagcaccaatcatgaattagttttatatgcttctgttttataattttgtgaagcaaaattttttctctaggaaatatttattttaataatgtttcaaacatatataacaatgctgtattttaaaagaatgattatgaattacatttgtataaaataatttttatatttgaaatattgactttttatggcactagtatttctatgaaatattatgttaaaactgggacaggggagaacctagggtgatattaaccaggggccatgaatcaccttttggtctggagggaagccttggggctgatgcagttgttgcccacagctgtatgattcccagccagcacagcctcttagatgcagttctgaagaagatggtaccaccagtctgactgtttccatcaagggtacactgccttctcaactccaaactgactcttaagaagactgcattatatttattactgtaagaaaatatcacttgtcaataaaatccatacatttgtgtgaaa

SEQ ID NO: 124103 - DNA, 4316 bp, Homo sapiens
  Payload ID: 4367
  Gene Symbol: CFTR
  Gene Name: cystic fibrosis transmembrane conductance regulator (ATP-binding cassette sub-family C, member 7)
  ENST ID: ENST00000426809
  CDS Start-End: 1-4316
atgcagaggtcgcctctggaaaaggccagcgttgtctccaaactttttttcagctggaccagaccaattttgaggaaaggatacagacagcgcctggaattgtcagacatataccaaatcccttctgttgattctgctgacaatctatctgaaaaattggaaagagaatgggatagagagctggcttcaaagaaaaatcctaaactcattaatgcccttcggcgatgttttttctggagatttatgttctatggaatctttttatatttaggggaagtcaccaaagcagtacagcctctcttactgggaagaatcatagcttcctatgacccggataacaaggaggaacgctctatcgcgatttatctaggcataggcttatgccttctctttattgtgaggacactgctcctacacccagccatttttggccttcatcacattggaatgcagatgagaatagctatgtttagtttgatttataagaagggacttgcattggcacatttcgtgtggatcgctcctttgcaagtggcactcctcatggggctaatctgggagttgttacaggcgtctgccttctgtggacttggtttcctgatagtccttgccctttttcaggctgggctagggagaatgatgatgaagtacagagatcagagagctgggaagatcagtgaaagacttgtgattacctcagaaatgattgaaaatatccaatctgttaaggcatactgctgggaagaagcaatggaaaaaatgattgaaaacttaagacaaacagaactgaaactgactcggaaggcagcctatgtgagatacttcaatagctcagccttcttcttctcagggttctttgtggtgtttttatctgtgcttccctatgcactaatcaaaggaatcatcctccggaaaatattcaccaccatctcattctgcattgttctgcgcatggcggtcactcggcaatttccctgggctgtacaaacatggtatgactctcttggagcaataaacaaaatacaggatttcttacaaaagcaagaatataagacattggaatataacttaacgactacagaagtagtgatggagaatgtaacagccttctgggaggagggatttggggaattatttgagaaagcaaaacaaaacaataacaatagaaaaacttctaatggtgatgacagcctcttcttcagtaatttctcacttcttggtactcctgtcctgaaagatattaatttcaagatagaaagaggacagttgttggcggttgctggatccactggagcaggcaagacttcacttctaatggtgattatgggagaactggagccttcagagggtaaaattaagcacagtggaagaatttcattctgttctcagttttcctggattatgcctggcaccattaaagaaaatatcatctttggtgtttcctatgatgaatatagatacagaagcgtcatcaaagcatgccaactagaagaggacatctccaagtttgcagagaaagacaatatagttcttggagaaggtggaatcacactgagtggaggtcaacgagcaagaatttctttagcaagagcagtatacaaagatgctgatttgtatttattagactctccttttggatacctagatgttttaacagaaaaagaaatatttgaaagctgtgtctgtaaactgatggctaacaaaactaggattttggtcacttctaaaatggaacatttaaagaaagctgacaaaatattaattttgcatgaaggtagcagctatttttatgggacattttcagaactccaaaatctacagccagactttagctcaaaactcatgggatgtgattctttcgaccaatttagtgcagaaagaagaaattcaatcctaactgagaccttacaccgtttctcattagaaggagatgctcctgtctcctggacagaaacaaaaaaacaatcttttaaacagactggagagtttggggaaaaaaggaagaattctattctcaatccaatcaactctatacgaaaattttccattgtgcaaaagactcccttacaaatgaatggcatcgaagaggattctgatgagcctttagagagaaggctgtccttagtaccagattctgagcagggagaggcgatactgcctcgcatcagcgtgatcagcactggccccacgcttcaggcacgaaggaggcagtctgtcctgaacctgatgacacactcagttaaccaaggtcagaacattcaccgaaagacaacagcatccacacgaaaagtgtcactggcccctcaggcaaacttgactgaactggatatatattcaagaaggttatctcaagaaactggcttggaaataagtgaagaaattaacgaagaagacttaaaggagtgcttttttgatgatatggagagcataccagcagtgactacatggaacacataccttcgatatattactgtccacaagagcttaatttttgtgctaatttggtgcttagtaatttttctggcagaggtggctgcttctttggttgtgctgtggctccttggaaacactcctcttcaagacaaagggaatagtactcatagtagaaataacagctatgcagtgattatcaccagcaccagttcgtattatgtgttttacatttacgtgggagtagccgacactttgcttgctatgggattcttcagaggtctaccactggtgcatactctaatcacagtgtcgaaaattttacaccacaaaatgttacattctgttcttcaagcacctatgtcaaccctcaacacgttgaaagcaggtgggattcttaatagattctccaaagatatagcaattttggatgaccttctgcctcttaccatatttgacttcatccagttgttattaattgtgattggagctatagcagttgtcgcagttttacaaccctacatctttgttgcaacagtgccagtgatagtggcttttattatgttgagagcatatttcctccaaacctcacagcaactcaaacaactggaatctgaaggcaggagtccaattttcactcatcttgttacaagcttaaaaggactatggacacttcgtgccttcggacggcagccttactttgaaactctgttccacaaagctctgaatttacatactgccaactggttcttgtacctgtcaacactgcgctggttccaaatgagaatagaaatgatttttgtcatcttcttcattgctgttaccttcatttccattttaacaacaggagaaggagaaggaagagttggtattatcctgactttagccatgaatatcatgagtacattgcagtgggctgtaaactccagcatagatgtggatagcttgatgcgatctgtgagccgagtctttaagttcattgacatgccaacagaaggtaaacctaccaagtcaaccaaaccatacaagaatggccaactctcgaaagttatgattattgagaattcacacgtgaagaaagatgacatctggccctcagggggccaaatgactgtcaaagatctcacagcaaaatacacagaaggtggaaatgccatattagagaacatttccttctcaataagtcctggccagagggtgggcctcttgggaagaactggatcagggaagagtactttgttatcagcttttttgagactactgaacactgaaggagaaatccagatcgatggtgtgtcttgggattcaataactttgcaacagtggaggaaagcctttggagtgataccacagaaagtatttattttttctggaacatttagaaaaaacttggatccctatgaacagtggagtgatcaagaaatatggaaagttgcagatgaggttgggctcagatctgtgatagaacagtttcctgggaagcttgactttgtccttgtggatgggggctgtgtcctaagccatggccacaagcagttgatgtgcttggctagatctgttctcagtaaggcgaagatcttgctgcttgatgaacccagtgctcatttggatccagtaacataccaaataattagaagaactctaaaacaagcatttgctgattgcacagtaattctctgtgaacacaggatagaagcaatgctggaatgccaacaatttttggtcatagaagagaacaaagtgcggcagtacgattccatccagaaactgctgaacgagaggagcctcttccggcaagccatcagcccctccgacagggtgaagctctttccccaccggaactcaagcaagtgcaagtctaagccccagattgctgctctgaaaga

SEQ ID NO: 124104 - DNA, 575 bp, Homo sapiens
  Payload ID: 4367
  Gene Symbol: CFTR
  Gene Name: cystic fibrosis transmembrane conductance regulator (ATP-binding cassette sub-family C, member 7)
  ENST ID: ENST00000446805
  CDS Start-End: 466-575
aaagcttggttcttttctccgacacgcaaaggaagcgctaaggaacccgactaggatcatcgggaaaaggaggaggaggaggaaggcaggctccggggaagctggtggcagcgggtcctgggtctggcggaccctgacgcgaaggagggtctaggaagctctccggggagccggttctcccgccggtggcttcttctgtcctccagcgttgccaactggacctaaagagaggccgcgactgtcgcccacctgcgggatgggcctggtgctgggcgctggaccagaccaattttgaggaaaggatacagacagcgcctggaattgtcagacatataccaaatcccttctgttgattctgctgacaatctatctgaaaaattggaaagagaatgggatagagagctggcttcaaagaaaaatcctaaactcattaatgcccttcggcgatgttttttctggagatttatgttctatggaatctttttatatttaggggaagtcaccaaagcagtacagcctctcttactgggaagaatcatagcttcctatgacccggataacaaggaggaacgctc

SEQ ID NO: 124105 - DNA, 682 bp, Homo sapiens
  Payload ID: 4367
  Gene Symbol: CFTR
  Gene Name: cystic fibrosis transmembrane conductance regulator (ATP-binding cassette sub-family C, member 7)
  ENST ID: ENST00000468795
  CDS Start-End: 1-572
taaaaggactatggacacttcgtgccttcggacggcagccttactttgaaactctgttccacaaagctctgaatttacatactgccaactggttcttgtacctgtcaacactgcgctggttccaaatgagaatagaaatgatttttgtcatcttcttcattgctgttaccttcatttccattttaacaacaggagaaggagaaggaagagttggtattatcctgactttagccatgaatatcatgagtacattgcagtgggctgtaaactccagcatagatgtggatagcttgatgcgatctgtgagccgagtctttaagttcattgacatgccaacagaaggtaaacctaccaagtcaaccaaaccatacaagaatggccaactctcgaaagttatgattattgagaattcacacgtgaagaaagatgacatctggccctcagggggccaaatgactgtcaaagatctcacagcaaaatacacagaaggtggaaatgccatattagagaacatttccttctcaataagtcctggccagagggtgagatttgaacactgcttgctttgttagactgtgttcagtaagtgaatcccagtagcctgaagcaatgtgttagcagaatctatttgtaacattattattgtacagtagaatcaatattaaacacacatgttttatta

SEQ ID NO: 124106 - DNA, 559 bp, Homo sapiens
  Payload ID: 4367
  Gene Symbol: CFTR
  Gene Name: cystic fibrosis transmembrane conductance regulator (ATP-binding cassette sub-family C, member 7)
  ENST ID: ENST00000600166
  CDS Start-End: 1-470
aagtatttattttttctggaacatttagaaaaaacttggatccctatgaacagtggagtgatcaagaaatatggaaagttgcagatgaggttgggctcagatctgtgatagaacagtttcctgggaagcttgactttgtccttgtggatgggggctgtgtcctaagccatggccacaagcagttgatgtgcttggctagatctgttctcagtaaggcgaagatcttgctgcttgatgaacccagtgctcatttggatccagtaacataccaaataattagaagaactctaaaacaagcatttgctgattgcacagtaattctctgtgaacacaggatagaagcaatgctggaatgccaacaatttttgataatgatggttgcagggcccctcttcaatggaggcattgccagccttctggccatgaaggagaaagtgatttcaactaacccaggaaactcttacctctaaatggagatacttcctgataacagaagaaactgggcatctaacccagaaataccagctgagtaggagaagagaaaaggcatcagccagtc

SEQ ID NO: 124107 - DNA, 2738 bp, Homo sapiens
  Payload ID: 4368
  Gene Symbol: CYS1
  Gene Name: cystin 1
  Uniprot ID: Q717R9
  ENST ID: ENST00000381813
  CDS Start-End: 189-665
gctcgcacccccgtcctccggccgcgacccccgcccgggaaccctagcccctggccgcggtcgcttcccggacctcgccccgcgcctccccctgcagcccgccccggccgcaccccctagcgtccccgcccccggccgcgccccctcatgggggccccctcggcggtccgggaggcggcgggcgcgccatgggcagcggcagcagccggagcagccggactctgaggcggcggcgcagccccgagagcctccccgcggggcccggagcggcagccctggagggcgggacccgccggcgggtgccggtggcggcggccgaggtcccgggggcagccgcggaggaggcgcccggccgcgaccccagccccgtggcgccccccgacggcagggacgagacgctgcgcctgctggacgagctgctggccgagtcggcggcctggggccccccggagcccgccccgcgccgcccagcccggctccgacccaccgcggtcgcggggagcgcggtgtgcgcagagcagagcacagagggccacccggggagcggcaatgtctctgaagccccaggcagcggtcgcaagaagcccgagaggccggcagccatctcctacgaccactcggaagaggggctgatggcgagcatcgagcgggagtactgccgctgaggacagcatgctccacccccgccaggcctcggaggcacctgctggctggggcaccctctgcttgcacagagctctagcaggagctgaaccacctccaaaacgcagtcactcccggatattcaaagctgccctttcaaatccactttcagaccgcgctgacctgggccagccactggcggtcatggttgctggtgggggcgattagctgtgtagacccacaggtgcgtgggcctgggccgccggcgcctcctccccaacgcggggagcctgcccagttcttctggagcctgaaatgcgtgcccctcttggttgcccgctctccacagtggggagggctcacgaggactaggtgacacaagcgagcccctcctggcatccgcgccacaacacttccggaaggttctgctgtggaaggtgcacccgcgctgctccctcagtctcgggcccatctctccaggggtggccgggtcagcttagtgcttctcaactttaactccctaatgagcagcctgggggtgctgttgacttgcagggcctgaggttctgtacgtctaaccagctcccagcccaggcccgagctccgaagccccaactgcactttgaggagcgagaaccccagctctgatctgccttgcagtgggaggtagagctcgtcactgcctctctgggcctcagtttccctctctggaaaatcagctctggcagctcttggaggccctccccagctctgacaatctggaactgctgccactgctggtcccctgccccaggcacagcagtgccttccctgcggggagccagcgcccaggtccaaccgggagagggtctgcctgatactggctttccagttctccctctcacaggcagcctggccagtgcctgcggggcttttaaattctcttcctgcctgggtggaaggtgggaaaccacagcagtgaggcaggaagagccttggaatgttcctggttgacagatgggaaaactgacctgcccaggacgccctgggaacagggggcggagctccggctagaggggactcctgtgtgggcgggcaggtctggagcctgggcccaggtgtggcctgctgggggacagctccgggggagagctgtggggagaacagcggtctagggaggcaggaggcaggcggcaggctcctccccagcagcctgcagggcatcaggacagagggggaaggaggagacagaagggaaagaaggagatagagggggaaggaggaaacagcgcggcttctgctgaagccagtacaagcctggttatctggcttgacccgcccacacggaggcctccccagcgttttctttttcccgagaagagctccagctcgcaggtccttagaacacagcagagcaggagcatctcaggaaccaacggccagctccttggcgctgtccccagccccacaggcctgctgcggccatccgcaaacgggcatttccttgaacttttgagagtgcctttgaccagctgttcgcagctgggaaactccaacttttgaagtcagagcttggagcggcccccgcaagggcgtggctcaaaccctccccagagctgggagccattgcttatgcaagcccgtttcttttgatgtaaagatggaagtcgttactatattttaataatgcaaatacatcttttaaaataagttaacatttcttaccaccagatggatcaggctttgaatttaaacatgtaaatgtttgtaattttatgtcattttgttaaaatgggacgctttcaattggtttccaagaaagatgatacctctgcattttctggtggaaaaggtgtaatacccttaatgagatcaaagtgttaggggaaaaaaattccaaaagtagttacaagctatatcaatgtcaaagtaaatgcacttcatcaaagctaagaagtcacaggaattgttctcaggtttttaaaaaaatttttcctgaattcaggaagtgtcttctgaatagcagctagccaaataaagcggtgtgtgtgtactgcagctgtaggtgaacttaaaaataataataaaaagaacaaataaagcagtgtgtaccagcc

SEQ ID NO: 124108 - DNA, 2866 bp, Homo sapiens
  Payload ID: 4369
  Gene Symbol: CTNS
  Gene Name: cystinosin, lysosomal cystine transporter
  Uniprot ID: O60931
  ENST ID: ENST00000046640
  CDS Start-End: 594-1697
gatttccgcccaatggagggcggtctgagcttcgctcacgaaaggagccgggaggcgctggcggctccaagagtctctgtgtccctggcagcggacctcatcttccctcacgccggagccccgatctctgcgccccggcccgacccagctgcgctctgtccgtctaagacgcgcggaaactacaactcccagagctcatctcgccgagatccggccccacgagtcaggtggcggaggtcaggtgacagcggacccgcctctcccaaagtctagccgggcaggggaacgcggtgcattcctgaccggcacctggcgaggctcatgcgtcccgtgagggcggttcctcgagcctgggggcgctcagattgctttggagacgctgagagaacctttgcgagagcgccggttgacgtgcggagtgcggggctccgggggactgagcagcacgagaccccatcctcccctccgggttttcacactgggcgaagggaggactcctgagctctgcctcttccagtaacattgaggattactgtgttttgtgagagctcgctaggcgccctaagcaacagagttctgagaaatcgagaaacatgataaggaattggctgactatttttatcctttttcccctgaagctcgtagagaaatgtgagtcaagcgtcagcctcactgttcctcctgtcgtaaagctggagaacggcagctcgaccaacgtcagcctcaccctgcggccaccattaaatgcaaccctggtgatcacttttgaaatcacatttcgttccaaaaatattactatccttgagctccccgatgaagttgtggtgcctcctggagtgacaaactcctcttttcaagtgacatctcaaaatgttggacaacttactgtttatctacatggaaatcactccaatcagaccggcccgaggatacgctttcttgtgatccgcagcagcgccattagcatcataaaccaggtgattggctggatctactttgtggcctggtccatctccttctaccctcaggtgatcatgaattggaggcggaaaagtgtcattggtctgagcttcgacttcgtggctctgaacctgacgggcttcgtggcctacagtgtattcaacatcggcctcctctgggtgccctacatcaaggagcagtttctcctcaaataccccaacggagtgaaccccgtgaacagcaacgacgtcttcttcagcctgcacgcggttgtcctcacgctgatcatcatcgtgcagtgctgcctgtatgagcgcggtggccagcgcgtgtcctggcctgccatcggcttcctggtgctcgcgtggctcttcgcatttgtcaccatgatcgtggctgcagtgggagtgaccacgtggctgcagtttctcttctgcttctcctacatcaagctcgcagtcacgctggtcaagtattttccacaggcctacatgaacttttactacaaaagcactgagggctggagcattggcaacgtgctcctggacttcaccgggggcagcttcagcctcctgcagatgttcctccagtcctacaacaacgaccagtggacgctgatcttcggagacccaaccaagtttggactcggggtcttctccatcgtcttcgacgtcgtcttcttcatccagcacttctgtttgtacagaaagagaccggggtatgaccagctgaactagcacccagggacccagtgtacccagcctctggcctcgtgccctgctggggaaggcctcacccagcgaaggccggagaagcggttgggccctggcacacagggctggctcagtgtgcggacagaggagaccactctgctcctggggccagaggccattcaatagcctgccttcgtccgggcccctcctgggcctccccggccaggcacgtggcaccgtcgccttgacaccgccatctcttttctttaaggcttcaggcagcgcgcacaggctctggcagccgtctcaggcaggactgggcaccaagcttgcagccgaaggccttgccccaaactaccagcgtttctgcaagcagcttgaagggctgaccttgcagccgggtgagccaagggcactttgctgccaccgctgcattcccagagatcaagcagcccggtgccgtggccagtgaactcagaggtgctggtggacgggctaggactttggggttaggccatggggctctttctctgaaggccactttcctgacgtactctctgtacataactcagcgtccgtgactgcagtaacagccagccctacccagagtatttctgagccatgaggggcccaccagattggttctgaattggattcatgcccagcgcattagcatagtaactcctttcagattttttggagggacgtttggaagtggcttactctcttctgccctctctcctacctccaccttctcagattagccccatctgagcacatccagctgctccttacccagcatctggagtacaggacatagctctctcctgctaccagtctgtgccttagaggtctgttaggcctgccaaacggcgaccagctcccctggagcgagggcaggccccttccctctctttccccagacacctacttgagactcaccaatttctggcctgttcaggagcctcagataagtatttgtacttgagaccacctcacacaatctgtatgggcccaaccctgatctcaaacctccttccctctgcccaaagctgtccttcctatggcaggaggggtgggggtcccaggacgtgcctcatacatgacttgagcttgtcagtccactgagtttccttctacgagatcaacgcgaggggcctgtatcttgaattaaaacctactcgcttcctttc

SEQ ID NO: 124109 - DNA, 2470 bp, Homo sapiens
  Payload ID: 4369
  Gene Symbol: CTNS
  Gene Name: cystinosin, lysosomal cystine transporter
  Uniprot ID: O60931
  ENST ID: ENST00000381870
  CDS Start-End: 460-1662
aatggagggcggtctgagcttcgctcacgaaaggagccgggaggcgctggcggctccaagagtctctgtgtccctggcagcggacctcatcttccctcacgccggagccccgatctctgcgccccggcccgacccagctgcgctctgtccgtctaagacgcgcggaaactacaactcccagagctcatctcgccgagatccggccccacgagtcaggtggcggaggtcagattgctttggagacgctgagagaacctttgcgagagcgccggttgacgtgcggagtgcggggctccgggggactgagcagcacgagaccccatcctcccctccgggttttcacactgggcgaagggaggactcctgagctctgcctcttccagtaacattgaggattactgtgttttgtgagagctcgctaggcgccctaagcaacagagttctgagaaatcgagaaacatgataaggaattggctgactatttttatcctttttcccctgaagctcgtagagaaatgtgagtcaagcgtcagcctcactgttcctcctgtcgtaaagctggagaacggcagctcgaccaacgtcagcctcaccctgcggccaccattaaatgcaaccctggtgatcacttttgaaatcacatttcgttccaaaaatattactatccttgagctccccgatgaagttgtggtgcctcctggagtgacaaactcctcttttcaagtgacatctcaaaatgttggacaacttactgtttatctacatggaaatcactccaatcagaccggcccgaggatacgctttcttgtgatccgcagcagcgccattagcatcataaaccaggtgattggctggatctactttgtggcctggtccatctccttctaccctcaggtgatcatgaattggaggcggaaaagtgtcattggtctgagcttcgacttcgtggctctgaacctgacgggcttcgtggcctacagtgtattcaacatcggcctcctctgggtgccctacatcaaggagcagtttctcctcaaataccccaacggagtgaaccccgtgaacagcaacgacgtcttcttcagcctgcacgcggttgtcctcacgctgatcatcatcgtgcagtgctgcctgtatgagcgcggtggccagcgcgtgtcctggcctgccatcggcttcctggtgctcgcgtggctcttcgcatttgtcaccatgatcgtggctgcagtgggagtgaccacgtggctgcagtttctcttctgcttctcctacatcaagctcgcagtcacgctggtcaagtattttccacaggcctacatgaacttttactacaaaagcactgagggctggagcattggcaacgtgctcctggacttcaccgggggcagcttcagcctcctgcagatgttcctccagtcctacaacaacgaccagtggacgctgatcttcggagacccaaccaagtttggactcggggtcttctccatcgtcttcgacgtcgtcttcttcatccagcacttctgtttgtacagaaagagaccggggcttcaggcagcgcgcacaggctctggcagccgtctcaggcaggactgggcaccaagcttgcagccgaaggccttgccccaaactaccagcgtttctgcaagcagcttgaagggctgaccttgcagccgggtgagccaagggcactttgctgccaccgctgcattcccagagatcaagcagcccggtgccgtggccagtgaactcagaggtgctggtggacgggctaggactttggggttaggccatggggctctttctctgaaggccactttcctgacgtactctctgtacataactcagcgtccgtgactgcagtaacagccagccctacccagagtatttctgagccatgaggggcccaccagattggttctgaattggattcatgcccagcgcattagcatagtaactcctttcagattttttggagggacgtttggaagtggcttactctcttctgccctctctcctacctccaccttctcagattagccccatctgagcacatccagctgctccttacccagcatctggagtacaggacatagctctctcctgctaccagtctgtgccttagaggtctgttaggcctgccaaacggcgaccagctcccctggagcgagggcaggccccttccctctctttccccagacacctacttgagactcaccaatttctggcctgttcaggagcctcagataagtatttgtacttgagaccacctcacacaatctgtatgggcccaaccctgatctcaaacctccttccctctgcccaaagctgtccttcctatggcaggaggggtgggggtcccaggacgtgcctcatacatgacttgagcttgtcagtccactgagtttccttctacgagatcaacgcgaggggcctgtatcttgaattaaaacctactcgcttcctttctgca

SEQ ID NO: 124110 - DNA, 803 bp, Homo sapiens
  Payload ID: 4369
  Gene Symbol: CTNS
  Gene Name: cystinosin, lysosomal cystine transporter
  ENST ID: ENST00000399306
  CDS Start-End: 233-601
cagattgctttggagacgctgagagaacctttgcgagagcgccggttgacgtgcggagtgcggggctccgggggactgagcagcacgagaccccatcctcccctccgggttttcacactgggcgaagggaggactcctgagctctgcctcttccagtaacattgaggattactgtgttttgtgagagctcgctaggcgccctaagcaacagagttctgagaaatcgagaaacatgataaggaattggctgactatttttatcctttttcccctgaagctcgtagagaaatgtgagtcaagcgtcagcctcactgttcctcctgtcgtaaagctggagaacggcagctcgaccaacgtcagcctcaccctgcggccaccattaaatgcaaccctggtgatcacttttgaaatcacatttcgttccaaaaatattactatccttgagctccccgatgaactggtggaagcaggaggagaagaatgcagggatgagatcagtagccatgaggcacatcaagatgggctgcaaatcagctctgagccccctaggaagcaaacaggagtgaaacacgatcagtctccagcatgtgggaacctgtgatctgaaaaatatagcatcgctggctgcagagatgtgcacctgtaatcccagctacttgggaggctgaggcaggagaatcacttgagcccaggaactcaaggctgcagtgagccatgactgtaccactgccctccagcctgagtgttggagcaagactctgtctctaaaaaattaaaaataaaaataaaatgtttaaaaataa

SEQ ID NO: 124111 - DNA, 617 bp, Homo sapiens
  Payload ID: 4369
  Gene Symbol: CTNS
  Gene Name: cystinosin, lysosomal cystine transporter
  ENST ID: ENST00000452111
  CDS Start-End: 393-617
ctctcccaaagtctagccgggcaggggaacgcggtgcattcctgaccggcacctggcgaggctcatgcgtcccgtgagggcggttcctcgagcctgggggcgctcaggtgagagcggacgcggcctcccctgtttcccaggcggaccccttgaggcacagcagattgctttggagacgctgagagaacctttgcgagagcgccggttgacgtgcggagtgcggggctccgggggactgagcagcacgagaccccatcctcccctccgggttttcacactgggcgaagggaggactcctgagctctgcctcttccagtaacattgaggattactgtgttttgtgagagctcgctaggcgccctaagcaacagagttctgagaaatcgagaaacatgataaggaattggctgactatttttatcctttttcccctgaagctcgtagagaaatgtgagtcaagcgtcagcctcactgttcctcctgtcgtaaagctggagaacggcagctcgaccaacgtcagcctcaccctgcggccaccattaaatgcaaccctggtgatcacttttgaaatcacatttcgttccaaaaatattactatccttgagctccccgatgaa

SEQ ID NO: 124112 - DNA, 548 bp, Homo sapiens
  Payload ID: 4369
  Gene Symbol: CTNS
  Gene Name: cystinosin, lysosomal cystine transporter
  ENST ID: ENST00000576979
  CDS Start-End: 61-548
aacattcccctgaacttctctcttgctgtttttcttcctagttctgagaaatcgagaaacatgataaggaattggctgactatttttatcctttttcccctgaagctcgtagagaaatgtgagtcaagcgtcagcctcactgttcctcctgtcgtaaagctggagaacggcagctcgaccaacgtcagcctcaccctgcggccaccattaaatgcaaccctggtgatcacttttgaaatcacatttcgttccaaaaatattactatccttgagctccccgatgaagttgtggtgcctcctggagtgacaaactcctcttttcaagtgacatctcaaaatgttggacaacttactgtttatctacatggaaatcactccaatcagaccggcccgaggatacgctttcttgtgatccgcagcagcgccattagcatcataaaccaggtgattggctggatctactttgtggcctggtccatctccttctaccctcaggtgatcatgaattggaggcggaaaagtgtcattggtctgagcttcgacttcgt

SEQ ID NO: 124113 - DNA, 581 bp, Homo sapiens
  Payload ID: 4369
  Gene Symbol: CTNS
  Gene Name: cystinosin, lysosomal cystine transporter
  ENST ID: ENST00000574218
  CDS Start-End: 497-581
attcctgaccggcacctggcgaggctcatgcgtcccgtgagggcggttcctcgagcctgggggcgctcagattgctttggagacgctgagagaacctttgcgagagcgccggttgacgtgcggagtgcggggctccgggggactgagcagcacgagaccccatcctcccctccgggttttcacactgggcgaagggaggactcctgagctctgcctcttccagtaacattgaggattactgtgttttgtgagagctcgctaggcgccctaagcaacagaggttgtggtgcctcctggagtgacaaactcctcttttcaagtgacatctcaaaatgttggacaacttactgtttatctacatggaaatcactccaatcagaccggcccgaggatacgctttcttgtgatccgcagcagcgccattagcatcataaaccaggtgattggctggatctactttgtggcctggtccatctccttctaccctcaggtgatcatgaattggaggcggaaaagtgtcattggtctgagcttcgacttcgtggctctgaacctgacgggcttcgtggcctacagtgtat

SEQ ID NO: 124114 - DNA, 590 bp, Homo sapiens
  Payload ID: 4369
  Gene Symbol: CTNS
  Gene Name: cystinosin, lysosomal cystine transporter
  ENST ID: ENST00000467663
  CDS Start-End: 304-465
gtgcattcctgaccggcacctggcgaggctcatgcgtcccgtgagggcggttcctcgagcctgggggcgctcagattgctttggagacgctgagagaacctttgcgagagcgccggttgacgtgcggagtgcggggctccgggggactgagcagcacgagaccccatcctcccctccgggttttcacactgggcgaagggaggactcctgagctctgcctcttccagtaacattgaggattactgtgttttgtgagagctcgctaggcgccctaagcaacagagttctgagaaatcgagaaacatgataaggaattggctgactatttttatcctttttcccctgaagctcgtagagaaatgtgagtcaagcgtcagcctcactgttcctcctgtcgtaaagctggagaacggcagctcgaccaacgtcagcctcaccctgcggttgtggtgcctcctggagtgacaaactcctcttttcaagtgacatctcaaaatgttggacaacttactgtttatctacatggaaatcactccaatcagaccggcccgaggatacgctttcttgtgatccgcagcagcgccattagc

SEQ ID NO: 124115 - DNA, 565 bp, Homo sapiens
  Payload ID: 4369
  Gene Symbol: CTNS
  Gene Name: cystinosin, lysosomal cystine transporter
  ENST ID: ENST00000574776
  CDS Start-End: 506-565
cccaaagtctagccgggcaggggaacgcggtgcattcctgaccggcacctggcgaggctcatgcgtcccgtgagggcggttcctcgagcctgggggcgctcagattgctttggagacgctgagagaacctttgcgagagcgccggttgacgtgcggagtgcggggctccgggggactgagcagcacgagaccccatcctcccctccgggttttcacactgggcgaagggaggactcctgagctctgcctcttccagtaacattgaggattactgtgttttgtgagagctcgctaggcgccctaagcaacagagttctgagaaatcgagaaacatgataaggaattggctgactatttttatcctttttcccctgaagctcgtagagaaatgtgcccgaggatacgctttcttgtgatccgcagcagcgccattagcatcataaaccaggtgattggctggatctactttgtggcctggtccatctccttctaccctcaggtgatcatgaattggaggcggaaaagtgtcattggtctgagcttcgacttcgtggctctgaacctg

SEQ ID NO: 124116 - DNA, 3386 bp, Homo sapiens
  Payload ID: 4370
  Gene Symbol: CDADC1
  Gene Name: cytidine and dCMP deaminase domain containing 1
  Uniprot ID: Q9BWV3
  ENST ID: ENST00000251108
  CDS Start-End: 114-1658
agtgggccgttgccttacagttgctgagaggaggcgagaggcgggggcgctagggccgagatcatgtctgactgggagaggtttccttggcagcagaggacgctaggtttgggatgaaagaagctgggcagatgcaaaatctggagagcgcgagggccgggcggtcagtcagcacccagactggcagcatgaccggtcagataccaaggctttctaaagtcaaccttttcactctgctcagcctctggatggagctctttccagcagaagcccagcggcaaaaatctcagaaaaatgaagagggaaagcatggacccttaggagataatgaagagaggaccagagtatctactgacaaaagacaggtaaagagaactggtcttgtggtggtgaaaaacatgaaaattgttggtctccactgttctagtgaagatttacatgccgggcagattgctcttattaaacatgggtcaaggctgaaaaactgtgatctttatttttccagaaaaccatgttctgcttgtttgaaaatgattgtaaatgctggagttaaccgaatttcatactggcctgctgatccagaaataagtttgcttacggaggcttctagttctgaagatgcaaagttagatgccaaagcagtggaaagattgaagtcaaacagtcgggcccatgtgtgtgtcttacttcaacctttggtgtgttatatggtgcagtttgtagaggagacctcttacaaatgtgactttattcaaaaaattacaaaaacattgccggatgctaacactgacttttattatgaatgtaaacaagaaagaataaaagaatatgaaatgttatttttggtttcaaatgaagaaatgcataagcaaatactgatgactataggtttggagaacctgtgtgaaaatccatactttagcaatctaaggcaaaacatgaaagaccttatcctacttttggccacagtagcttccagtgtgccgaactttaaacacttcggattttaccgtagcaatccagaacagattaatgaaattcacaatcaaagtttgccacaggaaattgcaaggcactgcatggttcaggccaggttattggcatatcgaactgaggatcataaaacaggagttggggcagtcatttgggcagaagggaaatctagaagttgtgatggaacaggtgccatgtactttgtaggatgtggttacaatgcttttcctgttggatctgagtatgctgacttcccacacatggatgacaagcagaaagacagagaaataaggaaattcagatacatcatacatgcggaacagaatgccttgacatttaggtgtcaagaaataaaaccagaagaaagaagcatgatttttgtgacaaagtgcccatgtgatgagtgtgtacctttaattaaaggtgcaggcataaaacaaatctatgcaggagatgtagatgttggaaaaaagaaggcagacatctcttacatgaggttcggggagcttgaaggtgttagcaaatttacgtggcagctgaatccatcaggagcttatggtcttgaacaaaatgagcctgaaaggagagaaaatggtgtgttgagacctgtcccacagaaggaagagcagcaccaggacaagaagctgcgcctcggaatccactaagaaggcctgtctacactgcaggggaacctcaagaacttttcattgcacttctaaaattcagccttgttcattcagaaaataaggatggattttgtgaataattgaaaagattttttaaggaagctaatttatttctaggatacaaatggtgttaataagaatatttgtcttttagatttatgtgtgggttttccataatgtagtagtgtgttattttattacacgaaatgagggagcaataacttcaaccaatgtaatcaccaacagggactgatttctatttatcttgactttatattagccaatttgaaagggtctgcttcacaagaggtcatgcctctgcagggaatcacacaccttttgagaaatattaattcttttgaattacaagagtgacagttagtaaactgctccagggaaataagtgtcatcttttaagagtcagtgtatagcaaaccaaaagatcacatttatacccaaagctttctagtaatcagaatttacttaattagaattgactcataaaaataaagttagtggactttgtctccatttttaaagtatattttgtaaatgttaattctgtggtcctgtttatcacagactttgggtagcaataggaagagagtgttattctgagacagtgtcgctgcttgatatcactgactcttgaaatcactaacagtgaacctcaaatttggttatgatgttaacagagaagaaatatttgagtctggaatattgaaactagctttcctagaattccattaataaatgctgctcccccatatagtcttcccttctgtataattaacataggttgtctcatggctttgatcttcaaaaggaagagccttttaaaaacatttgccaacctcaagaataaatactgaaagtcttgaaagtatggtcatttcagctattccagattgctgtctgtgatttctcacatttttatttgctgagaaacattcagaaaattattccaaaaatgaaggtacattttctgttctctcctaggttagagaggggtggcctggggtgcttcatgagaaatgtcttcctggatctgcggtggtcaggtttgcctctgcttttgttccctgcctttccgccacatcacacggcctcactgggcttcctaccagtttctcagaattacacgcacgaccatccaaacattggctccatgccagggctgtgactgcagcctgtgtaggaccatggggagttcagagtcatcatacaaggcagccaagaactgccataaacactacacagatggagggcatgggataggacaggagaggaggtgatgtacacttagaggtaactaaggctagtttgaaaaccgtgaattaagatattcttatcagtataaaaacactgagattgcttacctcccaaattgctttattgtattaactctcatgcttcagctcttggatttgttgtttctaactaacatgtcatgtacaccaaacattttataaatcaatcagtaaatattttgtaagacccaaaatcctggcatattgccaggtctgtggatttgcctgttgggtgttgggatgggatatcagaggaagaagcatacaagtgggaaaaactgtgattagaaagggaaaaataggcatttccacagtactattaagagaggcatgataatgccattttttttcttctgtacaactggtcagatttcaataaataatcattgatggttta

SEQ ID NO: 124117 - DNA, 290 bp, Homo sapiens
  Payload ID: 4370
  Gene Symbol: CDADC1
  Gene Name: cytidine and dCMP deaminase domain containing 1
  ENST ID: ENST00000429346
  CDS Start-End: 1-290
ctgggcagatgcaaaatctggagagcgcgagggccgggcggtcagtcagcacccagactggcagcatgaccggtcagataccaaggctttctaaagtcaaccttttcactctgctcagcctctggatggagctctttccagcagaagcccagcggcaaaaatctcagaaaaatgaagagggaaagcatggacccttaggagataatgaagagaggaccagagtatctactgacaaaagacaggattactggaagcagctaagatgcctagatgaaaggtttaccatcact

SEQ ID NO: 124118 - DNA, 688 bp, Homo sapiens
  Payload ID: 4370
  Gene Symbol: CDADC1
  Gene Name: cytidine and dCMP deaminase domain containing 1
  ENST ID: ENST00000496061
  CDS Start-End: 98-559
acagttgctgagaggaggcgagaggcgggggcgctagggccgagatcatgtctgactgggagaggtttccttggcagcagaggacgctaggtttgggatgaaagaagctgggcagatgcaaaatctggagagcgcgagggccgggcggtcagtcagcacccagactggcagcatgaccggtcagataccaaggctttctaaagtcaaccttttcactctgctcagcctctggatggagctctttccagcagaagcccagcggcaaaaatctcagaaaaatgaagagggaaagcatggacccttaggagataatgaagagaggaccagagtatctactgacaaaagacaggtaaagagaactggtcttgtggtggtgaaaaacatgaaaattgttggtctccactgttctagtgaagatttacatgccgggcagattgctcttattaaacatgggtcaaggctgaaaaactgtgatctttatttttccagaaaaccatgttctgcttgtttgaaaatgattgtaaatggattactggaagcagctaagatgcctagatgaaaggtttaccatcactgctggttaggaaatggattatgagaactcgaacagagggaaggtgaaatgcaaccggaggaaacactctgatatgagctggagttaaccgaatttcatactggcctgctgatc

SEQ ID NO: 124119 - DNA, 644 bp, Homo sapiens
  Payload ID: 4370
  Gene Symbol: CDADC1
  Gene Name: cytidine and dCMP deaminase domain containing 1
  ENST ID: ENST00000484126
  CDS Start-End: 62-370
gggccgagatcatgtctgactgggagaggtttccttggcagcagaggacgctaggtttgggatgaaagaagctgggcagatgcaaaatctggagagcgcgagggccgggcggtcagtcagcacccagactggcagcatgaccggtcagataccaaggctttctaaagtcaaccttttcactctgctcagcctctggatggagctctttccagcagaagcccagcggcaaaaatctcagaaaaatgaagagggaaagcatggacccttaggagataatgaagagaggaccagagtatctactgacaaaagacagaaaaccatgttctgcttgtttgaaaatgattgtaaatggattactggaagcagctaagatgcctagatgaaaggtttaccatcactgctggttaggaaatggattatgagaactcgaacagagggaaggtgaaatgcaaccggaggaaacactctgatatgagctggagttaaccgaatttcatactggcctgctgatccagaaataagtttgcttacggaggcttctagttctgaagatgcaaagttagatgccaaagcagtggaaagattgaagtcaaacagtcgggcccatgtgtgtgtcttacttcaacctttggtgtgttatatgg

SEQ ID NO: 124120 - DNA, 963 bp, Homo sapiens
  Payload ID: 4371
  Gene Symbol: CDA
  Gene Name: cytidine deaminase
  Uniprot ID: P32320
  ENST ID: ENST00000375071
  CDS Start-End: 183-623
gtccaaaccatgggaggctcctctcctagaccctgcatcctgaaagctgcgtacctgagagcctgcggtctggctgcagggacacacccaaggggaggagctgcaatcgtgtctggggccccagcccaggctggccggagctcctgtttcccgctgctctgctgcctgcccggggtaccaacatggcccagaagcgtcctgcctgcaccctgaagcctgagtgtgtccagcagctgctggtttgctcccaggaggccaagaagtcagcctactgcccctacagtcactttcctgtgggggctgccctgctcacccaggaggggagaatcttcaaagggtgcaacatagaaaatgcctgctacccgctgggcatctgtgctgaacggaccgctatccagaaggccgtctcagaagggtacaaggatttcagggcaattgctatcgccagtgacatgcaagatgattttatctctccatgtggggcctgcaggcaagtcatgagagagtttggcaccaactggcccgtgtacatgaccaagccggatggtacgtatattgtcatgacggtccaggagctgctgccctcctcctttgggcctgaggacctgcagaagacccagtgacagccagagaatgcccactgcctgtaacagccacctggagaacttcataaagatgtctcacagccctggggacacctgcccagtgggccccagccctacagggactgggcaaagatgatgtttccagattacactccagcctgagtcagcacccctcctagcaacctgccttgggacttagaacaccgccgccccctgccccacctttcctttccttcctgtgggccctctttcaaagtccagcctagtctggactgcttccccatcagccttcccaaggttctatcctgttccgagcaacttttctaattataaacatcacagaacatcctggatcaaa

SEQ ID NO: 124121 - DNA, 1212 bp, Homo sapiens
  Payload ID: 4372
  Gene Symbol: CMPK1
  Gene Name: cytidine monophosphate (UMP-CMP) kinase 1, cytosolic
  ENST ID: ENST00000371871
  CDS Start-End: 138-647
gacgcccgggcagccacggcggcggggccgcggcgggcgccggctcagcccgcccctttctcccgccgcctccccgccccgccccgcgccgcgccggccgctgtcagctccctcagcgtccggccgaggcgcggtgtatgctgagccgctgccgcagcgggctgctccacgtcctgggccttagcttcctgctgcagacccgccggccgattctcctctgctctccacgtctcatgaagccgctggtcgtgttcgtcctcggcggccccggcgccggcaaggggacccagtgcgcccgcatcgtcgagaaatatggctacacacacctttctgcaggagagctgcttcgtgatgaaaggaagaacccagattcacagtatggtgaacttattgaaaagtacattaaagaaggaaagattgtaccagttgagataaccatcagtttattaaagagggaaatggatcagacaatggctgccaatgctcagaagaataaattcttgattgatgggtttccaagaaatcaagacaaccttcaaggatggaacaagaccatggatgggaaggcagatgtatctttcgttctcttttttgactgtaataatgagaattcagacctaccttcagtcaacaaagccaattattgacttatatgaagaaatggggaaagtcaagaaaatagatgcttctaaatctgttgatgaagtttttgatgaagttgtgcagatttttgacaaggaaggctaattctaaacctgaaggcatccttgaaatcatgcttgaatattgctttgatagctgctatcatgacccctttttaaggcaattctaatctttcataactacatctcaattagtggctggaaagtacatggtaaaacaaagtaaatttttttatgttcttttttttggtcacaggagtagacagtgaattcaggtttaacttcaccttagttatggtgctcaccaaacgaagggtatcagctattttttttaaaattcaaaaagaatatcccttttatagtttgtgccttctgtgagcaaaactttttagtacgcgtatatatccctctagtaatcacaacattttaggatttagggatacccgcttcctctttttcttgcaagttttaaatttccaaccttaagtgaatttgtggaccaaatttcaaaggaactttttgtgtagtcagttcttgcacaatgtgtttg

SEQ ID NO: 124122 - DNA, 2930 bp, Homo sapiens
  Payload ID: 4372
  Gene Symbol: CMPK1
  Gene Name: cytidine monophosphate (UMP-CMP) kinase 1, cytosolic
  Uniprot ID: P30085
  ENST ID: ENST00000371873
  CDS Start-End: 150-836
gacagggccgcggacgcccgggcagccacggcggcggggccgcggcgggcgccggctcagcccgcccctttctcccgccgcctccccgccccgccccgcgccgcgccggccgctgtcagctccctcagcgtccggccgaggcgcggtgtatgctgagccgctgccgcagcgggctgctccacgtcctgggccttagcttcctgctgcagacccgccggccgattctcctctgctctccacgtctcatgaagccgctggtcgtgttcgtcctcggcggccccggcgccggcaaggggacccagtgcgcccgcatcgtcgagaaatatggctacacacacctttctgcaggagagctgcttcgtgatgaaaggaagaacccagattcacagtatggtgaacttattgaaaagtacattaaagaaggaaagattgtaccagttgagataaccatcagtttattaaagagggaaatggatcagacaatggctgccaatgctcagaagaataaattcttgattgatgggtttccaagaaatcaagacaaccttcaaggatggaacaagaccatggatgggaaggcagatgtatctttcgttctcttttttgactgtaataatgagatttgtattgaacgatgtcttgagaggggaaagagtagtggtaggagtgatgacaacagagagagcttggaaaagagaattcagacctaccttcagtcaacaaagccaattattgacttatatgaagaaatggggaaagtcaagaaaatagatgcttctaaatctgttgatgaagtttttgatgaagttgtgcagatttttgacaaggaaggctaattctaaacctgaaggcatccttgaaatcatgcttgaatattgctttgatagctgctatcatgacccctttttaaggcaattctaatctttcataactacatctcaattagtggctggaaagtacatggtaaaacaaagtaaatttttttatgttcttttttttggtcacaggagtagacagtgaattcaggtttaacttcaccttagttatggtgctcaccaaacgaagggtatcagctattttttttaaaattcaaaaagaatatcccttttatagtttgtgccttctgtgagcaaaactttttagtacgcgtatatatccctctagtaatcacaacattttaggatttagggatacccgcttcctctttttcttgcaagttttaaatttccaaccttaagtgaatttgtggaccaaatttcaaaggaactttttgtgtagtcagttcttgcacaatgtgtttggtaaacaaactcaaaatggattcttaggagcattttagtgtttattaaataactgaccatttgctgtagaaagatgagaaaacttaagctttgttttactacaacttgtacaaagttgtatgacagggcatattctttgcttccaagatttgggttgggggcactaggggttcagagcctggcagaattgtcagctttagtctgacataatctaagggtatggggcaaggatcacatctaatgcttgtgttccttatactctattatatagtgttattcatgattcagctgatcttaacaaaattcgtagcagtggaaccttgaaatgcatgtggctagatttatgctaaaatgattctcagttagcattttagtaacacttcaaaggtttttttttgtttgttttctagacttaataaaagcttaggattaattagaagaagcaatctagttaaatttcccatttgtattttattttcttgaatacttttttcatagttatttgtttaaaaagatttaaaaatcattgcactttggtcagaaaaataataaatatatcttataaatgtttgattcccttccttgctatttttattcagtagatttttgtttggcatcatgttgaagcaccgaaagataaatgatttttaaaaggctatagagtccaaaggaatattcttttacaccaattcttcctttaaaaatctctgaggaatttgttttcgccttacttttttttcttctgtcacaatgctaagtggtatccgaggttcttaatatgagatttaaaatcttaaaatgtttcttattttcagcacttacatcatttggtacacagggtcaaatagggcaaataattttgtctttgtataatagatttgatatttaaagtcactggaaataggacaagttaatggatgtttttatattttaatagaatcatttatttctatgtgttatgaaattcacttaatgataaatttttcaacatacttgccattagaaaacaaagtattgctaagtactataacatattggccactaaaattcatattgagattatcttggtttcttggaagagataggaatgagttcttatctagtgttgcaggccagcaaatacagaggtggtttaatcaaacagctctagtatgaagcaagagtaaagactaaggtttcgagagcattcctactcacataagtgaagaaatctgtcagataggaatctaaatatttatagtgagattgtgaaagcaaccttaaagttttgaagaagactgatgagactaggtgctttgcttcctttcatcaggtatctttctgtggcatttgagaacagaaaccaagaaacatggtaattactaaattatgaggctttgctttttgtttgcttttaagtagaaaaacatgttggcaacattgagttttggagttgattgagataatatgacttaactagttttgtcattccatttgttaaagatacagtcaccaagaatgttttgagttttttgaaagaccccaatttaagccttgcttatttttaaattatttccattcagtgatgttggatgtatatcagttatttagtaaataatctcaataaattttgtgctgtggcctttgcta

SEQ ID NO: 124123 - DNA, 950 bp, Homo sapiens
  Payload ID: 4372
  Gene Symbol: CMPK1
  Gene Name: cytidine monophosphate (UMP-CMP) kinase 1, cytosolic
  Uniprot ID: P30085
  ENST ID: ENST00000450808
  CDS Start-End: 33-572
agctccctcagcgtccggccgaggcgcggtgtatgctgagccgctgccgcagcgggctgctccacgtcctgggccttagcttcctgctgcagacccgccggccgattctcctctgctctccacgtctcatgaagccgctggtcgtgttcgtcctcggcggccccggcgccggcaaggggacccagtgcgcccgcatcgtcgaggaaatggatcagacaatggctgccaatgctcagaagaataaattcttgattgatgggtttccaagaaatcaagacaaccttcaaggatggaacaagaccatggatgggaaggcagatgtatctttcgttctcttttttgactgtaataatgagatttgtattgaacgatgtcttgagaggggaaagagtagtggtaggagtgatgacaacagagagagcttggaaaagagaattcagacctaccttcagtcaacaaagccaattattgacttatatgaagaaatggggaaagtcaagaaaatagatgcttctaaatctgttgatgaagtttttgatgaagttgtgcagatttttgacaaggaaggctaattctaaacctgaaggcatccttgaaatcatgcttgaatattgctttgatagctgctatcatgacccctttttaaggcaattctaatctttcataactacatctcaattagtggctggaaagtacatggtaaaacaaagtaaatttttttatgttcttttttttggtcacaggagtagacagtgaattcaggtttaacttcaccttagttatggtgctcaccaaacgaagggtatcagctattttttttaaaattcaaaaagaatatcccttttatagtttgtgccttctgtgagcaaaactttttagtacgcgtatatatccctctagtaatcacaacattttaggatttagggatacccgcttcctctttttcttgc

SEQ ID NO: 124124 - DNA, 816 bp, Homo sapiens
  Payload ID: 4372
  Gene Symbol: CMPK1
  Gene Name: cytidine monophosphate (UMP-CMP) kinase 1, cytosolic
  ENST ID: ENST00000471289
  CDS Start-End: 68-244
tccccgccccgccccgcgccgcgccggccgctgtcagctccctcagcgtccggccgaggcgcggtgtatgctgagccgctgccgcagcgggctgctccacgtcctgggccttagcttcctgctgcagacccgccggccgattctcctctgctctccacgtctcatgaagccgctggtcgtgttcgtcctcggcggccccggcgccggcaaggggacccagtgcgcccgcatcgtcgagggatgacatcttgctatggtgcataggctgatctcaaactcctggcctcgagcaaccctctcgtcttgaccttccaaagtgctgagattacaggcatgagccacagtgcgtagtccctgtttttagaagtttgttcttcaagagattcttctagttgtaacatctaataatgatattttgctgtggctgttagtatagtatagtatgtgtagatgtcatttttggtagcatacatattatttctgttttataaataaacagatctaagaaagattaaacaaattacccactgtcacactgggttgtgacagagttataaaactttagttttagttataaaaccttaagcactctagttcagtgttctgagtgtgtgatttcatgtaaggttcaggttcttgtgatctttgctgagttctttgtgtttctccaaatttatttccccattagtttgataattttgcaaatgctcaaatgttatgtttgcttaatattattatttaggattctgtctcctttgtacatttttctggtgttgattcttaaattcaaataaattctagttcctaaagagcacc

SEQ ID NO: 124125 - DNA, 2884 bp, Homo sapiens
  Payload ID: 4373
  Gene Symbol: CMPK2
  Gene Name: cytidine monophosphate (UMP-CMP) kinase 2, mitochondrial
  Uniprot ID: Q5EBM0
  ENST ID: ENST00000256722
  CDS Start-End: 1-1350
atggccttcgcccgccggctcctgcgcgggccactgtcggggccgctgctcgggcggcgcggggtctgcgctggggccatggctccgccgcgccgcttcgtcctggagcttcccgactgcaccctggctcacttcgccctaggcgccgacgcccccggcgacgcagacgcccccgacccccgcctggcggcgctgctggggcccccggagcgcagctactcgctgtgcgtgcccgtgaccccggacgccggctgcggggcccgggtccgggcggcgcggctgcaccagcgcctgctgcaccagctgcgccgcggccccttccagcggtgccagctgctcaggctgctctgctactgcccgggcggccaggccggcggcgcacagcaaggcttcctgctgcgcgaccccctggatgaccctgacacccggcaagcgctgctcgagctgctgggcgcctgtcaggaggcaccacgcccgcacttgggcgagttcgaggccgacccgcgcggccagctgtggcagcgcctctgggaggtgcaagacggcaggcggctgcaggtgggctgcgcacaggtcgtgcccgtcccggagcccccgctgcacccggtggtgccagacttgcccagttccgtggtcttcccggaccgggaagccgcccgggccgttttggaggagtgtacctcctttattcctgaagcccgggcagtgcttgacctggtcgaccagtgcccaaaacagatccagaaaggaaagttccaggttgttgccatcgaaggactggatgccacgggtaaaaccacggtgacccagtcagtggcagattcacttaaggctgtcctcttaaagtcaccaccctcttgcattggccagtggaggaagatctttgatgatgaaccaactatcattagaagagctttttactctttgggcaattatattgtggcctccgaaatagctaaagaatctgccaaatctcctgtgattgtagacaggtactggcacagcacggccacctatgccatagccactgaggtgagtgggggtctccagcacctgcccccagcccatcaccctgtgtaccagtggccagaggacctgctcaaacctgaccttatcctgctgctcactgtgagtcctgaggagaggttgcagaggctgcagggccggggcatggagaagaccagggaagaagcagaacttgaggccaacagtgtgtttcgtcaaaaggtagaaatgtcctaccagcggatggagaatcctggctgccatgtggttgatgccagcccctccagagaaaaggtcctgcagacggtattaagcctaatccagaatagttttagtgaaccgtagttactctggccaggtgccacgtctaactagattagatgttgtttgaaacatctacatccaccatttgttatgcagtgttcccaaatttctgttctacaagcatgttgtgtggcagaaaactggagaccaggcatcttaattttacttcagccatcgtaccctcttctgactgatggacccgtcatcacaaaggtccctctcatcatgttccagtgagaggccagcgattgctttcttcctggcatagtaaacattttcttggaacatatgtttcacttaatcactaccaaatatctggaagacctgtcttactcagacagcaccaggtgtacagaagcagcagacaagatcttccagatcagcagggagaccccggagcctctgcttctcctacactggcatgctgatgagatcgtgacatgcccacattggcttcttccacatctggttgcactcgtcatgatgggctcgctgcatctccctcagtcccaaattctagagccaagtgttcctgcagaggctgtctatgtgtcctggctgcccaaggacactcctgcagagccatttttgggtaaggaacacttacaaagaaggcattgatcttgtgtctgaggctcagagcccttttgataggcttctgagtcatatataaagacattcaagccaagatgctccaactgcaaatataccaaccttctctgaattatattttgcttatttatatttcttttctttttttctaaagtatggctctgaatagaatgcacattttccattgaactggatgcatttcatttagccaatccagtaatttatttatattaatctatacataatatgtttcctcagcataggagctatgattcattaattaaaagtggagtcaaaacgctaaatgcaatgtttgttgtgtattttcattacacaaacttaatttgtcttgttaaataagtacagtggatcttggagtgggatttcttggtaaattatcttgcacttgaatgtctcatgattacatatgaaatcgctttgacatatctttagacagaaaaaagtagctgagtgagggggaaattatagagctgtgtgactttagggagtaggttgaaccaggtgattacctaaaattccttccagttcaaaggcagataaatctgtaaattattttatcctatctaccatttcttaagaagacattactccaaaataattaaatttaaggctttatcaggtctgcatatagaatcttaaattctaataaagtttcatgttaatgtcataggatttttaaaagagctataggtaatttctatataatatgtgtatattaaaatgtaattgatttcagttgaaagtattttaaagctgataaatagcattagggttctttgcaatgtggtatctagctgtattattggttttatttactttaaacattttgaaaagcttatactggcagcctagaaaaacaaacaattaatgtatctttatgtccctggcacatgaataaactttgctgtggtttactaatcta

SEQ ID NO: 124126 - DNA, 2042 bp, Homo sapiens
  Payload ID: 4373
  Gene Symbol: CMPK2
  Gene Name: cytidine monophosphate (UMP-CMP) kinase 2, mitochondrial
  Uniprot ID: Q5EBM0
  ENST ID: ENST00000404168
  CDS Start-End: 17-1246
cgtcgctgaggcgcccatggccttcgcccgccggctcctgcgcgggccactgtcggggccgctgctcgggcggcgcggggtctgcgctggggccatggctccgccgcgccgcttcgtcctggagcttcccgactgcaccctggctcacttcgccctaggcgccgacgcccccggcgacgcagacgcccccgacccccgcctggcggcgctgctggggcccccggagcgcagctactcgctgtgcgtgcccgtgaccccggacgccggctgcggggcccgggtccgggcggcgcggctgcaccagcgcctgctgcaccagctgcgccgcggccccttccagcggtgccagctgctcaggctgctctgctactgcccgggcggccaggccggcggcgcacagcaaggcttcctgctgcgcgaccccctggatgaccctgacacccggcaagcgctgctcgagctgctgggcgcctgtcaggaggcaccacgcccgcacttgggcgagttcgaggccgacccgcgcggccagctgtggcagcgcctctgggaggtgcaagacggcaggcggctgcaggtgggctgcgcacaggtcgtgcccgtcccggagcccccgctgcacccggtggtgccagacttgcccagttccgtggtcttcccggaccgggaagccgcccgggccgttttggaggagtgtacctcctttattcctgaagcccgggcagtgcttgacctggtcgaccagtgcccaaaacagatccagaaaggaaagttccaggttgttgccatcgaaggactggatgccacgggtaaaaccacggtgacccagtcagtggcagattcacttaaggctgtcctcttaaagtcaccaccctcttgcattggccagtggaggaagatctttgatgatgaaccaactatcattagaagagctttttactctttgggcaattatattgtggcctccgaaatagctaaagaatctgccaaatctcctgtgattgtagacaggtactggcacagcacggccacctatgccatagccactgaggtgagtgggggtctccagcacctgcccccagcccatcaccctgtgtaccagtggccagaggacctgctcaaacctgaccttatcctgctgctcactgtgagtcctgaggagaggttgcagaggctgcagggccggggcatggagaagaccagggaagaagcagaacttgaggccaacagtgtgtttcgtcaaaagtaggtgtcccagtgcaatgcaatgtgagcggcaggcattcctgaagggagatgaaccactggcactggctttaggattgtgaggaagtgatattgtttccagttttcaaacacaagagacaacatcctctaagttacttcagccccttccaatgggcttgtcaccacagggctgcagcattgttatcttaaagcaaaggtcatcggactagggatcagaccctgccactgatcctggctgtgctaggagcagctgcacctgggtaagacagtaagtgtctctgtgcctcagtttccccagtcatagtataatcacacagagcactagataacgagctcatagtaacatctacctattagatgcttcccgtgtgtcaggcattttactgatgttatgtcatccttgtgaggaaaacattagccgtattttacagtttacaactttaaggctcaaaggattaagtgatttgtctaaatgtacataactattcactagtaaaaccgggattaaaatctttctgattttgcagccagtgtttttgttttaattagaaagttataaacacgactgcagaagagagtctggccaggcctcctgcctcatgactgagtatgaatcagttctacaccactgcctttaaaaactgaagcagaaatattttctctaactgaacaatgatagccctgttatcataacatagtaatgttataaataatggtagctgctgtgggtaaagatattatgttaagcaatttacttgtattaattccattaaacttcagtgaacatttgcaaggaa

SEQ ID NO: 124127 - DNA, 1224 bp, Homo sapiens
  Payload ID: 4373
  Gene Symbol: CMPK2
  Gene Name: cytidine monophosphate (UMP-CMP) kinase 2, mitochondrial
  Uniprot ID: Q5EBM0
  ENST ID: ENST00000458098
  CDS Start-End: 124-1224
aacgcttcgctttcgtttcccgctggcgcctggctccctccgggtttcgtttcccgccggcgcctggctcccgccaggtttcgtttccgaggcggggccgagggcggcgtcgctgaggcgcccatggccttcgcccgccggctcctgcgcgggccactgtcggggccgctgctcgggcggcgcggggtctgcgctggggccatggctccgccgcgccgcttcgtcctggagcttcccgactgcaccctggctcacttcgccctaggcgccgacgcccccggcgacgcagacgcccccgacccccgcctggcggcgctgctggggcccccggagcgcagctactcgctgtgcgtgcccgtgaccccggacgccggctgcggggcccgggtccgggcggcgcggctgcaccagcgcctgctgcaccagctgcgccgcggccccttccagcggtgccagctgctcaggctgctctgctactgcccgggcggccaggccggcggcgcacagcaaggcttcctgctgcgcgaccccctggatgaccctgacacccggcaagcgctgctcgagctgctgggcgcctgtcaggaggcaccacgcccgcacttgggcgagttcgaggccgacccgcgcggccagctgtggcagcgcctctgggaggtgcaagacggcaggcggctgcaggtgggctgcgcacaggtcgtgcccgtcccggagcccccgctgcacccggtggtgccagacttgcccagttccgtggtcttcccggaccgggaagccgcccgggccgttttggaggagtgtacctcctttattcctgaagcccgggcagtgcttgacctggtcgaccagtgcccaaaacagatccagaaaggaaagttccaggttgttgccatcgaaggactggatgccacgggtaaaaccacggtgacccagtcagtggcagattcacttaaggctgtcctcttaaagtcaccaccctcttgcattggccagtggaggaagatctttgatgatgaaccaactatcattagaagagctttttactctttgggcaattatattgtggcctccgaaatagctaaagaatctgccaaatctcctgtgattgtagacaggtcccagctgggaggaaccttataccatccttctctccacctgctcggcagtgaagtttgtgggactggaatcttggattcatcacactcgagtcaaggcctggaatga

SEQ ID NO: 124128 - DNA, 1787 bp, Homo sapiens
  Payload ID: 4374
  Gene Symbol: CMAS
  Gene Name: cytidine monophosphate N-acetylneuraminic acid synthetase
  Uniprot ID: Q8NFW8
  ENST ID: ENST00000229329
  CDS Start-End: 131-1435
gggggagggggcggggcgagggacggccgcgcgcgccagctgccaggcggggatcgggcggcgccgagctgaggtggtgagggactagctcccggatgtggagaagctggggagaaggcgtgggaggaagatggactcggtggagaagggggccgccacctccgtctccaacccgcgggggcgaccgtcccggggccggccgccgaagctgcagcgcaactctcgcggcggccagggccgaggtgtggagaagcccccgcacctggcagccctaattctggcccggggaggcagcaaaggcatccccctgaagaacattaagcacctggcgggggtcccgctcattggctgggtcctgcgtgcggccctggattcaggggccttccagagtgtatgggtttcgacagaccatgatgaaattgagaatgtggccaaacaatttggtgcacaagttcatcgaagaagttctgaagtttcaaaagacagctctacctcactagatgccatcatagaatttcttaattatcataatgaggttgacattgtaggaaatattcaagctacttctccatgtttacatcctactgatcttcaaaaagttgcagaaatgattcgagaagaaggatatgattctgttttctctgttgtgagacgccatcagtttcgatggagtgaaattcagaaaggagttcgtgaagtgaccgaacctctgaatttaaatccagctaaacggcctcgtcgacaagactgggatggagaattatatgaaaatggctcattttattttgctaaaagacatttgatagagatgggttacttgcagggtggaaaaatggcatactacgaaatgcgagctgaacatagtgtggatatagatgtggatattgattggcctattgcagagcaaagagtattaagatatggctattttggcaaagagaagcttaaggaaataaaacttttggtttgcaatattgatggatgtctcaccaatggccacatttatgtatcaggagaccaaaaagaaataatatcttatgatgtaaaagatgctattgggataagtttattaaagaaaagtggtattgaggtgaggctaatctcagaaagggcctgttcaaagcagacgctgtcttctttaaaactggattgcaaaatggaagtcagtgtatcagacaagctagcagttgtagatgaatggagaaaagaaatgggcctgtgctggaaagaagtggcatatcttggaaatgaagtgtctgatgaagagtgcttgaagagagtgggcctaagtggcgctcctgctgatgcctgttctactgcccagaaggctgttggatacatttgcaaatgtaatggtggccgtggtgccatccgagaatttgcagagcacatttgcctactaatggaaaaggttaataattcatgccaaaaatagaaattagcgtaatattgagaaaaaaatgatacagccttcttcagccagtttgcttttatttttgattaagtaaattccatgttgtaatgttacagagagtgtgatttggtttgtgatatatatatattgtgctctacttttctctttacgcaagataattatttagagactgattacagtctttctcagatttttagtaaatgcaagtaagaacatcatcaaagttcactttgtattgtaccctgtaaaactgtgtgtttgtgtgctttcaaagatgttgggattttatttatctggggacagtgtgtatggtaagacatgcccttctattaataaaactacatttctcaaa

SEQ ID NO: 124129 - DNA, 854 bp, Homo sapiens
  Payload ID: 4374
  Gene Symbol: CMAS
  Gene Name: cytidine monophosphate N-acetylneuraminic acid synthetase
  ENST ID: ENST00000535610
  CDS Start-End: 18-284
gaaggcgtgggaggaagatggactcggtggagaagggggccgccacctccgtctccaacccgcgggggcgaccgtcccggggccggccgccgaagctgcagcgcaactctcgcggcggccagggccgaggtgtggagaagcccccgcacctggcagccctaattctggcccggggaggcagcaaaggcatccccctgaagaacattaagcacctggcgggggtcccgctcattggctgggtcctgcgtgcggccctggattcaggggccttccagagaggttgacattgtaggaaatattcaagctacttctccatgtttacatcctactgatcttcaaaaagttgcagaaatgattcgagaagaaggatatgattctgttttctctgttgtgagacgccatcagtttcgatggagtgaaattcagaaaggagggtggaaaaatggcatactacgaaatgcgagctgaacatagtgtggatatagatgtggatattgattggcctattgcagagcaaagagtattaagatatggctattttggcaaagagaagcttaaggaaataaaacttttggtttgcaatattgatggatgtctcaccaatggccacatttatgtatcaggagaccaaaaagaaataatatcttatgatgtaaaagatgctattgggataagtttattaaagaaaagtggtattgaggtgaggctaatctcagaaagggcctgttcaaagcagacgctgtcttctttaaaactggattgcaaaatggaagtcagtgtatcagacaagctagcagttgtagatgaatggagaaaagaaatgggcctgtgctggaaagaagtggcatatcttg

SEQ ID NO: 124130 - DNA, 538 bp, Homo sapiens
  Payload ID: 4374
  Gene Symbol: CMAS
  Gene Name: cytidine monophosphate N-acetylneuraminic acid synthetase
  ENST ID: ENST00000538498
  CDS Start-End: 248-538
ggctgttaatttcttttgatatctgaacagtgtatgggtttcgacagaccatgatgaaattgagaatgtggccaaacaatttggtgcacaagttcatcgaagaagttctgaagtttcaaaagacagctctacctcactagatgccatcatagaatttcttaattatcataatgaggttgacattgtaggaaatattcaagctacttctccatgtttacatcctactgatcttcaaaaagttgcagaaatgattcgagaagaaggatatgattctgttttctctgttgtgagacgccatcagtttcgatggagtgaaattcagaaaggagttcgtgaagtgaccgaacctctgaatttaaatccagctaaacggcctcgtcgacaagactgggatggagaattatatgaaaatggctcattttattttgctaaaagacatttgatagagatgggttacttgcagggtggaaaaatggcatactacgaaatgcgagctgaacatagtgtggatatagatgtggatattgattggcctatt

SEQ ID NO: 124131 - DNA, 1575 bp, Homo sapiens
  Payload ID: 4374
  Gene Symbol: CMAS
  Gene Name: cytidine monophosphate N-acetylneuraminic acid synthetase
  Uniprot ID: Q8NFW8
  ENST ID: ENST00000534981
  CDS Start-End: 80-871
gatcgggcggcgccgagctgaggtggtgagggactagctcccggatgtggagaagctggggagaaggcgtgggaggaagatggactcggtggagaagggggccgccacctccgtctccaacccgcgggggcgaccgtcccggggccggccgccgaagctgcagcgcaactctcgcggcggccagggccgaggtgtggagaagcccccgcacctggcagccctaattctggcccggggaggcagcaaaggcatccccctgaagaacattaagcacctggcgggggtcccgctcattggctgggtcctgcgtgcggccctggattcaggggccttccagagtgtatgggtttcgacagaccatgatgaaattgagaatgtggccaaacaatttggtgcacaagttcatcgaagaagttctgaagtttcaaaagacagctctacctcactagatgccatcatagaatttcttaattatcataatgaggttgacattgtaggaaatattcaagctacttctccatgtttacatcctactgatcttcaaaaagttgcagaaatgattcgagaagaaggatatgattctgttttctctgttgtgagacgccatcagtttcgatggagtgaaattcagaaaggagttcgtgaagtgaccgaacctctgaatttaaatccagctaaacggcctcgtcgacaagactgggatggagaattatatgaaaatggctcattttattttgctaaaagacatttgatagagatgggttacttgcagggtggaaaaatggcatactacgaaatgcgagctgaacatagtgtggatatagatgtggatattgattggcctattgcagagcaaagagtattaaggtgaggctaatctcagaaagggcctgttcaaagcagacgctgtcttctttaaaactggattgcaaaatggaagtcagtgtatcagacaagctagcagttgtagatgaatggagaaaagaaatgggcctgtgctggaaagaagtggcatatcttggaaatgaagtgtctgatgaagagtgcttgaagagagtgggcctaagtggcgctcctgctgatgcctgttctactgcccagaaggctgttggatacatttgcaaatgtaatggtggccgtggtgccatccgagaatttgcagagcacatttgcctactaatggaaaaggttaataattcatgccaaaaatagaaattagcgtaatattgagaaaaaaatgatacagccttcttcagccagtttgcttttatttttgattaagtaaattccatgttgtaatgttacagagagtgtgatttggtttgtgatatatatatattgtgctctacttttctctttacgcaagataattatttagagactgattacagtctttctcagatttttagtaaatgcaagtaagaacatcatcaaagttcactttgtattgtaccctgtaaaactgtgtgtttgtgtgctttcaaagatgttgggattttatttatctggggacagtgtgtatggtaagacatgcccttctattaataaaactacatttctcaaacttgatgaaaa

SEQ ID NO: 124132 - DNA, 4365 bp, Homo sapiens
  Payload ID: 4375
  Gene Symbol: CYBRD1
  Gene Name: cytochrome b reductase 1
  Uniprot ID: Q53TN4
  ENST ID: ENST00000321348
  CDS Start-End: 199-1059
ccatttctgagttggggccagctccccacccccaagaggccccacattccgggccagcagcccagaaagtccctccccgcaggcggagacagccccaagaagtcgacgccccggtcccgccgcccggccactacccagagggctgccgccgcctctccaagttcttgtggcccccgcggtgcggagtatggggcgctgatggccatggagggctactggcgcttcctggcgctgctggggtcggcactgctcgtcggcttcctgtcggtgatcttcgccctcgtctgggtcctccactaccgagaggggcttggctgggatgggagcgcactagagtttaactggcacccagtgctcatggtcaccggcttcgtcttcatccagggcatcgccatcatcgtctacagactgccgtggacctggaaatgcagcaagctcctgatgaaatccatccatgcagggttaaatgcagttgctgccattcttgcaattatctctgtggtggccgtgtttgagaaccacaatgttaacaatatagccaatatgtacagtctgcacagctgggttggactgatagctgtcatatgctatttgttacagcttctttcaggtttttcagtctttctgcttccatgggctccgctttctctccgagcatttctcatgcccatacatgtttattctggaattgtcatctttggaacagtgattgcaacagcacttatgggattgacagagaaactgattttttccctgagagatcctgcatacagtacattcccgccagaaggtgttttcgtaaatacgcttggccttctgatcctggtgttcggggccctcattttttggatagtcaccagaccgcaatggaaacgtcctaaggagccaaattctaccattcttcatccaaatggaggcactgaacagggagcaagaggttccatgccagcctactctggcaacaacatggacaaatcagattcagagttaaacagtgaagtagcagcaaggaaaagaaacttagctctggatgaggctgggcagagatctaccatgtaaaatgttgtagagatagagccatataacgtcacgtttcaaaactagctctacagttttgcttctcctattagccatatgataattgggctatgtagtatcaatatttactttaatcacaaaggatggtttcttgaaataatttgtattgattgaggcctatgaactgacctgaattggaaaggatgtgattaatataaataatagcagatataaattgtggttatgttacctttatcttgttgaggaccacaacattagcacggtgccttgtgcagaatagatactcaatatgtgaatatgtgtctactagtagttaattggataaactggcagcatccctggcctgttgtcatgcagtcatttcctgttaattctgggagacaatgatttcacaactagcgggaagcagtcctaaaagtttaaaatccgataaggaatatctgggacagggtttagatcatgactctacacagataccatgatgagagtatattaaagaaatttaggaaagcacctggttcctttctccccatgcctgccttctgctccctccccagctggtttgggctcaaattgtccctggagactagggtttatgttagggtattgatagattagagcaggtggttgaagagatcttctctggtcagacttggaagaatttccaaaactgaagttagccccaagacttccctagggttgatgtactttatgatccagatgctaaacttcttagaatgaaaatatgcttcaacacttaagtagcatacactgccctacaaacctcagagagcacttttccccaagttcttgtttttatttttgaaagtactcacacagcacttactatgctccaaacactcctctaagcactttacacatattagctcattcagtccccagacagacgggatgaagtaggtattgttactgttcccattttacaggtgagagatttgaagcctggggaggctagtaactcaccccaaggtcacacggctcatacatggtgggactgagactcagatgcaggcagtctggcacctcagtctggattctaaccatttcactaagctatttttgtcttgtactactttgacccacccctgaataaacctcaattgctggagtggggtgtagttattaaagggatgctttttaccttttgctgtttgctgtggcagattccccagataaccaaggaaaaggggccacccatacctggaaataggccatagggcccctactactgccaacaagccatggcctaccttgacacttgtttgatcttaaaattgtgtcttggtaacaaaagatttggacaggcatatctgtagctttcaagttaattaattgcaatatttttttcttcaggattttagctgctgaacaactttcagtttggagctaaaagagacctgtctcatggtctgcccttccctggggcaatagctagggtctttcctgatttttatggaattttaggggatattttgagctttgggttctcagtagtgaattgagacttggaggtgacttttcatgtttggagtatcatctctgtctgggatctgggctgacaaattaaaacctagagtagtgcttatgctgaaatgatacttttcattttttggttgatttttttgccttcccttcaattttaaactgaagcattttaatatgggtagaaactctacaccaaatacactaaacattttggtgcttagtggatttctttttaggtaactggtacttacttccaaagactgaatacaagccacactccatcatatcccttaaacttcatgaaaaaccattcaagatccccttgctgcaacactgttctcttcttctctactaaattctatttccaaaattggtaatagagccagaaggatccccagtacccagccctctgcctggcacaaagtggtagcacaattaaattcagtatgggtggagcatggtacagtcttggtgccatagaaggagtagttgcatagtcacacatcatttgataagttggatgttccattacatagaggaacacaaaattccagggtttttggaggaagggattagatagtgactaagccgccagaattgaggtggccattcctttttgtataggctaagaaacaggttatcagtgaaaagttaattatggctttggcactagaatagcactgttgcaaagtatttaagcaccccccatctcagccctttattttatctttcatgtgggctaatgtgaggataatcttacagatattataggaatttcttttctatctttatgaaaacaacgtatataaaatatatctagaaaacctttgtttgagactcttatttaatgggcttttgattctaatgataattgtacctttatctttcaaaagctgatatttcctacctaagcatctcccgagaaaaatatctcattaaaaagcccataaataataggggagaagaaagccttaggtatcaattccaaaacagtgattgaaatttcccaaaataattatggcttctgtcatctccagagataatctggcttggtttaccccataatctaatttcagaaaagaaagctttattttaacactcatctgaatcaacattaaagccttttctctcaaagcgtttattgagaaactcaaatgaatatactttttgaattactgtcatcaaaagtgtacggcttcctgtgctgcttgtgtcaaatggaacctgccctctaaagcactttctttcctttacttgcgtggtttcatgtaagctgtgctgtttagaaacaacatctcagactttacaaagaaatgacaaagaaggcaattgcactttttaagggatatcgacaagcagtttctgttttctaaaggacaaaatacagagtgtgtgtcatttttaattagattctttcccctgctgagttggaaattccagtgcagcactgattgaccacagttgccaatctaaaagcacaaagacagaagtaaagctttatgctaattttatttcaatatgatagaaaatttatcttggtatgtccttttttagataactccagcaggaaactgtaactgctatgtctttaggaaaatgtagaagaaagaacattattgttctttaattcctacaaggtactcgaaaaccttaagtgaaaaagatttctatctttttatcttagcgcatttatggaaaaaatattaactatcctgaatattttataattttgtaggaaaaatatgcatctattttttcttgacttcttttatatagtaataaaagttattttggaagctc

SEQ ID NO: 124133 - DNA, 3540 bp, Homo sapiens
  Payload ID: 4375
  Gene Symbol: CYBRD1
  Gene Name: cytochrome b reductase 1
  Uniprot ID: Q53TN4
  ENST ID: ENST00000375252
  CDS Start-End: 70-543
actacccagagggctgccgccgcctctccaagttcttgtggcccccgcggtgcggagtatggggcgctgatggccatggagggctactggcgcttcctggcgctgctggggtcggcactgctcgtcggcttcctgtcggtgatcttcgccctcgtctgggtcctccactaccgagaggggcttggctgggatgggagcgcactagagtttaactggcacccagtgctcatggtcaccggcttcgtcttcatccagggcatcgcttctttcaggtttttcagtctttctgcttccatgggctccgctttctctccgagcatttctcatgcccatacatgtttattctggaattgtcatctttggaacagtgattgcaacagcacttatgggattgacagagaaactgattttttccctgagagatcctgcatacagtacattcccgccagaaggtgttttcgtaaatacgcttggccttctgatcctggtgttcggggccctcattttttggatagtcaccagaccgcaatggaaacgtcctaaggagccaaattctaccattcttcatccaaatggaggcactgaacagggagcaagaggttccatgccagcctactctggcaacaacatggacaaatcagattcagagttaaacagtgaagtagcagcaaggaaaagaaacttagctctggatgaggctgggcagagatctaccatgtaaaatgttgtagagatagagccatataacgtcacgtttcaaaactagctctacagttttgcttctcctattagccatatgataattgggctatgtagtatcaatatttactttaatcacaaaggatggtttcttgaaataatttgtattgattgaggcctatgaactgacctgaattggaaaggatgtgattaatataaataatagcagatataaattgtggttatgttacctttatcttgttgaggaccacaacattagcacggtgccttgtgcagaatagatactcaatatgtgaatatgtgtctactagtagttaattggataaactggcagcatccctggcctgttgtcatgcagtcatttcctgttaattctgggagacaatgatttcacaactagcgggaagcagtcctaaaagtttaaaatccgataaggaatatctgggacagggtttagatcatgactctacacagataccatgatgagagtatattaaagaaatttaggaaagcacctggttcctttctccccatgcctgccttctgctccctccccagctggtttgggctcaaattgtccctggagactagggtttatgttagggtattgatagattagagcaggtggttgaagagatcttctctggtcagacttggaagaatttccaaaactgaagttagccccaagacttccctagggttgatgtactttatgatccagatgctaaacttcttagaatgaaaatatgcttcaacacttaagtagcatacactgccctacaaacctcagagagcacttttccccaagttcttgtttttatttttgaaagtactcacacagcacttactatgctccaaacactcctctaagcactttacacatattagctcattcagtccccagacagacgggatgaagtaggtattgttactgttcccattttacaggtgagagatttgaagcctggggaggctagtaactcaccccaaggtcacacggctcatacatggtgggactgagactcagatgcaggcagtctggcacctcagtctggattctaaccatttcactaagctatttttgtcttgtactactttgacccacccctgaataaacctcaattgctggagtggggtgtagttattaaagggatgctttttaccttttgctgtttgctgtggcagattccccagataaccaaggaaaaggggccacccatacctggaaataggccatagggcccctactactgccaacaagccatggcctaccttgacacttgtttgatcttaaaattgtgtcttggtaacaaaagatttggacaggcatatctgtagctttcaagttaattaattgcaatatttttttcttcaggattttagctgctgaacaactttcagtttggagctaaaagagacctgtctcatggtctgcccttccctggggcaatagctagggtctttcctgatttttatggaattttaggggatattttgagctttgggttctcagtagtgaattgagacttggaggtgacttttcatgtttggagtatcatctctgtctgggatctgggctgacaaattaaaacctagagtagtgcttatgctgaaatgatacttttcattttttggttgatttttttgccttcccttcaattttaaactgaagcattttaatatgggtagaaactctacaccaaatacactaaacattttggtgcttagtggatttctttttaggtaactggtacttacttccaaagactgaatacaagccacactccatcatatcccttaaacttcatgaaaaaccattcaagatccccttgctgcaacactgttctcttcttctctactaaattctatttccaaaattggtaatagagccagaaggatccccagtacccagccctctgcctggcacaaagtggtagcacaattaaattcagtatgggtggagcatggtacagtcttggtgccatagaaggagtagttgcatagtcacacatcatttgataagttggatgttccattacatagaggaacacaaaattccagggtttttggaggaagggattagatagtgactaagccgccagaattgaggtggccattcctttttgtataggctaagaaacaggttatcagtgaaaagttaattatggctttggcactagaatagcactgttgcaaagtatttaagcaccccccatctcagccctttattttatctttcatgtgggctaatgtgaggataatcttacagatattataggaatttcttttctatctttatgaaaacaacgtatataaaatatatctagaaaacctttgtttgagactcttatttaatgggcttttgattctaatgataattgtacctttatctttcaaaagctgatatttcctacctaagcatctcccgagaaaaatatctcattaaaaagcccataaataataggggagaagaaagccttaggtatcaattccaaaacagtgattgaaatttcccaaaataattatggcttctgtcatctccagagataatctggcttggtttaccccataatctaatttcagaaaagaaagctttattttaacactcatctgaatcaacattaaagccttttctctcaaagcgtttattgagaaactcaaatgaatatactttttgaattactgtcatcaaaagtgtacggcttcctgtgctgcttgtgtcaaatggaacctgccctctaaagcactttctttcctttacttgcgtggtttcatgtaagctgtgctgtttagaaacaacatctcagactttacaaagaa

SEQ ID NO: 124134 - DNA, 1493 bp, Homo sapiens
  Payload ID: 4375
  Gene Symbol: CYBRD1
  Gene Name: cytochrome b reductase 1
  Uniprot ID: Q53TN4
  ENST ID: ENST00000409484
  CDS Start-End: 27-713
gttactgaagccctctgcgagcttggatgctggacgagggagaggccatcatcgtctacagactgccgtggacctggaaatgcagcaagctcctgatgaaatccatccatgcagggttaaatgcagttgctgccattcttgcaattatctctgtggtggccgtgtttgagaaccacaatgttaacaatatagccaatatgtacagtctgcacagctgggttggactgatagctgtcatatgctatttgttacagcttctttcaggtttttcagtctttctgcttccatgggctccgctttctctccgagcatttctcatgcccatacatgtttattctggaattgtcatctttggaacagtgattgcaacagcacttatgggattgacagagaaactgattttttccctgagagatcctgcatacagtacattcccgccagaaggtgttttcgtaaatacgcttggccttctgatcctggtgttcggggccctcattttttggatagtcaccagaccgcaatggaaacgtcctaaggagccaaattctaccattcttcatccaaatggaggcactgaacagggagcaagaggttccatgccagcctactctggcaacaacatggacaaatcagattcagagttaaacagtgaagtagcagcaaggaaaagaaacttagctctggatgaggctgggcagagatctaccatgtaaaatgttgtagagatagagccatataacgtcacgtttcaaaactagctctacagttttgcttctcctattagccatatgataattgggctatgtagtatcaatatttactttaatcacaaaggatggtttcttgaaataatttgtattgattgaggcctatgaactgacctgaattggaaaggatgtgattaatataaataatagcagatataaattgtggttatgttacctttatcttgttgaggaccacaacattagcacggtgccttgtgcagaatagatactcaatatgtgaatatgtgtctactagtagttaattggataaactggcagcatccctggcctgttgtcatgcagtcatttcctgttaattctgggagacaatgatttcacaactagcgggaagcagtcctaaaagtttaaaatccgataaggaatatctgggacagggtttagatcatgactctacacagataccatgatgagagtatattaaagaaatttaggaaagcacctggttcctttctccccatgcctgccttctgctccctccccagctggtttgggctcaaattgtccctggagactagggtttatgttagggtattgatagattagagcaggtggttgaagagatcttctctggtcagacttggaagaatttccaaaactgaagttagccccaagacttccctagggttgatgtactttatgatccagatgctaaacttcttagaatgaaaatatgcttcaacacttaagtagcatacactgccctac

SEQ ID NO: 124135 - DNA, 682 bp, Homo sapiens
  Payload ID: 4375
  Gene Symbol: CYBRD1
  Gene Name: cytochrome b reductase 1
  ENST ID: ENST00000445146
  CDS Start-End: 159-682
agaaacttgagcccgggcgcgatgccggagcgccgcgcagtcgggccgctgcagcccacgcgccccggaaagtcgcccctgtggaccgagcctgcgcgatcgggggcgcggaaacactttcgcctcagccttttgctgaacttgcttccaggctgcagatgaggaggggaaggcagcggggaaaagattgccggagcgagaatttgcccgtatttgtaacatcctcggccctggccatcatcgtctacagactgccgtggacctggaaatgcagcaagctcctgatgaaatccatccatgcagggttaaatgcagttgctgccattcttgcaattatctctgtggtggccgtgtttgagaaccacaatgttaacaatatagccaatatgtacagtctgcacagctgggttggactgatagctgtcatatgctatttgttacagcttctttcaggtttttcagtctttctgcttccatgggctccgctttctctccgagcatttctcatgcccatacatgtttattctggaattgtcatctttggaacagtgattgcaacagcacttatgggattgacagagaaactgattttttccctgagagatcctgcatacagtacattcccgccagaaggtgttttcgtaaatacgcttggccttctgatcctggtgttcggggccct

SEQ ID NO: 124136 - DNA, 797 bp, Homo sapiens
  Payload ID: 4376
  Gene Symbol: CYBA
  Gene Name: cytochrome b-245, alpha polypeptide
  Uniprot ID: P13498
  ENST ID: ENST00000261623
  CDS Start-End: 140-727
gcaccctacagatgcgggtctccgcccagccgcggtcacctggggggctgggggcggggcctgggcggggcggggttcggccgggagcgcaggggcggcagtgcgcgcctagcagtgtcccagccgggttcgtgtcgccatggggcagatcgagtgggccatgtgggccaacgaacaggcgctggcgtccggcctgatcctcatcaccgggggcatcgtggccacagctgggcgcttcacccagtggtactttggtgcctactccattgtggcgggcgtgtttgtgtgcctgctggagtacccccgggggaagaggaagaagggctccaccatggagcgctggggacagaagtacatgaccgccgtggtgaagctgttcgggccctttaccaggaattactatgttcgggccgtcctgcatctcctgctctcggtgcccgccggcttcctgctggccaccatccttgggaccgcctgcctggccattgcgagcggcatctacctactggcggctgtgcgtggcgagcagtggacgcccatcgagcccaagccccgggagcggccgcagatcggaggcaccatcaagcagccgcccagcaaccccccgccgcggcccccggccgaggcccgcaagaagcccagcgaggaggaggctgcggtggcggcggggggacccccgggaggtccccaggtcaaccccatcccggtgaccgacgaggtcgtgtgacctcgccccggacctgccctcccgccaggtgcacccacctgcaataaatgcagcgaagccgggagcgcgt

SEQ ID NO: 124137 - DNA, 1085 bp, Homo sapiens
  Payload ID: 4376
  Gene Symbol: CYBA
  Gene Name: cytochrome b-245, alpha polypeptide
  ENST ID: ENST00000567174
  CDS Start-End: 29-661
gcagtgtcccagccgggttcgtgtcgccatggggcagatcgagtgggccatgtgggccaacgaacaggcgctggcgtccggcctgatcctcatcaccgggggcatcgtggccacagctgggcgcttcacccagtggtactttggtgcctactccattgtggcgggcgtgtttgtgtgcctgctggagtacccccgggggaagaggaagaagggctccaccatggagcgctggggacagaagtacatgaccgccgtggtgaagctgttcgggccctttaccaggaattactatgttcgggccgtcctgcatctcctgctctcggtgcccgccggcttcctgctggccaccatccttgggaccgcctgcctggccattgcgagcggcatctacctactgagccaagtccctcctgcccgcagaggcaactgccctccccttgctgtgcgtcttctagtgtgtgtgcgtgggaaaggtgcagcactttctgtgtacgccttccgcgtatggaagtggagttctgtttcaagcctcactgacctgccaccggcagaactctcctttagaaccccttcctgttgccaagtgctcatctgggctgttgctttgttttccgggggccacccgcatcccccccgtctccctgctgccacgcacagctagtggctcctggagacctcgggaggaattccttgtgctaaacccagagaggaattgctgggtcaggcatcagcctctgcaccgttcaccctgccgggctcagctgctcctcagcagacaacccaccaccagccatgtggccccatctctcccaccatgcactaggctttctcccacgcttgccagtttcacagcacgagctggccgtgtggagcttggactcgcccttctctgactgtggatttgagctgttggagtttcttctcccttgagttgcctgttcaaatcctttgcccatttttctattgtggtttttgtatttttctttttcttcttttttttttgagatggagtctcgcgccatcgcccaggctggagtgcagtggcgtgatctcggctcactgcaaccttcgcctcctgggttcaa

SEQ ID NO: 124138 - DNA, 439 bp, Homo sapiens
  Payload ID: 4376
  Gene Symbol: CYBA
  Gene Name: cytochrome b-245, alpha polypeptide
  ENST ID: ENST00000568278
  CDS Start-End: 3-439
ccatggggcagatcgagtgggccatgtgggccaacgaacaggcgctggcgtccggcctgatcctcatcaccgggggcatcgtggccacagctgggcgcttcacccagtggtactttggtgcctactccattgtggcgggcgtgtttgtgtgcctgctggagtacccccgggggaagaggaagaagggctccaccatggagcgctggggacagaagtacatgaccgccgtggtgaagctgttcgggccctttaccaggaattactatgttcgggccgtcctgcatctcctggcctgtgtctgctgtctagtgtgcaggatttgtaaggatccactccaaatccgaggagctccgatccgtcgccagggtctggggctctcggtgcccgccggcttcctgctggccaccatccttgggaccgcctgcctggccattgcgag

SEQ ID NO: 124139 - DNA, 221 bp, Homo sapiens
  Payload ID: 4376
  Gene Symbol: CYBA
  Gene Name: cytochrome b-245, alpha polypeptide
  ENST ID: ENST00000565588
  CDS Start-End: 1-221
atgaccgccgtggtgaagctgttcgggccctttaccaggaattactatgttcgggccgtcctgcatctcctgctctcggtgcccgccggcttcctgctggccaccatccttgggaccgcctgcctggccattgcgagcggcatctacctactgtgccccgcaggcggctgtgcgtggcgagcagtggacgcccatcgagcccaagccccgggagcggccgc

SEQ ID NO: 124140 - DNA, 1415 bp, Homo sapiens
  Payload ID: 4376
  Gene Symbol: CYBA
  Gene Name: cytochrome b-245, alpha polypeptide
  ENST ID: ENST00000569359
  CDS Start-End: 18-404
gccgggttcgtgtcgccatggggcagatcgagtgggccatgtgggccaacgaacaggcgctggcgtccggcctgatcctcatcaccgggggcatcgtggccacagctgggcgcttcacccagtggtactttggtgcctactccattgtggcgggcgtgtttgtgtgcctgctggagtacccccgggggaagaggaagaagggctccaccatggagcgctggggacagaagtacatgaccgccgtggtgaagctgttcgggccctttaccaggaattactatgttcgggccgtcctgcatctcctgctctcggtgcccgccggcttcctgctggccaccatccttgggaccgcctgcctggccattgcgagcggcatctacctactggtgagtggcgccctctgaggtcggccccggccacccccatccccagcccctgccctgacaccctcggacacgcatggcccttgaagccggctctgtaggctgagccaaggctgggagcaagtgtgagcctgggcgtgtgctcacagcacggcggggacgcagcggttgctgctgccatttttggcgtgtctagtgtgtcgggtcatttccttgcatttcctcattaacccgcaccacagccctgggaggggtactggggtccccactttacagacaaagatgcggaggctcagggaggtgctgtgactggcctggggtcacgcagccggccgaagaccgtgcctgcgcttgggtcccattatcaggcttttctcacctaaaccctattcgcgctgattcatgggcggtgccaggacgcagacattttcttaaactgccgacacctgcgtttggtttatgactgctgcaccctgttagaaggctgcccatcccatgggatacagtgatctctctgagaggccagggatgggtgggaggacagggcgcagcctggccaggccttgggtgaaatgccctctgcctgccctgggctccggaacagacggctgcaggccacctctcactgcgggggtctctgggtggacagagccctcagactttgcttatttaaatccttttgtccatagagccaagtccctcctgcccgcagaggcaactgccctccccttgctgtgcgtcttctagtgtgtgtgcgtgggaaaggtgcagcactttctgtgtacgccttccgcgtatggaagtggagttctgtttcaagcctcactgacctgccaccggcagaactctcctttagaaccccttcctgttgccaagtgctcatctgggctgttgctttgttttccgggggccacccgcatcccccccgtctccctgctgccacgcacagctagtggctcctggagacctcgggaggaattccttgtgctaaacccagagaggaattgctgggtcaggcatcagcctctgcac

SEQ ID NO: 124141 - DNA, 405 bp, Homo sapiens
  Payload ID: 4376
  Gene Symbol: CYBA
  Gene Name: cytochrome b-245, alpha polypeptide
  ENST ID: ENST00000566229
  CDS Start-End: 16-405
ggactccatttggaaatggaccctctcgggaccagggccagggagtgtctggcccagcacggtcctcatcaccgggggcatcgtggccacagctgggcgcttcacccagtggtactttggtgcctactccattgtggcgggcgtgtttgtgtgcctgctggagtacccccgggggaagaggaagaagggctccaccatggagcgctggggacagaagtacatgaccgccgtggtgaagctgttcgggccctttaccaggaattactatgttcgggccgtcctgcatctcctgctctcggtgcccgccggcttcctgctggccaccatccttgggaccgcctgcctggccattgcgagcggcatctacctactggcggctgtgcgtggcgagcagtggacgcccat

SEQ ID NO: 124142 - DNA, 4324 bp, Homo sapiens
  Payload ID: 4377
  Gene Symbol: CYBB
  Gene Name: cytochrome b-245, beta polypeptide
  Uniprot ID: P04839
  ENST ID: ENST00000378588
  CDS Start-End: 68-1780
ttcctcattggaagaagaagcatagtatagaagaaaggcaaacacaacacattcaacctctgccaccatggggaactgggctgtgaatgaggggctctccatttttgtcattctggtttggctggggttgaacgtcttcctctttgtctggtattaccgggtttatgatattccacctaagttcttttacacaagaaaacttcttgggtcagcactggcactggccagggcccctgcagcctgcctgaatttcaactgcatgctgattctcttgccagtctgtcgaaatctgctgtccttcctcaggggttccagtgcgtgctgctcaacaagagttcgaagacaactggacaggaatctcacctttcataaaatggtggcatggatgattgcacttcactctgcgattcacaccattgcacatctatttaatgtggaatggtgtgtgaatgcccgagtcaataattctgatccttattcagtagcactctctgaacttggagacaggcaaaatgaaagttatctcaattttgctcgaaagagaataaagaaccctgaaggaggcctgtacctggctgtgaccctgttggcaggcatcactggagttgtcatcacgctgtgcctcatattaattatcacttcctccaccaaaaccatccggaggtcttactttgaagtcttttggtacacacatcatctctttgtgatcttcttcattggccttgccatccatggagctgaacgaattgtacgtgggcagaccgcagagagtttggctgtgcataatataacagtttgtgaacaaaaaatctcagaatggggaaaaataaaggaatgcccaatccctcagtttgctggaaaccctcctatgacttggaaatggatagtgggtcccatgtttctgtatctctgtgagaggttggtgcggttttggcgatctcaacagaaggtggtcatcaccaaggtggtcactcaccctttcaaaaccatcgagctacagatgaagaagaaggggttcaaaatggaagtgggacaatacatttttgtcaagtgcccaaaggtgtccaagctggagtggcacccttttacactgacatccgcccctgaggaagacttctttagtatccatatccgcatcgttggggactggacagaggggctgttcaatgcttgtggctgtgataagcaggagtttcaagatgcgtggaaactacctaagatagcggttgatgggccctttggcactgccagtgaagatgtgttcagctatgaggtggtgatgttagtgggagcagggattggggtcacacccttcgcatccattctcaagtcagtctggtacaaatattgcaataacgccaccaatctgaagctcaaaaagatctacttctactggctgtgccgggacacacatgcctttgagtggtttgcagatctgctgcaactgctggagagccagatgcaggaaaggaacaatgccggcttcctcagctacaacatctacctcactggctgggatgagtctcaggccaatcactttgctgtgcaccatgatgaggagaaagatgtgatcacaggcctgaaacaaaagactttgtatggacggcccaactgggataatgaattcaagacaattgcaagtcaacaccctaataccagaataggagttttcctctgtggacctgaagccttggctgaaaccctgagtaaacaaagcatctccaactctgagtctggccctcggggagtgcatttcattttcaacaaggaaaacttctaacttgtctcttccatgaggaaataaatgtgggttgtgctgccaaatgctcaaataatgctaattgataatataaataccccctgcttaaaaatggacaaaaagaaactataatgtaatggttttcccttaaaggaatgtcaaagattgtttgatagtgataagttacatttatgtggagctctatggttttgagagcacttttacaaacattatttcatttttttcctctcagtaatgtcagtggaagttagggaaaagattcttggactcaattttagaatcaaaagggaaaggatcaaaaggttcagtaacttccctaagattatgaaactgtgaccagatctagcccatcttactccaggtttgatactctttccacaatactgagctgcctcagaatcctcaaaatcagtttttatattccccaaaagaagaaggaaaccaaggagtagctatatatttctactttgtgtcatttttgccatcattattatcatactgaaggaaattttccagatcattaggacataatacatgttgagagtgtctcaacacttattagtgacagtattgacatctgagcatactccagtttactaatacagcagggtaactgggccagatgttctttctacagaagaatattggattgattggagttaatgtaatactcatcatttaccactgtgcttggcagagagcggatactcaagtaagttttgttaaatgaatgaatgaatttagaaccacacaatgccaagatagaattaatttaaagccttaaacaaaatttatctaaagaaataacttctattactgtcatagaccaaaggaatctgattctccctagggtcaagaacaggctaaggatactaaccaataggattgcctgaagggttctgcacattcttatttgaagcatgaaaaaagagggttggaggtggagaattaacctcctgccatgactctggctcatctagtcctgctccttgtgctataaaataaatgcagactaatttcctgcccaaagtggtcttctccagctagcccttatgaatattgaacttaggaattgtgacaaatatgtatctgatatggtcatttgttttaaataacacccaccccttattttccgtaaatacacacacaaaatggatcgcatctgtgtgactaatggtttatttgtattatatcatcatcatcatcctaaaattaacaacccagaaacaaaaatctctatacagagatcaaattcacactcaatagtatgttctgaatatatgttcaagagagagtctctaaatcactgttagtgtggccaagagcagggttttctttttgttcttagaactgctcccatttctgggaactaaaaccagttttatttgccccaccccttggagccacaaatgtttagaactcttcaacttcggtaatgaggaagaaggagaaagagctgggggaagggcagaagactggtttaggaggaaaaggaaataaggagaaaagagaatgggagagtgagagaaaataaaaaaggcaaaagggagagagaggggaagggggtctcatattggtcattccctgccccagatttcttaaagtttgatatgtatagaatataattgaaggaggtatacacatattgatgttgttttgattatctatggtattgaatcttttaaaatctggtcacaaattttgatgctgagggggattattcaagggactaggatgaactaaataagaactcagttgttctttgtcatactactattcctttcgtctcccagaatcctcagggcactgagggtaggtctgacaaataaggcctgctgtgcgaatatagcctttctgaaatgtaccaggatggtttctgcttagagacacttaggtccagcctgttcacactgcacctcaggtatcaattcatctattcaacagatatttattgtgttattactatgagtcaggctctgtttattgtttcaattctttacaccaaagtatgaactggagagggtacctcagttataaggagtctgagaatattggccctttctaacctatgtgcataattaaaaccagcttcatttgttgctccgagagtgtttctccaaggttttctatcttcaaaaccaactaagttatgaaagtagagagatctgccctgtgttatccagttatgagataaaaaatgaatataagagtgcttgtcattataaaagtttccttttttattctctcaagccaccagctgccagccaccagcagccagctgccagcctagctttttttttttttttttttttttagcacttagtatttagcatttattaacaggtactctaagaatgatgaagcattgtttttaatcttaagactatgaaggtttttcttagttcttctgcttttgcaattgtgtttgtgaaatttgaatacttgcaggctttgtatgtgaataattctagcgggggacctgggagataattcctacggggaattcttaaaactgtgctcaactattaaaatgaatgagctttc

SEQ ID NO: 124143 - DNA, 3509 bp, Homo sapiens
  Payload ID: 4378
  Gene Symbol: CYB5D1
  Gene Name: cytochrome b5 domain containing 1
  Uniprot ID: Q6P9G0
  ENST ID: ENST00000332439
  CDS Start-End: 153-839
gacggtggccggaaaaggacaatggtttccatgtcagcggataaacgctctcccctcggctcccggacgcgacggaggtcgtagtagtagtgagtacgtgctgaggagcaaaggagtaaccaagagatccagtgaccgacagagcaagagccatgccgcgccggggcctggtggctgggccagacttggagtattttcagcgtcgctatttcacgccggcggaggtggcccaacataacaggcccgaagacctctgggtatcttacctgggacgcgtgtacgacctaacgtcattggcacaggaatacaaggggaacctgctgctgaaacccatcgtggaagttgcaggccaggatatcagccactggtttgatccaaagaccagagacatccgcaagcacatagatccgctgaccggctgcctgaggtactgcaccccgcggggccgctttgtgcacgttccgcctcagctgccctgttcggactgggccaacgattttgggaagccctggtggcaggggtcgtattatgaggtggggcggctgtctgccaagacccggagcatccgcatcattaacacgctcacgtcgcaggagcacacactggaggtgggggttctggagtccatatgggaaatcctacaccgctatctcccctataactcacatgctgccagctacacgtggaaatatgaagggaagaacctgaacatggattttaccctggaagagaatgggatccgggatgaggaggaagaatttgactatctcagtatggacggtacacttcacacacctgcaatacttctgtacttcaatgatgatctcacggagttgtaggcaaggagatgtacactcgtgtagactcaagacgtatttcgagtttggctttttctgtgccttgaggaaaagtggtggggccgaggggtgcctggacccagatctccactcctctccaggagctagcctgtgcccttctgaagtgtaaaggccctattccctgccttcattacagtttgctctgagaaaattagtgaattaatctttgggaatgatacaagaagatcaagtaccttggtttagggagatgtagaagaggatagtcagagttcaggcagaactgtttgatagttaagagagagtagttctacaggggtgagggatggaaggacttttttggcaatgatggaaatgagatgtctgcaggaagatgggatttacaaagaaataggaaatgtttatcattgaccatacaaagctggcttatcttacttgtagaagagtgtttggcagctgaaacccaagggaaagaaaggaagtgcgtcattataggcaattcaggctagatattatactaggtacttcatataccctcttttttttttttgcccccaacaaagagaaggggtcttgctctgtcacccagtctggagtgcagtggcaaaatcatggctcactgcagcctggagctcctgggcacaagtgatcctcccatctctgccttgagtagctgggacttcaggtgcacgccacaatgcctaattttttaattttttgtagacacagggtctcgctgtgttgcccaggctggtttcaacctcctggcctcaagtgatcctcttgcctcagcctcccaaatagcctcttcaagacaactaccccataaggtggattaccattactatgttacagataagtccttcgaaactttggaaagtttaatagctcaaagccacactaggtagtaaccactagagccagaatgcaaattcaagtctgcccaactccaaagtccatgttctctcaatataaagggaccatctcaatgtctaatctcatgttaacatttgtagccactgctctcagcaagtatttgggatgtggctttgtcctaggatccctgcacaataggaaattgtggtcctattgtatagtttgcagttattgtctctggaagggagtttgcagagttctcctgtggcgaagaggaggcaaggaaggctaagtgtcagttaagcaatagctattggggctacttctttgttaatcccataccccagatttctctcctgaccttttggggcaaagaggtgggtatttactaacttgaaggaaaactagagtggggaaaaggccggcaaattagtgacactttggcgagggagaaaaaggaggcagtttgccacttggagaagatgaggaagacagggttgcaagacggtgactccaaaagagggagctcgacaggggtaatgtaaacagagatgctaactaagtcagaaaactctcctggtgaccaaaagagaaccactattgggggtaatggctagatttggtctcctttaacttaaggaggggagatttgagaatgacagacagttgaacttcctggcagcagcaagcaaaaaacaaatcaggaagagtttagtgtgtcttctggcaggggacaccagggcccagcacaggagaaggtggcccctgtgagatactggtgggctatataggcattttctgaggggctttgggaggcatgaacaaaggtggaaacattgctgttggcttcggcagtatctgaatttactgtgagatggagggtttaaatctaaccccatggaatgcaggagtccatgaattatctaaatcgatcattttgatctttaatcaactctgcaattatgtgtaccttgtttgctcaattaaaccctgaactatttgagaatgaaagctatgctgttcctctagtgcaagcctcagggcctgtcctgtgcctacaggatgtccccattctgccaaaacctgtccctcttccagagactcctacttcaatgtctcttgctagaaacacatccctttcctcacacatccagtcactcatcaagtgtaatctgtctcctaaatatctctggaacctatcttcttttctccaagttaccatcacctcttgtctaaactgctacggaaacttcctaacctgttctcccatttccacttctgacttccatgctgcaatgagagtcagctatgaaaaacaaacctaaacatcgaactttccttagcttcttcagtggcttccaactgcttttggaataaagtcctaaattcaaagatcttgtataaatcaggctcatctcgcaacacccctctttgttctctatggcctagacacactggctttcagttcattacatgtcttgcctcagaccctcacacactgtcctctctgcctgcaacactcttcctttcactttccacctagctgatcctaaatgttccttcctcagggaggtcttttctgatttcttggtgggtcaagactttctgataaatcagttagcaccatgcattttccagagtttttattacaattgtaaaattatggctgtaataggctggctgcgctgctagattgtaagctcacgagggcagagatcttgttcacatcttgctcactgctatattctcattgctgagcacacagttgcagctcaataaattttgaatgaactccaa

SEQ ID NO: 124144 - DNA, 1870 bp, Homo sapiens
  Payload ID: 4378
  Gene Symbol: CYB5D1
  Gene Name: cytochrome b5 domain containing 1
  Uniprot ID: Q6P9G0
  ENST ID: ENST00000571846
  CDS Start-End: 390-863
ctttcatactgcctcctcccttgtttttctgtctcagagagatagtctgtcctaaatatcccatgtagcccaggccactgaattaaaacggagcgtattcgttctctgccccaccccgcaactcctgaaagcggcgcaactcaattacttgatccttatatgccccacgcgggactcatactacgtttcccgtgaacacgtgcagtccaaaccccgcccctgatatttatctcagtggacggtggccggaaaaggacaatggtttccatgtcagcggataaacgctctcccctcggctcccggacgcgacggaggtcgtagtagtagtgagtacgtgctgaggagcaaaggagtaaccaagagatccagtgaccgacagagcaagagccatgccgcgccggggcctggtggctgggccagacttggagtattttcagcgtcgctatttcacgccggcggaggtggcccaacataacaggcccgaagacctctgggtatcttacctgggacgcgtgtacgacctaacgtcattggcacaggaatacaaggggaacctgctgctgaaacccatcgtggaagttgcaggccaggatatcagccactggtttgatccaaagaccagagacatccgcaagcacatagatccgctgaccggctgcctgaggtactgcaccccgcggggccgctttgtgcacgttccgcctcagctgccctgttcggactgggccaacgattttgggaagccctggtggcaggggtcgtattatgaggtggggcggctgtctgccaagacccggagcatccgcatcattaacacgctcacgtcgcaggagcacacactggagctacacgtggaaatatgaagggaagaacctgaacatggattttaccctggaagagaatgggatccgggatgaggaggaagaatttgactatctcagtatggacggtacacttcacacacctgcaatacttctgtacttcaatgatgatctcacggagttgtaggcaaggagatgtacactcgtgtagactcaagacgtatttcgagtttggctttttctgtgccttgaggaaaagtggtggggccgaggggtgcctggacccagatctccactcctctccaggagctagcctgtgcccttctgaagtgtaaaggccctattccctgccttcattacagtttgctctgagaaaattagtgaattaatctttgggaatgatacaagaagatcaagtaccttggtttagggagatgtagaagaggatagtcagagttcaggcagaactgtttgatagttaagagagagtagttctacaggggtgagggatggaaggacttttttggcaatgatggaaatgagatgtctgcaggaagatgggatttacaaagaaataggaaatgtttatcattgaccatacaaagctggcttatcttacttgtagaagagtgtttggcagctgaaacccaagggaaagaaaggaagtgcgtcattataggcaattcaggctagatattatactaggtacttcatataccctcttttttttttttgcccccaacaaagagaaggggtcttgctctgtcacccagtctggagtgcagtggcaaaatcatggctcactgcagcctggagctcctgggcacaagtgatcctcccatctctgccttgagtagctgggacttcaggtgcacgccacaatgcctaattttttaattttttgtagacacagggtctcgctgtgttgcccaggctggtttcaacctcctggcctcaagtgatcctcttgcctcagcctcccaaatagcctcttcaagacaactaccccataaggtggattaccattactatgttacagataagtcctt

SEQ ID NO: 124145 - DNA, 538 bp, Homo sapiens
  Payload ID: 4378
  Gene Symbol: CYB5D1
  Gene Name: cytochrome b5 domain containing 1
  ENST ID: ENST00000574196
  CDS Start-End: 1-93
gaatacaagggtaagggccacacgttgggccggggccggagtgtgtgtgtgtgcacgcgcgcgtttgcctggttctcgaagggctggcattgacagtggctgtgctgctcttttcaagggaacctgctgctgaaacccatcgtggaagttgcaggccaggatatcagccactggtttgatccaaagaccagagacatccgcaagcacatagatccgctgaccggctgcctgaggtactgcaccccgcggggccgctttgtgcacgttccgcctcagctgccctgttcggactgggccaacgattttgggaagccctggtggcaggggtcgtattatgaggtggggcggctgtctgccaagacccggagcatccgcatcattaacacgctcacgtcgcaggagcacacactggaggtgggggttctggagtccatatgggaaatcctacaccgctatctcccctataactcacatgctgccagctacacgtggaaatatgaagggaagaacctgaacatggattttaccctggaagaga

SEQ ID NO: 124146 - DNA, 570 bp, Homo sapiens
  Payload ID: 4378
  Gene Symbol: CYB5D1
  Gene Name: cytochrome b5 domain containing 1
  ENST ID: ENST00000570446
  CDS Start-End: 106-408
ctctcccctcggctcccggacgcgacggaggtcgtagtagtagtgagtacgtgctgaggagcaaaggagtaaccaagagatccagtgaccgacagagcaagagccatgccgcgccggggcctggtggctgggccagacttggagtattttcagcgtcgctatttcacgccggcggaggtgggggttctggagtccatatgggaaatcctacaccgctatctcccctataactcacatgctgccagctacacgtggaaatatgaagggaagaacctgaacatggattttaccctggaagagaatgggatccgggatgaggaggaagaatttgactatctcagtatggacggtacacttcacacacctgcaatacttctgtacttcaatgatgatctcacggagttgtaggcaaggagatgtacactcgtgtagactcaagacgtatttcgagtttggctttttctgtgccttgaggaaaagtggtggggccgaggggtgcctggacccagatctccactcctctccaggagctagcctgtgcccttctgaagtgtaaaggccctattccct

SEQ ID NO: 124147 - DNA, 1910 bp, Homo sapiens
  Payload ID: 4379
  Gene Symbol: CYB5D2
  Gene Name: cytochrome b5 domain containing 2
  Uniprot ID: Q8WUJ1
  ENST ID: ENST00000301391
  CDS Start-End: 501-1295
gtggctcacgcctgtaatcccagcactttgggaggccgagacgggtggatcacctgaggtcaggagttcgagaccagcctgaccaacgtggtgaaaccctgtctctactaaatacaaaatattagccggacgtgggggcgcgtgcctgtaatcccagctacttgggaggctgaggcaggagaatcgcttgaacccgggaggcggaggttgcagtgagccgagattccgccagtgcactccagcctggacaacaagagctaaaactctgtctcagaaaaaaaaaaaaaaagtacctggaaaaagtcgcagacagcgagcttttcgccagtgccaggaatacagataaaacgagagagactaagggagggagcgcgagcactagcgcgcgagagagagagcgagagcgcgcgcgccgatgacgtcacgctcggcgtctcggccatcttagctgtagatagaggcggcaacctcggaagtgcggagcgggtgggcctatatagatgttgaggtgcggaggccgtgggcttttgttgggcctggctgtagccgcagcagcggtaatggcagcacggcttatgggctggtggggtccccgcgctggctttcgccttttcataccggaggagctgtctcgctaccgcggcggcccaggggacccgggcctgtacttggcgttgctcggccgtgtctacgatgtgtcctccggccggaggcactacgagcctgggtcccactatagcggcttcgcaggccgagacgcatccagagctttcgtgaccggggactgttctgaagcaggcctcgtggatgacgtatccgacctgtcagccgctgagatgctgacacttcacaattggctttcattctatgagaagaattatgtgtgtgttgggagggtgacaggacggttctacggagaggatgggctgcccaccccggcactgacccaggtagaagctgcgatcaccagaggcttggaggccaacaaactacagctgcaagagaagcagacattcccgccgtgcaacgcggagtggagctcagccaggggcagccggctctggtgctcccagaagagtggaggtgtgagcagagactggattggcgtccccaggaagctgtataagccaggtgctaaggagccccgctgcgtgtgtgtgagaaccaccggcccccctagtggccagatgccggacaaccctccacacagaaatcgtggggacctggaccacccaaacttggcagagtacacaggctgcccaccgctagccatcacatgctcctttccactctaagccgtagcctcttctgttaataacacacagagagctctgccaagcacctgagtaggcccttgacacttgtgtgccctgggatgcctcctggcgcgaatcaggagggtctggaaggactctggctatattctgcaaatgtggctcatgccccttaccgtggctcggcgttgtggtgcctgagggacagccggccacctgcccagtactggtcagcttttcaacactattccctttgacctactggccatcttcctcacagccctcagatatcaacgggcacaaataagaccaactcaatttccacttgaatttacaaccaaaagcctgctgagttgattacagctgggccaatacagtacgaggcaataacaaattagtgtgggttgattctggaattggaaaagcttttgcttgtatggatacagcaaatccagatgtctctgaacaaagcaacaatttaaagcaacgacattttctgtcctttaagcacttaaaatcaggtgtggtgtgttttcaaaggcagaagtctgcattttgagcaaaaggtggcttcccagctctaacaaggtaactggttagcatgacattaaagcttgggcaaggcttcaaacttaa

SEQ ID NO: 124148 - DNA, 694 bp, Homo sapiens
  Payload ID: 4379
  Gene Symbol: CYB5D2
  Gene Name: cytochrome b5 domain containing 2
  Uniprot ID: Q8WUJ1
  ENST ID: ENST00000577075
  CDS Start-End: 233-691
atctacgtcattccgtagcctccgctgccgccatctttgttggggctgacaacctgcaagccaagaagtacgagaagggccaggcgcggtggctcacgcctgtaatcccagcactttgggaggccgagacgggtggatcacctgaggccgagacgcatccagagctttcgtgaccggggactgttctgaagcaggcctcgtggatgacgtatccgacctgtcagccgctgagatgctgacacttcacaattggctttcattctatgagaagaattatgtgtgtgttgggagggtgacaggacggttctacggagaggatgggctgcccaccccggcactgacccaggtagaagctgcgatcaccagaggcttggaggccaacaaactacagctgcaagagaagcagacattcccgccgtgcaacgcggagtggagctcagccaggggcagccggctctggtgctcccagaagagtggaggtgtgagcagagactggattggcgtccccaggaagctgtataagccaggtgctaaggagccccgctgcgtgtgtgtgagaaccaccggcccccctagtggccagatgccggacaaccctccacacagaaatcgtggggacctggaccacccaaacttggcagagtacacaggctgcccaccgctagccatcacatgctcctttccactctaagcc

SEQ ID NO: 124149 - DNA, 1588 bp, Homo sapiens
  Payload ID: 4379
  Gene Symbol: CYB5D2
  Gene Name: cytochrome b5 domain containing 2
  Uniprot ID: Q8WUJ1
  ENST ID: ENST00000575251
  CDS Start-End: 640-1098
ggctgacaacctgcaagccaagaagtacgagaagggccaggcgcggtggctcacgcctgtaatcccagcactttgggaggccgagacgggtggatcacctgaggtcaggagttcgagaccagcctgaccaacgtggtgaaaccctgtctctactaaatacaaaatattagccggacgtgggggcgcgtgcctgtaatcccagctacttgggaggctgaggcaggagaatcgcttgaacccgggaggcggaggttgcagtgagccgagattccgccagtgcactccagcctggacaacaagagctaaaactctgtctcagaaaaaaaaaaaaaaagtacctggaaaaagtcgcagacagcgagcttttcgccagtgccaggaatacagataaaacgagagagactaagggagggagcgcgagcactagcgcgcgagagagagagcgagagcgcgcgcgccgatgacgtcacgctcggcgtctcggccatcttagctgtagatagaggcggcaacctcggaagtgcggagcgggtgggcctatatagatgttgaggccgagacgcatccagagctttcgtgaccggggactgttctgaagcaggcctcgtggatgacgtatccgacctgtcagccgctgagatgctgacacttcacaattggctttcattctatgagaagaattatgtgtgtgttgggagggtgacaggacggttctacggagaggatgggctgcccaccccggcactgacccaggtagaagctgcgatcaccagaggcttggaggccaacaaactacagctgcaagagaagcagacattcccgccgtgcaacgcggagtggagctcagccaggggcagccggctctggtgctcccagaagagtggaggtgtgagcagagactggattggcgtccccaggaagctgtataagccaggtgctaaggagccccgctgcgtgtgtgtgagaaccaccggcccccctagtggccagatgccggacaaccctccacacagaaatcgtggggacctggaccacccaaacttggcagagtacacaggctgcccaccgctagccatcacatgctcctttccactctaagccgtagcctcttctgttaataacacacagagagctctgccaagcacctgagtaggcccttgacacttgtgtgccctgggatgcctcctggcgcgaatcaggagggtctggaaggactctggctatattctgcaaatgtggctcatgccccttaccgtggctcggcgttgtggtgcctgagggacagccggccacctgcccagtactggtcagcttttcaacactattccctttgacctactggccatcttcctcacagccctcagatatcaacgggcacaaataagaccaactcaatttccacttgaatttacaaccaaaagcctgctgagttgattacagctgggccaatacagtacgaggcaataacaaattagtgtgggttgattctggaattggaaaagcttttgcttgtatggatacagcaaatccagatgtctctgaacaaagcaacaatttaaagcaacgacattttctgtcctttaagcac

SEQ ID NO: 124150 - DNA, 495 bp, Homo sapiens
  Payload ID: 4379
  Gene Symbol: CYB5D2
  Gene Name: cytochrome b5 domain containing 2
  ENST ID: ENST00000573984
  CDS Start-End: 149-469
agctgtagatagaggcggcaacctcggaagtgcggagcgggtgggcctatatagatgttgaggccgagacgcatccagagctttcgtgaccggggactgttctgaagcaggcctcgtggatgacgtatccgacctgtcagccgctgagatgctgacacttcacaattggctttcattctatgagaagaattatgtgtgtgttgggagggtgacaggacggttctacggagaggatgggctgcccaccccggcactgacccaggtagaagctgcgatcaccagaggcttggaggccaacaaactacagctgcaagagaagcagacattcccgccgtgcaacgcggagtggagctcagccaggggcagccggctctggtgctcccagaagaggggttttaacagctctcttgccctcgcttctgggagcctcaagcatgcgtgtcacagactgattctgcaattcctgtgaaacctgttcctttggatccaaatgca

SEQ ID NO: 124151 - DNA, 1651 bp, Homo sapiens
  Payload ID: 4380
  Gene Symbol: CYB5R1
  Gene Name: cytochrome b5 reductase 1
  Uniprot ID: Q9UHQ9
  ENST ID: ENST00000367249
  CDS Start-End: 76-993
cgccctccgacccgccccgcggcgcattgtgggatctgtcggcttgtcaggtggtggaggaaaaggcgctccgtcatggggatccagacgagccccgtcctgctggcctccctgggggtggggctggtcactctgctcggcctggctgtgggctcctacttggttcggaggtcccgccggcctcaggtcactctcctggaccccaatgaaaagtacctgctacgactgctagacaagacgactgtgagccacaacaccaagaggttccgctttgccctgcccaccgcccaccacactctggggctgcctgtgggcaaacatatctacctctccacccgaattgatggcagcctggtcatcaggccatacactcctgtcaccagtgatgaggatcaaggctatgtggatcttgtcatcaaggtctacctgaagggtgtgcaccccaaatttcctgagggagggaagatgtctcagtacctggatagcctgaaggttggggatgtggtggagtttcgggggccaagcgggttgctcacttacactggaaaagggcattttaacattcagcccaacaagaaatctccaccagaaccccgagtggcgaagaaactgggaatgattgccggcgggacaggaatcaccccaatgctacagctgatccgggccatcctgaaagtccctgaagatccaacccagtgctttctgctttttgccaaccagacagaaaaggatatcatcttgcgggaggacttagaggaactgcaggcccgctatcccaatcgctttaagctctggttcactctggatcatcccccaaaagattgggcctacagcaagggctttgtgactgccgacatgatccgggaacacctgcccgctccaggggatgatgtgctggtactgctttgtgggccacccccaatggtgcagctggcctgccatcccaacttggacaaactgggctactcacaaaagatgcgattcacctactgagcatcctccagcttccctggtgctgttcgctgcagttgttccccatcagtactcaagcactataagccttagattcctttcctcagagtttcaggttttttcagttacatctagagctgaaatctggatagtacctgcaggaacaatattcctgtagccatggaagagggccaaggctcagtcactccttggatggcctcctaaatctccccgtggcaacaggtccaggagaggcccatggagcagtctcttccatggagtaagaaggaagggagcatgtacgcttggtccaagattggctagttccttgatagcatcttactctcaccttctttgtgtctgtgatgaaaggaacagtctgtgcaatgggttttacttaaacttcactgttcaacctatgagcaaatctgtatgtgtgagtataagttgagcatagcatacttccagaggtggtcttatggagatggcaagaaaggaggaaatgatttcttcagatctcaaaggagtctgaaatatcatatttctgtgtgtgtctctctcagcccctgcccaggctagagggaaacagctactgataatcgaaaactgctgtttgtggcaggaacccctggctgtgcaaataaatggggctgaggcccctgtgtgatattgaaagggt

SEQ ID NO: 124152 - DNA, 680 bp, Homo sapiens
  Payload ID: 4380
  Gene Symbol: CYB5R1
  Gene Name: cytochrome b5 reductase 1
  ENST ID: ENST00000446185
  CDS Start-End: 1-680
ccaccgcccaccacactctggggctgcctgtgggcaaacatatctacctctccacccgaattgatggcagcctggtcatcaggccatacactcctgtcaccagtgatgaggatcaaggctatgtggatcttgtcatcaaggtctacctgaagggtgtgcaccccaaatttcctgagggagggaagatgtctcagtacctggatagcctgaaggttggggatgtggtggagtttcgggggccaagcgggttgctcacttacactggaaaagggcattttaacattcagcccaacaagaaatctccaccagaaccccgagtggcgaagaaactgggaatgattgccggcgggacaggaatcaccccaatgctacagctgatccgggccatcctgaaagtccctgaagatccaacccagtgctttctgctttttgccaaccagacagaaaaggatatcatcttgcgggaggacttagaggaactgcaggcccgctatcccaatcgctttaagctctggttcactctggatcatcccccaaaaggtatccttcccatttctggacatcccactatcccctcatcgtcaaaatcaaagccttgcccctttgtgaattctggcttcattgaaatcaaccttgcctcacactgccaactcggaagtctgagtgcacagacacagtga

SEQ ID NO: 124153 - DNA, 1254 bp, Homo sapiens
  Payload ID: 4381
  Gene Symbol: CYB5R2
  Gene Name: cytochrome b5 reductase 2
  Uniprot ID: Q6BCY4
  ENST ID: ENST00000299498
  CDS Start-End: 150-980
tgagactccagtgacccggcgggaggagaggcaactttccctgtcgggcttgagttgggagaggagcagggcggccttgtagggacccgtccctgctcctgaccatcaccgtcactggggtcactgtgctcgtgttggtcctgaagagcatgaactccaggaggagagagccaatcaccttacaggaccctgaagccaagtacccgctgcccttgattgagaaagagaaaatcagccacaacacccggaggttccgctttggactgccttcgccggaccatgtcttagggcttcctgtaggtaactatgtccagctcttggcaaaaatcgataatgaattggtggtcagggcttacacccctgtctccagtgatgatgacagaggctttgtggacctaattataaagatctacttcaaaaatgtacacccccaatatcctgaaggtgggaagatgactcagtatttggagaacatgaaaatcggggagaccatcttttttcgagggccaaggggacgcttgttttaccatgggccagggaatcttggaatcagaccagaccagacgagtgagcctaaaaaaacactggccgatcacctgggaatgattgctgggggcacaggcatcacacccatgttgcagctcattcgccacatcaccaaggaccccagtgacaggaccaggatgtccctcatctttgccaaccagacagaggaggatatcttggtcagaaaagagcttgaagaaattgccaggactcacccagaccagttcaacctgtggtacaccctggacaggcctcccattggctggaagtacagctcaggcttcgttactgccgacatgatcaaggagcaccttcctcctccagcgaagtccacgctcatcctggtgtgtggcccgccaccactaatccagacggcggctcaccctaacctggagaagctgggttatacccaggacatgattttcacctactaacacctccacgtgctcagcaattttgcatgtcccttttcatctgtttcagagtaagttcaatttcaccacggtaaactgggatgttttcaaaagtgccttgccatgtaccttcgcgcacacactggttctcctcttttgggtgtgggcctaacaaaaagggctcaaggggctggagactggctgctggggcctccttgcttggaggctggaaagagctccatttcagtatctttctccgtggttttgtgaaataaactcaagtacaaagcagaca

SEQ ID NO: 124154 - DNA, 579 bp, Homo sapiens
  Payload ID: 4381
  Gene Symbol: CYB5R2
  Gene Name: cytochrome b5 reductase 2
  ENST ID: ENST00000436351
  CDS Start-End: 231-579
gagcggcccccggccaaccccagttcgacgacgtgttgggcgtctcactccgggtgggttccgcggcggggtgtatttatggagtattgaagaaatatctccgtcgggacggccggaaggaaagaggccagaggcgcggaggccggctagagccgggaacgaacgacccgtccctgctcctgaccatcaccgtcactggggtcactgtgctcgtgttggtcctgaagagcatgaactccaggaggagagagccaatcaccttacaggaccctgaagccaagtacccgctgcccttgattgagaaagagaaaatcagccacaacacccggaggttccgctttggactgccttcgccggaccatgtcttagggcttcctgtaggtaactatgtccagctcttggcaaaaatcgataatgaattggtggtcagggcttacacccctgtctccagtgatgatgacagaggctttgtggacctaattataaagatctacttcaaaaatgtacacccccaatatcctgaaggtgggaagatgactcagtatttggagaacatgaaaatcggggagaccatctttt

SEQ ID NO: 124155 - DNA, 797 bp, Homo sapiens
  Payload ID: 4381
  Gene Symbol: CYB5R2
  Gene Name: cytochrome b5 reductase 2
  ENST ID: ENST00000524608
  CDS Start-End: 230-797
gaagaaggatgtgttcacttcccctttcgccatgattttataagtttcctgaggcctccccagccaagctgaactgtcctgaggcaagaatttgcctttgcctgtaatcaagggcgagccgggcagccaaggttccgaaacgcaccgtgaagaccctctaactgtgcctactattctgctcccctccgatcggcgcggggctcttgtccttcctctctccacccagcgaatgaatgaacgcaggagcgctcggagtacacgtcttcaactcggcgacgcccctgcttcggccccaccccgcaaacacccgccccggaccaggcccagggtaggcgcccatgaggacccgtccctgctcctgaccatcaccgtcactggggtcactgtgctcgtgttggtcctgaagagcatgaactccaggaggagagagccaatcaccttacaggaccctgaagccaagtacccgctgcccttgattgagaaagagaaaatcagccacaacacccggaggttccgctttggactgccttcgccggaccatgtcttagggcttcctgtaggtaactatgtccagctcttggcaaaaatcgataatgaattggtggtcagggcttacacccctgtctccagtgatgatgacagaggctttgtggacctaattataaagatctacttcaaaaatgtacacccccaatatcctgaaggtgggaagatgactcagtatttggagaacatgaaaatcggggagaccatcttttttcgagggccaaggggacgcttgttttaccatgggccag

SEQ ID NO: 124156 - DNA, 611 bp, Homo sapiens
  Payload ID: 4381
  Gene Symbol: CYB5R2
  Gene Name: cytochrome b5 reductase 2
  ENST ID: ENST00000527542
  CDS Start-End: 174-611
gaatgaatatattcgcgcgctctttgcagctgcctgaattcttccttccccagcatccccctccgcccggtcacccagacggccttctccagccttgccgagcttaagacccgtccctgctcctgaccatcaccgtcactggggtcactgtgctcgtgttggtcctgaagagcatgaactccaggaggagagagccaatcaccttacaggaccctgaagccaagtacccgctgcccttgattgagaaagagaaaatcagccacaacacccggaggttccgctttggactgccttcgccggaccatgtcttagggcttcctgtaggtaactatgtccagctcttggcaaaaatcgataatgaattggtggtcagggcttacacccctgtctccagtgatgatgacagaggctttgtggacctaattataaagatctacttcaaaaatgtacacccccaatatcctgaaggtgggaagatgactcagtatttggagaacatgaaaatcggggagaccatcttttttcgagggccaaggggacgcttgttttaccatgggccagggaatcttggaatcagaccagaccagacgagtgagcctaaaaaaacactg

SEQ ID NO: 124157 - DNA, 872 bp, Homo sapiens
  Payload ID: 4381
  Gene Symbol: CYB5R2
  Gene Name: cytochrome b5 reductase 2
  ENST ID: ENST00000531096
  CDS Start-End: 359-872
agggtaggcgcccatgaggtatgtcgaatgaatatattcgcgcgctctttgcagctgcctgaattcttccttccccagcatccccctccgcccggtcacccagacggccttctccagccttgccgagcttaagtaagctgaggggcgctcagtgtggcagctctgcgtgtgcagggaaggggccaggatgcagaggggcagcgcaggagcgaggacgccacggctcagcgccccgccagcctcatgatggagcgctgccctgggggcagggctgacccagagccagcggctcgacccgtccctgctcctgaccatcaccgtcactggggtcactgtgctcgtgttggtcctgaagagcatgaactccaggaggagagagccaatcaccttacaggaccctgaagccaagtacccgctgcccttgattgagaaagagaaaatcagccacaacacccggaggttccgctttggactgccttcgccggaccatgtcttagggcttcctgtaggtaactatgtccagctcttggcaaaaatcgataatgaattggtggtcagggcttacacccctgtctccagtgatgatgacagaggctttgtggacctaattataaagatctacttcaaaaatgtacacccccaatatcctgaaggtgggaagatgactcagtatttggagaacatgaaaatcggggagaccatcttttttcgagggccaaggggacgcttgttttaccatgggccagggaatcttggaatcagaccagaccagacgagtgagcctaaaaaaacactggccgatcacctgggaatgattgctgggggcacaggcatcacacccatgttgcagctcattcgccacatcaccaagg

SEQ ID NO: 124158 - DNA, 1338 bp, Homo sapiens
  Payload ID: 4381
  Gene Symbol: CYB5R2
  Gene Name: cytochrome b5 reductase 2
  Uniprot ID: Q6BCY4
  ENST ID: ENST00000524790
  CDS Start-End: 121-834
ggcaactttccctgtcgggcttgagttgggagaggagcagggcggccttgtagggacccgtccctgctcctgaccatcaccgtcactggggtcactgtgctcgtgttggtcctgaagagcatgaactccaggaggagagagccaatcaccttacaggaccctgaagccaagtacccgctgcccttgattgagaaagagaaaatcagccacaacacccggaggttccgctttggactgccttcgccggaccatgtcttagggcttcctgtaggtaactatgtccagctcttggcaaaaatcgataatgaattggtggtcagggcttacacccctgtctccagtgatgatgacagaggctttgtggacctaattataaagatctacttcaaaaatgtacacccccaatatcctgaaggtgggaagatgactcagtatttggagaacatgaaaatcggggagaccatcttttttcgagggccaaggggacgcttgttttaccatgggccagggaatcttggaatcagaccagaccagacgagtgagcctaaaaaaacactggccgatcacctgggaatgattgctgggggcacaggcatcacacccatgttgcagctcattcgccacatcaccaaggaccccagtgacaggaccaggatgtccctcatctttgccaaccagacagaggaggatatcttggtcagaaaagagcttgaagaaattgccaggactcacccagaccagttcaacctgtggtacaccctggacaggcctcccattggtccctggtcggcagagggcgctaccctactgagcaattctgcgcagttccactaacaccaggccacaccctgccggacaactccagctggctgtactgattcacacacctcggctggaagtacagctcaggcttcgttactgccgacatgatcaaggagcaccttcctcctccagcgaagtccacgctcatcctggtgtgtggcccgccaccactaatccagacggcggctcaccctaacctggagaagctgggttatacccaggacatgattttcacctactaacacctccacgtgctcagcaattttgcatgtcccttttcatctgtttcagagtaagttcaatttcaccacggtaaactgggatgttttcaaaagtgccttgccatgtaccttcgcgcacacactggttctcctcttttgggtgtgggcctaacaaaaagggctcaaggggctggagactggctgctggggcctccttgcttggaggctggaaagagctccatttcagtatctttctccgtggttttgtgaaataaactcaagtacaaagcagaca

SEQ ID NO: 124159 - DNA, 1658 bp, Homo sapiens
  Payload ID: 4381
  Gene Symbol: CYB5R2
  Gene Name: cytochrome b5 reductase 2
  Uniprot ID: Q6BCY4
  ENST ID: ENST00000533558
  CDS Start-End: 558-1388
attcgcgcgctctttgcagctgcctgaattcttccttccccagcatccccctccgcccggtcacccagacggccttctccagccttgccgagcttaagtaagctgaggggcgctcagtgtggcagctctgcgtgtgcagggaaggggccaggatgcagaggggcagcgcaggagcgaggacgccacggctcagcgccccgccagcctcatgatggagcgctgccctgggggcagggctgacccagagccagcggctcgtgagtgagagccccccgaccacggcccttctcggggagcgggccagccgccggggtcccagcctgcggggtccgcccgcgcttttgtcctcccgggcgtgcgtgtccgggtctcggccggttccccgtcggccaggcggagctgcggggcgacgccacgagtctgcgggcccgcggcggggagcggcccccggccaaccccagttcgacgacgtgttgggcgtctcactccgggacccgtccctgctcctgaccatcaccgtcactggggtcactgtgctcgtgttggtcctgaagagcatgaactccaggaggagagagccaatcaccttacaggaccctgaagccaagtacccgctgcccttgattgagaaagagaaaatcagccacaacacccggaggttccgctttggactgccttcgccggaccatgtcttagggcttcctgtaggtaactatgtccagctcttggcaaaaatcgataatgaattggtggtcagggcttacacccctgtctccagtgatgatgacagaggctttgtggacctaattataaagatctacttcaaaaatgtacacccccaatatcctgaaggtgggaagatgactcagtatttggagaacatgaaaatcggggagaccatcttttttcgagggccaaggggacgcttgttttaccatgggccagggaatcttggaatcagaccagaccagacgagtgagcctaaaaaaacactggccgatcacctgggaatgattgctgggggcacaggcatcacacccatgttgcagctcattcgccacatcaccaaggaccccagtgacaggaccaggatgtccctcatctttgccaaccagacagaggaggatatcttggtcagaaaagagcttgaagaaattgccaggactcacccagaccagttcaacctgtggtacaccctggacaggcctcccattggctggaagtacagctcaggcttcgttactgccgacatgatcaaggagcaccttcctcctccagcgaagtccacgctcatcctggtgtgtggcccgccaccactaatccagacggcggctcaccctaacctggagaagctgggttatacccaggacatgattttcacctactaacacctccacgtgctcagcaattttgcatgtcccttttcatctgtttcagagtaagttcaatttcaccacggtaaactgggatgttttcaaaagtgccttgccatgtaccttcgcgcacacactggttctcctcttttgggtgtgggcctaacaaaaagggctcaaggggctggagactggctgctggggcctccttgcttggaggctggaaagagctccatttcagtatctttctccgtggttttgtgaaataaactcaagtacaaagca

SEQ ID NO: 124160 - DNA, 2124 bp, Homo sapiens
  Payload ID: 4382
  Gene Symbol: CYB5R3
  Gene Name: cytochrome b5 reductase 3
  Uniprot ID: P00387
  ENST ID: ENST00000352397
  CDS Start-End: 254-1159
gaggccaccgtcccgcgcggggcagcacagcggcgggagagctcggagcgcagagggccgcatccccagttcccagtctccatccccggcagaagcaggcggagcgacccggtccccgcccccgcgcccgccccgccccgcgcgcccgcctggcccctcggccccgcccctgctccggagtgacgcgggcccgggcgcgacggtctcggcggcggcggcggcggcgacagagcgagcgcggcgcggggccaccatgggggcccagctcagcacgttgggccatatggtgctcttcccagtctggttcctgtacagtctgctcatgaagctgttccagcgctccacgccagccatcaccctcgagagcccggacatcaagtacccgctgcggctcatcgaccgggagatcatcagccatgacacccggcgcttccgctttgccctgccgtcaccccagcacatcctgggcctccctgtcggccagcacatctacctctcggctcgaattgatggaaacctggtcgtccggccctatacacccatctccagcgatgatgacaagggcttcgtggacctggtcatcaaggtttacttcaaggacacccatcccaagtttcccgctggagggaagatgtctcagtacctggagagcatgcagattggagacaccattgagttccggggccccagtgggctgctggtctaccagggcaaagggaagttcgccatccgacctgacaaaaagtccaaccctatcatcaggacagtgaagtctgtgggcatgatcgcgggagggacaggcatcaccccgatgctgcaggtgatccgcgccatcatgaaggaccctgatgaccacactgtgtgccacctgctctttgccaaccagaccgagaaggacatcctgctgcgacctgagctggaggaactcaggaacaaacattctgcacgcttcaagctctggtacacgctggacagagcccctgaagcctgggactacggccagggcttcgtgaatgaggagatgatccgggaccaccttccacccccagaggaggagccgctggtgctgatgtgtggccccccacccatgatccagtacgcctgccttcccaacctggaccacgtgggccaccccacggagcgctgcttcgtcttctgagggccgggcacggtcacacggccacccgccccgcgcaccccacgccctgttcacgctcacccagtcacctccccacatcgcacactggggccccgggttcagcctggcctgcccgtgccctggtgaatcacctggctgagcagttcccctggagccccttcgggagcagggctgtgtcccagatgggccacggctgagccttcagagtacgtcctgcctggcacttactggtccttaccagagacgcccagccccatccctgtcctcatgacccctcgtccaccccccacacacactataaggctgagggctgccagcagccccgtctgcccaccattcccggccgtggaccatagtcgggatgtcagcagacacacatgggcagcccaaagctgcaggtgccagggcccaccccagcctcgcctgtcacccccactcccgcctcagggccaggcccaggcctcaccacctgacgctgcatgagacattgacaccagaaagccctcttgggggcactgctccctaccccagggccctggccagccgggagcttggctctcctctggctagagtgggaagagggggctggccatggggccctcccagaacctcagcatttccttccagcccatccaaacactgaggcagccttggggaaccccgagctggggggttggcagcccactgcaccgcctcagggttttggggtcctgggctggggccaccatccctgatggcagaactcccacaaccacatgtatttattcctctgtcctaaaccgtcccctccttccctcacccccagcacagggggattctgagcagtgcctcttgtctgagggacatatcagtgacctcgacgttgcctttagactacagttgtgttagcctcttgcgtattggctttttcagagtcatttatgagcagaaaaaaaaaaagtaaaactttgctaatattaaccctt

SEQ ID NO: 124161 - DNA, 2938 bp, Homo sapiens
  Payload ID: 4382
  Gene Symbol: CYB5R3
  Gene Name: cytochrome b5 reductase 3
  Uniprot ID: P00387
  ENST ID: ENST00000361740
  CDS Start-End: 1-1005
atgaataggagtttgctggttggatgcatgcagagcaaggacatttggggcagagaggagagcatatgcgaacgcctgaagcaagatgggcttgatgttgaaagagcagagagctgggagttgggccatatggtgctcttcccagtctggttcctgtacagtctgctcatgaagctgttccagcgctccacgccagccatcaccctcgagagcccggacatcaagtacccgctgcggctcatcgaccgggagatcatcagccatgacacccggcgcttccgctttgccctgccgtcaccccagcacatcctgggcctccctgtcggccagcacatctacctctcggctcgaattgatggaaacctggtcgtccggccctatacacccatctccagcgatgatgacaagggcttcgtggacctggtcatcaaggtttacttcaaggacacccatcccaagtttcccgctggagggaagatgtctcagtacctggagagcatgcagattggagacaccattgagttccggggccccagtgggctgctggtctaccagggcaaagggaagttcgccatccgacctgacaaaaagtccaaccctatcatcaggacagtgaagtctgtgggcatgatcgcgggagggacaggcatcaccccgatgctgcaggtgatccgcgccatcatgaaggaccctgatgaccacactgtgtgccacctgctctttgccaaccagaccgagaaggacatcctgctgcgacctgagctggaggaactcaggaacaaacattctgcacgcttcaagctctggtacacgctggacagagcccctgaagcctgggactacggccagggcttcgtgaatgaggagatgatccgggaccaccttccacccccagaggaggagccgctggtgctgatgtgtggccccccacccatgatccagtacgcctgccttcccaacctggaccacgtgggccaccccacggagcgctgcttcgtcttctgagggccgggcacggtcacacggccacccgccccgcgcaccccacgccctgttcacgctcacccagtcacctccccacatcgcacactggggccccgggttcagcctggcctgcccgtgccctggtgaatcacctggctgagcagttcccctggagccccttcgggagcagggctgtgtcccagatgggccacggctgagccttcagagtacgtcctgcctggcacttactggtccttaccagagacgcccagccccatccctgtcctcatgacccctcgtccaccccccacacacactataaggctgagggctgccagcagccccgtctgcccaccattcccggccgtggaccatagtcgggatgtcagcagacacacatgggcagcccaaagctgcaggtgccagggcccaccccagcctcgcctgtcacccccactcccgcctcagggccaggcccaggcctcaccacctgacgctgcatgagacattgacaccagaaagccctcttgggggcactgctccctaccccagggccctggccagccgggagcttggctctcctctggctagagtgggaagagggggctggccatggggccctcccagaacctcagcatttccttccagcccatccaaacactgaggcagccttggggaaccccgagctggggggttggcagcccactgcaccgcctcagggttttggggtcctgggctggggccaccatccctgatggcagaactcccacaaccacatgtatttattcctctgtcctaaaccgtcccctccttccctcacccccagcacagggggattctgagcagtgcctcttgtctgagggacatatcagtgacctcgacgttgcctttagactacagttgtgttagcctcttgcgtattggctttttcagagtcatttatgagcagaaaaaaaaaaagtaaaactttgctaatattaacccttctctagctcctcgagggtctgtgacctgcaacacaaggggtggggtcaggaaagggctggggaagacctagcattttttttttcttttttttttttttttgagacggagtctccctttgtcacccaggctggagtggcatgatctcagctcactacaacctccacctctcgggttcaagcgattctcctgcctcagcctcccgagtagctgggactaaaagtgcccaccaccacacccagctagtttttgtatttttttttttttttttttgagacggagtctcgctctgtcgcccaggctggagtgcagtggcgggatctcggctcactgcaagctccgcctcccgggttcacgccattctcctgcctcagcctcccaagtagctgggactacaggcgcccgccactacgcccggctaattttttgtatttttagtagagacggggtttcaccgttttagccgggatggtctcgatctcctgacctcgtgatccgcccgcctcggcctcccaaagtgctgggattacaggcgtgagccactgcgcccggctccagcatttatttctgatgtatctttgtggtagaaaatttggaaagtgcagagaagtatacacaggaagaaaaattcccaacccccagaggcaaaccagctgaaaccacgcaaccccagtcaccccaatgcaccgcgaggctgctgcctcctgtcagggtcagatgagcctcgaggctcaggaaagtcagaggatgccatctgcatggtggtaaattacagaggtgatgaggcaaggtgggtgtggggctgttcttaaaacggggcagcaggaaggccccaaggagatggatttgggctgggacgggaagagagagctggccatgctggggtgggtgggtgttcaaatggtggaaacagcagacgcaaaggccctgccgttggaaccagcttgtggaataaactttcagaaacaga

SEQ ID NO: 124162 - DNA, 1849 bp, Homo sapiens
  Payload ID: 4382
  Gene Symbol: CYB5R3
  Gene Name: cytochrome b5 reductase 3
  Uniprot ID: P00387
  ENST ID: ENST00000407332
  CDS Start-End: 93-929
aaaggcaggctcctgcactgaccccgcgggtcctgtcgtttcagttgggccatatggtgctcttcccagtctggttcctgtacagtctgctcatgaagctgttccagcgctccacgccagccatcaccctcgagagcccggacatcaagtacccgctgcggctcatcgaccgggagatcatcagccatgacacccggcgcttccgctttgccctgccgtcaccccagcacatcctgggcctccctgtcggccagcacatctacctctcggctcgaattgatggaaacctggtcgtccggccctatacacccatctccagcgatgatgacaagggcttcgtggacctggtcatcaaggtttacttcaaggacacccatcccaagtttcccgctggagggaagatgtctcagtacctggagagcatgcagattggagacaccattgagttccggggccccagtgggctgctggtctaccagggcaaagggaagttcgccatccgacctgacaaaaagtccaaccctatcatcaggacagtgaagtctgtgggcatgatcgcgggagggacaggcatcaccccgatgctgcaggtgatccgcgccatcatgaaggaccctgatgaccacactgtgtgccacctgctctttgccaaccagaccgagaaggacatcctgctgcgacctgagctggaggaactcaggaacaaacattctgcacgcttcaagctctggtacacgctggacagagcccctgaagcctgggactacggccagggcttcgtgaatgaggagatgatccgggaccaccttccacccccagaggaggagccgctggtgctgatgtgtggccccccacccatgatccagtacgcctgccttcccaacctggaccacgtgggccaccccacggagcgctgcttcgtcttctgagggccgggcacggtcacacggccacccgccccgcgcaccccacgccctgttcacgctcacccagtcacctccccacatcgcacactggggccccgggttcagcctggcctgcccgtgccctggtgaatcacctggctgagcagttcccctggagccccttcgggagcagggctgtgtcccagatgggccacggctgagccttcagagtacgtcctgcctggcacttactggtccttaccagagacgcccagccccatccctgtcctcatgacccctcgtccaccccccacacacactataaggctgagggctgccagcagccccgtctgcccaccattcccggccgtggaccatagtcgggatgtcagcagacacacatgggcagcccaaagctgcaggtgccagggcccaccccagcctcgcctgtcacccccactcccgcctcagggccaggcccaggcctcaccacctgacgctgcatgagacattgacaccagaaagccctcttgggggcactgctccctaccccagggccctggccagccgggagcttggctctcctctggctagagtgggaagagggggctggccatggggccctcccagaacctcagcatttccttccagcccatccaaacactgaggcagccttggggaaccccgagctggggggttggcagcccactgcaccgcctcagggttttggggtcctgggctggggccaccatccctgatggcagaactcccacaaccacatgtatttattcctctgtcctaaaccgtcccctccttccctcacccccagcacagggggattctgagcagtgcctcttgtctgagggacatatcagtgacctcgacgttgcctttagactacagttgtgttagcctcttgcgtattggctttttcagagtcattt

SEQ ID NO: 124163 - DNA, 2153 bp, Homo sapiens
  Payload ID: 4382
  Gene Symbol: CYB5R3
  Gene Name: cytochrome b5 reductase 3
  Uniprot ID: P00387
  ENST ID: ENST00000407623
  CDS Start-End: 386-1222
aaaacattggagcttggtctgccatcctgaactgtggttcccctgcctcccagcccggctgtgagtgctcagcgaccctgacaggctgacaggtacagtctgccgggctttcctactgtccctggcagccccatgcttactctgcggcccagatcccagctctgtgtccacctgttccttctcctgggttcccttcccccacagttcccagccaagccagagccccccactgcagaacttcctccactccctcccacttcctcccggttagaacaggaccaggagggaggtgccgctcagattctggcaggaccgctggcgggcaggcaggggacagttgggccatatggtgctcttcccagtctggttcctgtacagtctgctcatgaagctgttccagcgctccacgccagccatcaccctcgagagcccggacatcaagtacccgctgcggctcatcgaccgggagatcatcagccatgacacccggcgcttccgctttgccctgccgtcaccccagcacatcctgggcctccctgtcggccagcacatctacctctcggctcgaattgatggaaacctggtcgtccggccctatacacccatctccagcgatgatgacaagggcttcgtggacctggtcatcaaggtttacttcaaggacacccatcccaagtttcccgctggagggaagatgtctcagtacctggagagcatgcagattggagacaccattgagttccggggccccagtgggctgctggtctaccagggcaaagggaagttcgccatccgacctgacaaaaagtccaaccctatcatcaggacagtgaagtctgtgggcatgatcgcgggagggacaggcatcaccccgatgctgcaggtgatccgcgccatcatgaaggaccctgatgaccacactgtgtgccacctgctctttgccaaccagaccgagaaggacatcctgctgcgacctgagctggaggaactcaggaacaaacattctgcacgcttcaagctctggtacacgctggacagagcccctgaagcctgggactacggccagggcttcgtgaatgaggagatgatccgggaccaccttccacccccagaggaggagccgctggtgctgatgtgtggccccccacccatgatccagtacgcctgccttcccaacctggaccacgtgggccaccccacggagcgctgcttcgtcttctgagggccgggcacggtcacacggccacccgccccgcgcaccccacgccctgttcacgctcacccagtcacctccccacatcgcacactggggccccgggttcagcctggcctgcccgtgccctggtgaatcacctggctgagcagttcccctggagccccttcgggagcagggctgtgtcccagatgggccacggctgagccttcagagtacgtcctgcctggcacttactggtccttaccagagacgcccagccccatccctgtcctcatgacccctcgtccaccccccacacacactataaggctgagggctgccagcagccccgtctgcccaccattcccggccgtggaccatagtcgggatgtcagcagacacacatgggcagcccaaagctgcaggtgccagggcccaccccagcctcgcctgtcacccccactcccgcctcagggccaggcccaggcctcaccacctgacgctgcatgagacattgacaccagaaagccctcttgggggcactgctccctaccccagggccctggccagccgggagcttggctctcctctggctagagtgggaagagggggctggccatggggccctcccagaacctcagcatttccttccagcccatccaaacactgaggcagccttggggaaccccgagctggggggttggcagcccactgcaccgcctcagggttttggggtcctgggctggggccaccatccctgatggcagaactcccacaaccacatgtatttattcctctgtcctaaaccgtcccctccttccctcacccccagcacagggggattctgagcagtgcctcttgtctgagggacatatcagtgacctcgacgttgcctttagactacagttgtgttagcctcttgcgtattggctttttcagagtcatttatgagcagaaa

SEQ ID NO: 124164 - DNA, 1050 bp, Homo sapiens
  Payload ID: 4382
  Gene Symbol: CYB5R3
  Gene Name: cytochrome b5 reductase 3
  Uniprot ID: P00387
  ENST ID: ENST00000402438
  CDS Start-End: 185-1021
tctgccatcctgaactgtggttcccctgcctcccagcccggctgtgagtgctcagcgaccctgacaggctgacaggaccaggagggaggtgccgctcagattctggcaggaccgctggcgggcaggcaggggacagttgggccatatggtgctcttcccagtctggttcctgtacagtctgctcatgaagctgttccagcgctccacgccagccatcaccctcgagagcccggacatcaagtacccgctgcggctcatcgaccgggagatcatcagccatgacacccggcgcttccgctttgccctgccgtcaccccagcacatcctgggcctccctgtcggccagcacatctacctctcggctcgaattgatggaaacctggtcgtccggccctatacacccatctccagcgatgatgacaagggcttcgtggacctggtcatcaaggtttacttcaaggacacccatcccaagtttcccgctggagggaagatgtctcagtacctggagagcatgcagattggagacaccattgagttccggggccccagtgggctgctggtctaccagggcaaagggaagttcgccatccgacctgacaaaaagtccaaccctatcatcaggacagtgaagtctgtgggcatgatcgcgggagggacaggcatcaccccgatgctgcaggtgatccgcgccatcatgaaggaccctgatgaccacactgtgtgccacctgctctttgccaaccagaccgagaaggacatcctgctgcgacctgagctggaggaactcaggaacaaacattctgcacgcttcaagctctggtacacgctggacagagcccctgaagcctgggactacggccagggcttcgtgaatgaggagatgatccgggaccaccttccacccccagaggaggagccgctggtgctgatgtgtggccccccacccatgatccagtacgcctgccttcccaacctggaccacgtgggccaccccacggagcgctgcttcgtcttctgagggccgggcacggtcacacggccacccgc

SEQ ID NO: 124165 - DNA, 675 bp, Homo sapiens
  Payload ID: 4382
  Gene Symbol: CYB5R3
  Gene Name: cytochrome b5 reductase 3
  ENST ID: ENST00000438270
  CDS Start-End: 234-675
atctaagacatgcaggccccatgggaggcctctcccaacactttgtgggatccaggccaggggttggccctggagtctgccagccacactgggaaaacattggagcttggtctgccatcctgaactgtggttcccctgcctcccagcccggctgtgagtgctcagcgaccctgacaggctgacagttgggccatatggtgctcttcccagtctggttcctgtacagtctgctcatgaagctgttccagcgctccacgccagccatcaccctcgagagcccggacatcaagtacccgctgcggctcatcgaccgggagatcatcagccatgacacccggcgcttccgctttgccctgccgtcaccccagcacatcctgggcctccctgtcggccagcacatctacctctcggctcgaattgatggaaacctggtcgtccggccctatacacccatctccagcgatgatgacaagggcttcgtggacctggtcatcaaggtttacttcaaggacacccatcccaagtttcccgctggagggaagatgtctcagtacctggagagcatgcagattggagacaccattgagttccggggccccagtgggctgctggtctaccagggcaaagggaagttcgccatccgacctgacaaaaagtccaaccctatcatcagga

SEQ ID NO: 124166 - DNA, 768 bp, Homo sapiens
  Payload ID: 4383
  Gene Symbol: CYB5R4
  Gene Name: cytochrome b5 reductase 4
  ENST ID: ENST00000369679
  CDS Start-End: 230-559
gcctcacccctggcgaccccggaagtgggtcgggggcttggcctctgcccggccacagagccggagctggaggtgctgtcccgtctggcggcgatccccgggcagggcccggggccggggtttgaagatgctgaacgtcccttcccagtctttcccggcccccaggtcgcagcagcgtgtcgcctccggggggcgtagcaaggtacctttaaaacagggcagaagccttatggattggattcgactgaccaaaagtggaaaggatctaacgggattaaaaggcaggttaattgaagtaactgaagaagaacttaagaaacacaacaaaaaagatgattgttggatatgcataagaggtttcgtttataatgtcagcccttatatggagtatcatcctggtggagaagatgaactaatgagagcagcaggatcagatggtactgaactttttgatcaggttcatcgttgggtcaattatgaatccatgctgaaagaatgcctggttggcagaatggccattaaacctgctgttctgaaaggcaaactctggcacctgtagagctgaggatggagatagacaccaggacctatagtgggctgagacattactttcaaagatttcttttactgtcacagcactgtgagcaaggacaagacatctattgaatgggctgcctgccagttggaagttcaacttttgtaaagtcagtcaaagttctttcttctagaagcctcagtttcctcattggtaaaatggagacaatttag

SEQ ID NO: 124167 - DNA, 9252 bp, Homo sapiens
  Payload ID: 4383
  Gene Symbol: CYB5R4
  Gene Name: cytochrome b5 reductase 4
  Uniprot ID: Q7L1T6
  ENST ID: ENST00000369681
  CDS Start-End: 141-1706
tgcgtcagaatgcgcctcacccctggcgaccccggaagtgggtcgggggcttggcctctgcccggccacagagccggagctggaggtgctgtcccgtctggcggcgatccccgggcagggcccggggccggggtttgaagatgctgaacgtcccttcccagtctttcccggcccccaggtcgcagcagcgtgtcgcctccggggggcgtagcaaggtacctttaaaacagggcagaagccttatggattggattcgactgaccaaaagtggaaaggatctaacgggattaaaaggcaggttaattgaagtaactgaagaagaacttaagaaacacaacaaaaaagatgattgttggatatgcataagaggtttcgtttataatgtcagcccttatatggagtatcatcctggtggagaagatgaactaatgagagcagcaggatcagatggtactgaactttttgatcaggttcatcgttgggtcaattatgaatccatgctgaaagaatgcctggttggcagaatggccattaaacctgctgttctgaaagactatcgtgaggaggaaaagaaagtcttaaatggcatgcttcccaagagccaagtgacagatacacttgccaaagaaggtcctagttatccaagctatgattggttccaaacagactctttagtcaccattgccatatatactaaacagaaggatatcaatttagactcaataatagttgatcatcagaatgattcctttagagcagaaacaattattaaggattgtttatatcttatacatattgggctaagccatgaggttcaggaagatttttctgtgcgggttgttgagagtgtgggaaaaatagagattgttctacaaaaaaaagagaatacttcttgggactttcttggccatcccctgaagaatcataattcacttattccaaggaaagatacaggtttgtactacagaaagtgccagttaatttccaaggaagatgttactcatgatacgaggcttttctgtttgatgctgccaccaagcactcatcttcaagtgcccattgggcaacatgtttacctcaagctacctattacaggtacagaaatagtaaagccatatacacctgtatctggttccttactctcagagttcaaggaaccagttcttcccaacaataaatacatctactttttgataaaaatctatcccactggactcttcacaccagagcttgatcgtcttcagattggagattttgtttctgtaagcagtcctgagggcaattttaaaatatccaagttccaagaattagaagatctctttttgttggcagctggaacaggcttcacaccaatggttaaaatactgaattatgctttgactgatatacccagtctcaggaaagtgaagctgatgttcttcaataaaacagaagatgatataatttggagaagccaattggagaaattagcatttaaagataaaagactggatgttgaatttgttctctcagcacctatttctgaatggaatggcaaacagggacatatttcaccagctcttctttctgaatttttgaaaagaaatttggacaaatccaaagttctcgtctgcatttgtggaccagtgccatttacagaacaaggagtaaggttgctgcatgatctcaacttttccaaaaatgagatccatagttttacagcataatgaagagctgtcattgtcctttattcaactagtttatctaaatttgtgattgcttagggttttttaagagaacatttttgtacataacaaaaggttaactagaatccagccttcagtttcttaaatgaaatcaaatgttccttcagtacaggtaacttcttggctttcttttgtaccacaacttattttactactgatatttgacctggaaagttaatcatggcaacaaatacatacaggattctttgttatgaatcacaaatttccttgccatttaaattatatcactgttctacaataagcacttgtgttttatgacatgataaagtaaatgatcacttcgatcatgtttctatgctgtaaaatgtcttattagcaatacagattaaattttaccttgcactgttaactcaggaaatgatcatttatgtccttgttattaatgttaaaacatagaatgttataacttattaagtgatccaaacatttttttgtgtgtgtatggcattgatgcagaatagaataaaattatacttaagttctttttaatccttgtggtagaaatgtggttgaatgcaacaatattgggccagcgtctcaaggggaattttaaaaggcagcaataaaatatattagagacatgacacacatgcgcctttggactaggtgtgttaacagagcttgagagagggaaccttgacagctatttttactcttagccaaaaacaaagacattaggaaagagagtgaaagtatagtgtctagttccacagcataaagttattatttggtgctttggaatgggttgaattttaattctttagtccatctaaatcagctggaaaaatgaggaacattctgccttgaatggttcttcccctggttggctgctttctccacaactggtggttcagcaggaagccctcttaggttcttgcatgtgggcaacttattttctcttcctgctgctttgtgcaactgtcaaatactttcacagattcagatcagcaaagggtatcaaggatagtcattgtgagcttttcgtgaggaaactgttgaatgcataggtagctactgtataagctaactaggatttttcagtcttagtacagctgcaatgttttcacagaaataggggattgaaagagtctccaatttctctgtaaatgattttgtaaacagctaaatctttgctgaatgaataatatactcaagaggaacacaatattaatattccccaaattacagacgcccagcttgtgaagcttcctatgtgcaaatggctggttgaacactatcactttttcctgtgcctctgtcttctgtagccaattccaccatcatcattattcacaaagacaggaatctagctgtcctggactggtactgttccctggtaggtaacaagaactttttctagcttcatgccttccccctacttatttttttccatctaagggtgaggtgatttggctctgtgtcctcacccaaatctcctctcaaattgtaattcccacatgtcgagggagggtcttggtgggaggtgattggatcatgggagtgattgcccccatgctgttctcatgatggtaagtgagttctcatgagatctgatggtttaaaagtgtggcacttcctccccacctcctgctgtattatgaagaaggtccttgcttcttctttgctttctaccataattgtacatttcctgaggcctccccagccatgcagaactgtgagtcaattaaacctcttttcttcataaattacccagtctcaggtagttctttatagcagtgtgaaaatagactaatataaaaagagactatttaccacttttttttagttcatttgcgatgtatcaaatctaacttagccaacatctttctcatcttttctaagcctcttcttttttctctctcctttcccaagcaacagaatctcctattagtcgctatatgtaatgcttcctcattcctccttttatgttttatatttttgtttatattttatttatattttgtttatattttgttatattttattatattttgttatatttatattttgtttatattttaaaacaaatccataagtgtctcctgggtaatctccactgacatgattttatcaacttacatgttaattcccaaatgggagtgactaatttgagaatcagctgagcttcagttttcaatatccatttacttcctgcataccaccccaccatccacctagtaagccattctagaactattaggaatcaacatcaatgtccccttctccagtctgactcttccataccagctaaccctgtcctatcatccctcagctggattagtacagtagcttgataattcatcttcatgctgcagtcctgatctcctaaaattcattctccattccagggtattctagaaggacttggaggaaaaaatcccctaagtagagcctcagtcttccaatgaatgcaaccaaatactgaggagcacagataggagtatagtttatcactgttattctcaagcaaataactcaaagactcctacatcacatatttgcagtgaagaagaattacgctcaaagtcacatttgcttgcaaattctgctttttttaaaaaaaagtttattaattttctattgctgctagatcaaattactacaaacttagtagcttaaaacaacacccatttattatctcacagttccatggcacagaaatctaggcacaatatggctcaactgggtcctctgcttaaagcctcacaaggctgtaatcagattgtcagctgagctgggctcttagctagaggctgtaaggggaagtccctagataagagttctttcagcctcattaggtagatttcagttccttgcagttgtaggactgagttccccatttccttgctagctgttagctgtgggctagtctttgtttctagaatttgcccacattccttctcatactttctgtgtggccctcttcagcattagtggatgaatctcatgctttcagtctctctgaattcccttgtgggcttcttcagcattggtagatgaatcttatgctttcaatctctctgaattccctttctgccatatctttcttgccctagcaagagttcactgcttttaagatctcatgtggttagattggacctatccagatatccagggtaatcttcctattttaaaaatctataattttaattatagctgtaaagtcccttttcctatataatatattcaaaggttgcaggcatttgggtgttgacatctttgatgggcacattgtgtctaccacaggctatagaaagaacagagaaatttgtccaagataagatgattaggttttgtctagataggggcccttgctatgggccctcagtttttaccttaatgtaacagaacatgagaggagctttgacacccaccccaaaagagtcaacttcattatgctggcaaaggcatgggtacaacctgctctgtgatctaccttctgaaccacacaagcttgtcctgaacgaggttggggctgagtctgttgataacagacccccatttttgggcagaaaaaacagattctgtatgatctacagtatttaacattgtggcaaataaattataaaggaaaaatggaatctcaagtagttacagtctcttggtgtctttcaacattggttttattttgaagtcattttcacccagcattgcaagtttagcagacctcaaaacagaatgccaaagtgatcttaaaattcaaaaatgagtttactttctttgttaaagttctcttttgatgcatatcccccattcatggaatggaagcattatcttgggtgcagcattacacgtagagttaaaatgtggaaacaacccaaacatcctgatatggtttggctctgtgtcaccacccaaatctcatcttgaattgtactctcataattcccatgtgttgtgggaggaacccagtgggagataatttgaatcatgggggcagtttccctcatactgttctcatggtagtgaataactctcacaagacctggtggttttatcaggggtttccgcttttgcatcttactcattttctcttgcggccgccatgtaagaagtgcctttcacctcctgccatgattctgaggcctccccagccatgtggaactgtaagtccaattaaacccctttttttccccagtctcaggtacgtcttttatcagcagcgtgaaaatggactaatacagtaaattggtaccagtagagcaggtgttgctgcaaagataccgggaaatgtggaagcaactttggaacttggtaacaggcagagattggaacagtttggagggctcagaagaagacaggaaaatgggaaagtttggaacttccttgagacttgttgaatggctttgacaaaaatactgataatgatatggacaatgaaatctagactgaggtggtctcaggtggagatgaggaacctgttgagaactggagcaaaggtgactcttgttatgatttagcaaagagactggcggcattttgcccctgccctggagatttgtggaactctgaacttgagagagatgattaagggtatctggtggaagaaatttctaagcagcaaagcattcaagaggtgactcaagtgttgttaaaggcattcagttttaaaagggaagcagagcattaaaattcagaaaattagcagcttgacaatgcgatagaaaagaaaatcctattttctgaggagaaattcaagctggctgtagatatttgcataagtaacaaggaactgaatgttaatttccaagacaatggggaaaatgtctccagggcatgtcagagacatttgtggcagcctcttctatcacagacctggaggtctaggaagaaaaaatggtaaaaatggttttgtgggcaaggcctagggtccttgtgctgtgtgcagtctaaggacttggtgccctgtttcctagccactccggccatggctgaaaggggccaacatgaagctcaggccatggcttcagagggtgaaagccttaagccttggcaacttccatgtgatgttgagcatgtgggtgcacagaagtcaagaaatggggtttgggaacctctgtctagatttcagaagatgtatggaaatgcctggatgcccaggcagaagtttgctgcaggggcggggctctcatggagaacctcggctagggcagtgcagaagggaaatgtggggttggagccccctcacagagtccctactgggacaccgcctagtggagctgtgagaagaggaccactgtcctccagaccccagaatggtagatcgacttacagcttgtaccaggtgcctggaaaagctgcagatactcaacaccagcccatgaaagcagccaggatggaggctgtaccctgaaagccacagggccagagctgcccaagaccatgggaagccacctcttgcatcagcgtgacctggatgtgagacctggagtaaaaggagatcattttggagctttaaaatttgactgccccactggattttggacttccatgggccctgtaacccctttgttttggccaatttctcccatttggaatggctgtatttacccaatacctgtaccctcattgtatctaggaagtaactagcttgcttttgattttacaggctcataagtggaagggacttgccttgtctcagatgagacttttgaactgtggacttttgggttaatgctgaaatgatttaagactttggggtactgttgggaatgcatgattggttttgaaatgtgaggacataagatttggaggagccaggggtgggatgatatggtttggctctgtgtccccacccaaatttcatcttgaattatactcccataattcccatgtgttatacgtgggacctggtgggagataatttgaatcatgggggtggtttcccccatactgttctcatggtagagaataagtctcatgagatctgatggtttcatcagggggttccgcttttgcatcttactcatttctcttgctgccaccctgtaagaagtatttttaacctaccgccatgattctgaggcctccccagccatgtggaactataagtccaattaaacctctttttcttggcttaatttcttgggtatgtctttatcagcagtgattctattcctatgaaatgtctagaacaggaaaatctatgagacataaagtaattaagtggctgttcaggggatacaggaataggggataataactaaagggttgggagggtgtttttgaaatgctaaaatattctgaagtttactgtggttatggttgcacatacttatgaatatacctaaaaatgttgaattgtacattttaagtagatgaattgtatctaatttgaaccatatctcagtaaagatataaaaatgtttttgggtactaagactaaactagaaagaacataagaggaaatacatattatataagaagaaaagagtaaaaataaatctttaaaaaaataaaaataaaaaggaggcctgtgtgcggtggctcatgcctgtaatcccagcactttgggaggccgaggcgggtggatcacctgaggtcgggagtttgagaccagcctgaccaacatggagaaaccctctctctactaaaaatacaaaattagccaggtgtggtagcataggcctgtaatccctgctacttgggaggctgaggcaggataattgcctgaacccgggaggcggaggttgcggtgagccgagattgcacctttgcactccagcctgggcaacaagagtgaaactccatctcaaaaaataaaacaaataaaaaggattctagaggaagtggtaaatagtgaagataggcaaagaatatccaacatatgaataatagtagtccttgaagacaaaaatcaaaggaaaagaatactaaaaactctacttaatgaaaaatcatcctgaaattaacaagaaaaattgaaattaatgttgaaagagcaccagagagtatacatccaaaaagaccaacattaatataaattttagtaaaattactgaaccatgaaaagtaaatgcctttagttatctaaacaaaaactaattacttaaaagggaaagaaaattagatcatcaccagacttttcaacagcattgccttatgctttaagaaagtgttgtaccacatttgatatcctgatggaaaaaaatgtgagccaaggattttacacccaacaaaacttaatggtgaatataaaggcataaaccaatatagaatgcaaaaacttgggaaatattgttttccaaagcctttcctaagtaatctacaaaagaacaagctttaaacaaccagaaagactagaaagtcatcaataaaaggattggagaacattaaacttgtagaactaaaacaaaatgagagttaaaaaagaaagagtataggtatatgctaaactatttcagtagttttggcagtggttgtattagtattgttattctgaagatgtgaaataatgcaaacgcataataaaaaatgtcatctggtc

SEQ ID NO: 124168 - DNA, 985 bp, Homo sapiens
  Payload ID: 4384
  Gene Symbol: CYB5RL
  Gene Name: cytochrome b5 reductase-like
  Uniprot ID: Q6IPT4
  ENST ID: ENST00000287899
  CDS Start-End: 66-809
catagagcctggcctgttctggaagagcacccagttgttccttctaggctgcccaagccccactgatgatggctgagagggaagaggacgacgacactgaggaagcctggatgcagctacggcccacagaacccttgccttcccagtgctgcggcagtggctgctcaccctgtgtgtttgacctctatcaccgagatctggcaaggtgggaggcagcccaagccagcaaggacaggagcctgctgcgtgggccagagtcacagagctgcccctccaagctgaacccagagaccttcgtggccttctgcatcattgccatggacaggctcactaaggacacctaccgtgtccggtttgctctacccgggaacagccagcttggcctgcggcccggccagcacctcatcctacgagggatagtagatgacttagaaattcagagagcctatacgcccatcagccctgccaacgcagaaggatactttgaagtgttaattaagtgctaccagatggggctgatgtcccggtatgttgagtcctggagagtaggagacacagctttctggcgaggacctttcggagatttcttctataaaccaaaccaggagagctcctcagagcagcttccctggagttaccaagagaaaacccactttggccacctgggccaggacctaattaaagagctggtcagctgctgtcggagaaagccattcgcactggtctgtggctcggctgagttcaccaaagacatagccaggtgcttactgtgcgcaggcctcactgaggactcctatttcctcttctagccctggcctctcttccaaagcctaggccatgagcctgctactgggacccaggaaggagcacagactggaatcagaagacacggagtccaggcctggtcctgctgctcatttgccaggtgaccttgggcaagtgtctttactgctcagaacctctacttctcatctgccccatgagg

SEQ ID NO: 124169 - DNA, 3339 bp, Homo sapiens
  Payload ID: 4384
  Gene Symbol: CYB5RL
  Gene Name: cytochrome b5 reductase-like
  ENST ID: ENST00000421415
  CDS Start-End: 258-470
aaaatcctcacgtgaggtgaagcgcaggcgagtagggccagacatggtggctcatgcctgtaatctcagcactttgggagactgagatgagaagatcacttgaggccaggagttcgagaccagactggcaacatagtgagaccctgtctctacaaaatgctggccaaggagcagggcctgcgcccgtggtctcatagagcctggcctgttctggaagagcacccagttgttccttctaggctgcccaagccccactgatgatggctgagagggaagaggacgacgacactgaggaagcctggatgcagctacggcccacagaacccttgccttcccagtgctgcggcagtggctgctcaccctgtgtgtttgacctctatcaccgagatctggcaaggtgggaggcagcccaagccagcaaggacaggagcctgctgcgtgggccagagtcacagagggatagtagatgacttagaaattcagagagcctatacgcccatcagccctgccaacgcagaaggatactttgaagtgttaattaagtgctaccagatggggctgatgtcccggtatgttgagtcctggagagtaggagacacagctttctggcgaggacctttcggagatttcttctataaaccaaaccagtatggtgagctcctcttgctggctgcgggcacgggcctggcccccatggtgcctatcctgcagagcatcacagacaatgagaatgacgagacttttgtcactctggtcggttgcttcaagacctttgagagcatctacctgaaaaccttcctccaagagcaggcccgtttctggaatgtccgtaccttctttgtactcagccaggagagctcctcagagcagcttccctggagttaccaagagaaaacccactttggccacctgggccaggacctaattaaagagctggtcagctgctgtcggagaaagccattcgcactggtctgtggctcggctgagttcaccaaagacatagccaggtgcttactgtgcgcaggcctcactgaggactcctatttcctcttctagccctggcctctcttccaaagcctaggccatgagcctgctactgggacccaggaaggagcacagactggaatcagaagacacggagtccaggcctggtcctgctgctcatttgccaggtgaccttgggcaagtgtctttactgctcagaacctctacttctcatctgccccatgaggttaatcactcctcctggcctcctactatgtagaaggaggatgggctgtaggggccctgaggaggtgagcaaccagcctgggagtcagggaggactcttcagaggaagccaagtccaggctgagccccaggaggagtaggagttgggcaggggaagagtcgggaggagcttccctggcccctccgattagaggatctaatgggggctccaactgtggcctcagcaccatctcggattaggggctcctgagtgtgtagggaaggacacgggagaggcttagagctctttggaggaggattctgcctttcctccagtgccatgagcctgacacatgaaggtcttgggttctatgacttgaccacatcctgagagcaaggtggggccctcgactgtcttgtattggccccaagcctttcttgctgtgaacagcttcattctcagtcccctttcctggctcaaaaatcgagcctagcaaaagaagaggcacgggaaggaaacgcccctccctcctcctgcaggcagccactcagcctgtgccttcagcttggtgccctggtgatggttgctatggagatctaaagatagagcaggagtcaggagacctgggtccctctcccagcttgtcccactgagcggctgccgatcacggtccacccaccccaggaacctggcacccctatcccaggaacccagtgcccctgggcagcgcactgcagttaatgaattctgccttcaacagcctgggctctagcgtgctgcaccagcttgggctagctacaggcagtcccagaattggaatattaagccatggaatcttagagttagacttttatagtcatagaaatgtactcttcaccatatcaaagctgaaagttcaggactctaagaaacatacagtgtgacagacttatcgtatacacgggaaactgaagcccagtgagactaaatgacttgcccagggtaaaacagtccatggcagagccagcactagaagcctcctagcttcaacctcatgtgccaattctgcatcagtgattttcgaactgcgctctacaggaagcaagggttctttgcatagcagcagtgaaaggacagctccagatggatccccagtacccccttcaaccagagcagctgcatttttatcccattcatatattggggttttgaattatttttatttgtacaaaaggattttcctagccactaaaaaaaatggcaacaaatctctctgctgtgtcacatttaataaataattgtgacacatagctggggggtggtgctggaggtttcagaccgcctcacaggcagagttccagggtcagagagcatggagtactgtgtgtgaccttcttccagaagcacgggcacaggagcatgttaaaggccctgaaaagaccagtggcaaagaaactcctttcattttgtttaatccagagtttttcaagcttatttaactatagaacacttttctgtgggtttcgtagcctctttctagcacagtatagtgagtgggaaaggccctgactgagagtcaaagattctgagcaggaaccatgatctcttcctgcctagtatgtgacttgagcaagacacttttcctctccccaggcctctgaggtctgcgagttttcctccaccctttcctctccctcagtttgcacatcctattgactcagctccaaatagcgggggcctgtcaggagcctgactctgttcagacaccagggaaacaacagcacaccaggcagatgcagttatgtccatcggggaacttacagcctagcaaggaaggcagcaattcaacctgtaagtctaaaagtgatgggtgtcatgaaaaggtaagtgcagggtgctgggagagtggttggcaggggctttagcctagtctagggagagcccaggggcacaccactgccagcggggatagaggcttcaaaagctttgaagtcactcatattaagagtgttgccggacacggtggctcatgcctgtaatcccagcactttgggaggctgcggcaggcagattgcctgagcccagaagttcgaggccagcctggccaacatgacaaaaccctgtctctacaaaaaaaaaaaaaaaaaaaa

SEQ ID NO: 124170 - DNA, 3415 bp, Homo sapiens
  Payload ID: 4384
  Gene Symbol: CYB5RL
  Gene Name: cytochrome b5 reductase-like
  ENST ID: ENST00000420054
  CDS Start-End: 23-190
cgacgacactgaggaagcctggatgcagctacggcccacagaacccttgccttcccagtgctgcggcagtggctgctcaccctgtgtgtttgacctctatcaccgagatctggcaaggtgggaggcagcccaagccagcaaggacaggagcctgctgcgtgggccagagtcacagagggatagtagatgacttagaaattcagagagcctatacgcccatcagccctgccaacgcagaaggatactttgaagtgttaattaagatgaagaaactgaagctcaaaaagatgacatcatttgtctcaaggcctcttgggtaatatgatccaaatggaaggacaaaagttcagtgtcagttctgtttaacaatgctaccagatggggctgatgtcccggtatgttgagtcctggagagtaggagacacagctttctggcgaggacctttcggagatttcttctataaaccaaaccagatggaatcttgctctgttgcccaggctggagtgcagtggcatgatctcgactcactgcaacctctgcctcccaggctcaagcaattcttctgcctcagcctcccaagtagctgggactacaggcgtgcaccaccacgcttggctaatttttgtatttttagtagagacggagttttgccacgttggtctcgaactcctgaccttaagtgatccgcccaccttggcctcccaaagtactaggtttataggttatggtgagctcctcttgctggctgcgggcacgggcctggcccccatggtgcctatcctgcagagcatcacagacaatgagaatgacgagacttttgtcactctggtcggttgcttcaagacctttgagagcatctacctgaaaaccttcctccaagagcaggcccgtttctggaatgtccgtaccttctttgtactcagccaggagagctcctcagagcagcttccctggagttaccaagagaaaacccactttggccacctgggccaggacctaattaaagagctggtcagctgctgtcggagaaagccattcgcactggtctgtggctcggctgagttcaccaaagacatagccaggtgcttactgtgcgcaggcctcactgaggactcctatttcctcttctagccctggcctctcttccaaagcctaggccatgagcctgctactgggacccaggaaggagcacagactggaatcagaagacacggagtccaggcctggtcctgctgctcatttgccaggtgaccttgggcaagtgtctttactgctcagaacctctacttctcatctgccccatgaggttaatcactcctcctggcctcctactatgtagaaggaggatgggctgtaggggccctgaggaggtgagcaaccagcctgggagtcagggaggactcttcagaggaagccaagtccaggctgagccccaggaggagtaggagttgggcaggggaagagtcgggaggagcttccctggcccctccgattagaggatctaatgggggctccaactgtggcctcagcaccatctcggattaggggctcctgagtgtgtagggaaggacacgggagaggcttagagctctttggaggaggattctgcctttcctccagtgccatgagcctgacacatgaaggtcttgggttctatgacttgaccacatcctgagagcaaggtggggccctcgactgtcttgtattggccccaagcctttcttgctgtgaacagcttcattctcagtcccctttcctggctcaaaaatcgagcctagcaaaagaagaggcacgggaaggaaacgcccctccctcctcctgcaggcagccactcagcctgtgccttcagcttggtgccctggtgatggttgctatggagatctaaagatagagcaggagtcaggagacctgggtccctctcccagcttgtcccactgagcggctgccgatcacggtccacccaccccaggaacctggcacccctatcccaggaacccagtgcccctgggcagcgcactgcagttaatgaattctgccttcaacagcctgggctctagcgtgctgcaccagcttgggctagctacaggcagtcccagaattggaatattaagccatggaatcttagagttagacttttatagtcatagaaatgtactcttcaccatatcaaagctgaaagttcaggactctaagaaacatacagtgtgacagacttatcgtatacacgggaaactgaagcccagtgagactaaatgacttgcccagggtaaaacagtccatggcagagccagcactagaagcctcctagcttcaacctcatgtgccaattctgcatcagtgattttcgaactgcgctctacaggaagcaagggttctttgcatagcagcagtgaaaggacagctccagatggatccccagtacccccttcaaccagagcagctgcatttttatcccattcatatattggggttttgaattatttttatttgtacaaaaggattttcctagccactaaaaaaaatggcaacaaatctctctgctgtgtcacatttaataaataattgtgacacatagctggggggtggtgctggaggtttcagaccgcctcacaggcagagttccagggtcagagagcatggagtactgtgtgtgaccttcttccagaagcacgggcacaggagcatgttaaaggccctgaaaagaccagtggcaaagaaactcctttcattttgtttaatccagagtttttcaagcttatttaactatagaacacttttctgtgggtttcgtagcctctttctagcacagtatagtgagtgggaaaggccctgactgagagtcaaagattctgagcaggaaccatgatctcttcctgcctagtatgtgacttgagcaagacacttttcctctccccaggcctctgaggtctgcgagttttcctccaccctttcctctccctcagtttgcacatcctattgactcagctccaaatagcgggggcctgtcaggagcctgactctgttcagacaccagggaaacaacagcacaccaggcagatgcagttatgtccatcggggaacttacagcctagcaaggaaggcagcaattcaacctgtaagtctaaaagtgatgggtgtcatgaaaaggtaagtgcagggtgctgggagagtggttggcaggggctttagcctagtctagggagagcccaggggcacaccactgccagcggggatagaggcttcaaaagctttgaagtcactcatattaagagtgttgccggacacggtggctcatgcctgtaatcccagcactttgggaggctgcggcaggcagattgcctgagcccagaagttcgaggccagcctggccaacatgacaaaaccctgtctctacaaaaaaaaaaaaaaaaaaaa

SEQ ID NO: 124171 - DNA, 679 bp, Homo sapiens
  Payload ID: 4384
  Gene Symbol: CYB5RL
  Gene Name: cytochrome b5 reductase-like
  ENST ID: ENST00000497820
  CDS Start-End: 136-552
gactggcaacatagtgagaccctgtctctacaaaatgctggccaaggagcagggcctgcgcccgtggtctcatagagcctggcctgttctggaagagcacccagttgttccttctaggctgcccaagccccactgatgatggctgagagggaagaggacgacgacactgaggaagcctggatgcagctacggcccacagaacccttgccttcccagtgctgcggcagtggctgctcaccctgtgtgtttgacctctatcaccgagatctggcaaggtgggaggcagcccaagccagcaaggacaggagcctgctgcgtgggccagagtcacagagctgcccctccaagctgaacccagagaccttcgtggccttctgcatcattgccatggacaggctcactaaggacacctaccgtgtccggtttgctctacccgggaacagccagcttggcctgcggcccggccagcacctcatcctacggtacactcaggtagcgggaggaccaaagcttcacagccctgctttgctatttgctagctgctggccttgaccaactagcgtactctcccttaagcctccatttgtcatcttcaagatagacatagtgacacatgactcagagagttcttgggattgaactagataatgcattttcataataaataataacacaatca

SEQ ID NO: 124172 - DNA, 2642 bp, Homo sapiens
  Payload ID: 4384
  Gene Symbol: CYB5RL
  Gene Name: cytochrome b5 reductase-like
  ENST ID: ENST00000528287
  CDS Start-End: 284-655
ctacccagagactgggaggaacctggaaaatcctcacgtgaggtgaagcgcaggcgagtagggccagacatggtggctcatgcctgtaatctcagcactttgggagactgagatgagaagatcacttgaggccaggagttcgagaccagactggcaacatagtgagaccctgtctctacaaaatgctggccaaggagcagggcctgcgcccgtggtctcatagagcctggcctgttctggaagagcacccagttgttccttctaggctgcccaagccccactgatgatggctgagagggaagaggacgacgacactgaggaagcctggatgcagctacggcccacagaacccttgccttcccagtgctgcggcagtggctgctcaccctgtgtgtttgacctctatcaccgagatctggcaaggtgggaggcagcccaagccagcaaggacaggagcctgctgcgtgggccagagtcacagagctgcccctccaagctgaacccagagaccttcgtggccttctgcatcattgccatggacaggctcactaaggacacctaccgtgtccggtttgctctacccgggaacagccagcttggcctgcggcccggccagcacctcatcctacggtacactcagagggatagtagatgacttagaaattcagagagcctatacgcccatcagccctgccaacgcagaaggatactttgaagtgttaattaagtgctaccagatggggctgatgtcccggtatgttgagtcctggagagtaggagacacagctttctggcgaggacctttcggagatttcttctataaaccaaaccagtatggtgagctcctcttgctggctgcgggcacgggcctggcccccatggtgcctatcctgcagagcatcacagacaatgagaatgacgagacttttgtcactctggtcggttgcttcaagacctttgagagcatctacctgaaaaccttcctccaagagcaggcccgtttctggaatgtccgtaccttctttgtactcagccaggagagctcctcagagcagcttccctggagttaccaagagaaaacccactttggccacctgggccaggacctaattaaagagctggtcagctgctgtcggagaaagccattcgcactggtctgtggctcggctgagttcaccaaagacatagccaggtgcttactgtgcgcaggcctcactgaggactcctatttcctcttctagccctggcctctcttccaaagcctaggccatgagcctgctactgggacccaggaaggagcacagactggaatcagaagacacggagtccaggcctggtcctgctgctcatttgccaggtgaccttgggcaagtgtctttactgctcagaacctctacttctcatctgccccatgaggttaatcactcctcctggcctcctactatgtagaaggaggatgggctgtaggggccctgaggaggtgagcaaccagcctgggagtcagggaggactcttcagaggaagccaagtccaggctgagccccaggaggagtaggagttgggcaggggaagagtcgggaggagcttccctggcccctccgattagaggatctaatgggggctccaactgtggcctcagcaccatctcggattaggggctcctgagtgtgtagggaaggacacgggagaggcttagagctctttggaggaggattctgcctttcctccagtgccatgagcctgacacatgaaggtcttgggttctatgacttgaccacatcctgagagcaaggtggggccctcgactgtcttgtattggccccaagcctttcttgctgtgaacagcttcattctcagtcccctttcctggctcaaaaatcgagcctagcaaaagaagaggcacgggaaggaaacgcccctccctcctcctgcaggcagccactcagcctgtgccttcagcttggtgccctggtgatggttgctatggagatctaaagatagagcaggagtcaggagacctgggtccctctcccagcttgtcccactgagcggctgccgatcacggtccacccaccccaggaacctggcacccctatcccaggaacccagtgcccctgggcagcgcactgcagttaatgaattctgccttcaacagcctgggctctagcgtgctgcaccagcttgggctagctacaggcagtcccagaattggaatattaagccatggaatcttagagttagacttttatagtcatagaaatgtactcttcaccatatcaaagctgaaagttcaggactctaagaaacatacagtgtgacagacttatcgtatacacgggaaactgaagcccagtgagactaaatgacttgcccagggtaaaacagtccatggcagagccagcactagaagcctcctagcttcaacctcatgtgccaattctgcatcagtgattttcgaactgcgctctacaggaagcaagggttctttgcatagcagcagtgaaaggacagctccagatggatccccagtacccccttcaaccagagcagctgcatttttatcccattcatatattggggttttgaattatttttatttgtacaaaaggattttcctagccactaaaaaaaatggcaacaaa

SEQ ID NO: 124173 - DNA, 1148 bp, Homo sapiens
  Payload ID: 4384
  Gene Symbol: CYB5RL
  Gene Name: cytochrome b5 reductase-like
  Uniprot ID: Q6IPT4
  ENST ID: ENST00000534324
  CDS Start-End: 1-948
atgatggctgagagggaagaggacgacgacactgaggaagcctggatgcagctacggcccacagaacccttgccttcccagtgctgcggcagtggctgctcaccctgtgtgtttgacctctatcaccgagatctggcaaggtgggaggcagcccaagccagcaaggacaggagcctgctgcgtgggccagagtcacagagctgcccctccaagctgaacccagagaccttcgtggccttctgcatcattgccatggacaggctcactaaggacacctaccgtgtccggtttgctctacccgggaacagccagcttggcctgcggcccggccagcacctcatcctacgagggatagtagatgacttagaaattcagagagcctatacgcccatcagccctgccaacgcagaaggatactttgaagtgttaattaagtgctaccagatggggctgatgtcccggtatgttgagtcctggagagtaggagacacagctttctggcgaggacctttcggagatttcttctataaaccaaaccagtatggtgagctcctcttgctggctgcgggcacgggcctggcccccatggtgcctatcctgcagagcatcacagacaatgagaatgacgagacttttgtcactctggtcggttgcttcaagacctttgagagcatctacctgaaaaccttcctccaagagcaggcccgtttctggaatgtccgtaccttctttgtactcagccaggagagctcctcagagcagcttccctggagttaccaagagaaaacccactttggccacctgggccaggacctaattaaagagctggtcagctgctgtcggagaaagccattcgcactggtctgtggctcggctgagttcaccaaagacatagccaggtgcttactgtgcgcaggcctcactgaggactcctatttcctcttctagccctggcctctcttccaaagcctaggccatgagcctgctactgggacccaggaaggagcacagactggaatcagaagacacggagtccaggcctggtcctgctgctcatttgccaggtgaccttgggcaagtgtctttactgctcagaacctctacttctcatctgccccatgaggttaatcactcctcctggcctccta

SEQ ID NO: 124174 - DNA, 602 bp, Homo sapiens
  Payload ID: 4384
  Gene Symbol: CYB5RL
  Gene Name: cytochrome b5 reductase-like
  ENST ID: ENST00000493530
  CDS Start-End: 1-531
cgtgggccagagtcacagagctgcccctccaagctgaacccagagaccttcgtggccttctgcatcattgccatggacaggctcactaaggacacctaccgtgtccggtttgctctacccgggaacagccagcttggcctgcggcccggccagcacctcatcctacggtacactcagtgctaccagatggggctgatgtcccggtatgttgagtcctggagagtaggagacacagctttctggcgaggacctttcggagatttcttctataaaccaaaccagtatggtgagctcctcttgctggctgcgggcacgggcctggcccccatggtgcctatcctgcagagcatcacagacaatgagaatgacgagacttttgtcactctggtcggttgcttcaagacctttgagagcatctacctgaaaaccttcctccaagagcaggcccgtttctggaatgtccgtaccttctttgtactcagccagttggttgaatccacaaatgtggaacccatggatacagagggctaactgtatacttaatgatttgtatacttttctacacatatgttgtactccaataaaatgttcatttaaaaaaa

SEQ ID NO: 124175 - DNA, 718 bp, Homo sapiens
  Payload ID: 4385
  Gene Symbol: CYB5A
  Gene Name: cytochrome b5 type A (microsomal)
  ENST ID: ENST00000299438
  CDS Start-End: 248-430
ggctcggtgttaattaaccttttccagtcacgccttggcagccaggtgccgtgcttgactcctgagaccgcggtgtgtggctggagcaagaacacagaggccaggcagagcagcggacgttctgcgtgggactcgcccctaacagctttggaagcatcctggtggggaagaagttttaagggaacaagctggaggtgacgctactgagaactttgaggatgtcgggcactctacagatgccagggaaatgtccaaaacattcatcattggggagctccatccagatgacagaccaaagttaaacaagcctccggaaactcttatcactactattgattctagttccagttggtggaccaactgggtgatccctgccatctctgcagtggccgtcgccttgatgtatcgcctatacatggcagaggactgaacacctcctcagaagtcagcgcaggaagagcctgctttggacacgggagaaaagaagccattgctaactacttcaactgacagaaaccttcacttgaaaacaatgattttaatatatctctttctttttcttccgacattagaaacaaaacaaaaagaactgtcctttctgcgctcaaatttttcgagtgtgcctttttattcatctactttattttgatgtttccttaatgtgtaatttacttattataagcatgatcttttaaaaatatatttggcttttaaagta

SEQ ID NO: 124176 - DNA, 3283 bp, Homo sapiens
  Payload ID: 4385
  Gene Symbol: CYB5A
  Gene Name: cytochrome b5 type A (microsomal)
  Uniprot ID: P00167
  ENST ID: ENST00000340533
  CDS Start-End: 142-546
gcgccccgcccctgagccggccgcccagcccccagtggggttcccggcgcggggaatgtcccgggtggagctggctgagtcgcgcgctctgctccacccgacggggctgtgtgtgctgggcctggctcgcggcgaaccgagatggcagagcagtcggacgaggccgtgaagtactacaccctagaggagattcagaagcacaaccacagcaagagcacctggctgatcctgcaccacaaggtgtacgatttgaccaaatttctggaagagcatcctggtggggaagaagttttaagggaacaagctggaggtgacgctactgagaactttgaggatgtcgggcactctacagatgccagggaaatgtccaaaacattcatcattggggagctccatccagatgacagaccaaagttaaacaagcctccggaaactcttatcactactattgattctagttccagttggtggaccaactgggtgatccctgccatctctgcagtggccgtcgccttgatgtatcgcctatacatggcagaggactgaacacctcctcagaagtcagcgcaggaagagcctgctttggacacgggagaaaagaagccattgctaactacttcaactgacagaaaccttcacttgaaaacaatgattttaatatatctctttctttttcttccgacattagaaacaaaacaaaaagaactgtcctttctgcgctcaaatttttcgagtgtgcctttttattcatctactttattttgatgtttccttaatgtgtaatttacttattataagcatgatcttttaaaaatatatttggcttttaaagtatgcaccgtgtttgcctgtttggtgtataattgtctttaatgtttagaatctggttatttagaggattccttcaatgtgttactcatccagacccacagaggccatatgactggaggtgcgggaaataggtttgagtgtctcctttcacatcgtcacatctcattgagtaaccatgtattgtatgcttccgatatagtttctttttttcaaggaaattaagaaaggccagaaattatagtttaaggatttctaataattgtcctacttgaaatagatcttaaaaagaaagtagcggctgggcatcgtggctcacacctgtaagcccagcactttgggaggctgaggtgggtggatcacttgaggtcaggagttcaagaccagcctgaccaacatggtgaaaccctgtctctactaaaaatacaaaattagcagggcgtagtggcgcatgcctgtaatcccggctacttgggaggctgaggcaggagaattgcttgaacccaggaggcagaggttgtagtgagctgagatcgcgccgttgaactccagctgggcaacaagagtgaaactctgtctcaaaaaaaaaagaaagtagcctacagggcctataagagagacttcttatcttcactgattgaaaaacatcagcaacttaaaaacacatgaaccatgagagggcatcgcaactgtccattctctcagcttacacgtatcattgcaaaggcactcacagcttcataggttctaaagttttaagaattcctcattcagagagtagaattgtttgtaaactcttctaaggaaaggctggttttctaatttgtaaggagattgtgggacattggaatctgatctttgaagaaatttagcggctagtgtcaagctctgaagagttctggtgtggctctgtctcctcctgggggctctaaggggctgattcagtcatcttacttcccatttattattctctgccttatgtgttattcttttaaatgtggaaacttgaaagctgaatttgttagaacccagtacatgtgtcattggctgtgactgcatttgcactggcatgagctgacaaaccacgaggttcttcagaagtgaccgcgtgcagtggaaaggaattgtgttgttcttacagagtacaacctttataatcaaataggatgcaccgcctttgccttctttagtcactgaaagttgacaagtagtttctatttcaaaataaattacaacacttgttaagggacctatgtaaatatttcaatatttttggttgtgatttttagctataaagcttcacattttagtagtttttaaaacattgctcctaaatcaactatgaagtgaatcgaagtgggtcagtcgtaccttagatgacattaaagggttaacttgtaaatcatttttaagatgttgagtaatagcatctgtatatcgttaagaaacataacagttgaactttgacatttttatcagtgactcagcaatttgctgctgtggctggcaatgtttcttcatgtgttttgggaacaacatgtggagtaaaggagagtttacttcctaattttaacatttacagtttgtgcagccagactctcaaggaaagatatttgacacttttttctctattgctttcccttcagagaggtgagagacttcagaggctgccctttcttttcatctgctgcttgtgaaaggaaaacatcttgggcccccagaatcactaaggaaaactcaagctggaaactgcttagggccaacctgcctcccattctactcagtcaagcctctgctcactgagagagaggcatatctgattgcttcctttggaaaggctaatcagaaactcagaagaatgcaaccctttgtgtctcacctctctgtgacctggaagctccctcctgctttgagtcttcctgcctttgcttcaaggtgtcccgcctttccaaacagaaccaatgtacttcttacatatattgatcaatgtctcatgtctccctaaaatgcataaaaccaagctgtgccctgaccaccttgggtacatgtcattaggacctcctgatgctttgtcacgggcatgtcctcaaccttggcaaagtaaactttcttttttttttttttttgtttttgagacagagtctcactctgtcgcccaggctggagtgcagtggtatgatcttggctcactgcaacctccgactcccaggttcaagtgattctcctgccccagcctcctgagtagctgggactacaggcgtatgccaccatgcctagctaatttttttgtatttttagtagagacgggatttcaccatgttagccaggctggtcttgaactcctgacctcaggcaatccacccgcctcaggctcgcaaagtgctggaattacaggcatgagccactgtgccgggcctattccttgactttcttaataaagttgttttcactttgc

SEQ ID NO: 124177 - DNA, 619 bp, Homo sapiens
  Payload ID: 4385
  Gene Symbol: CYB5A
  Gene Name: cytochrome b5 type A (microsomal)
  Uniprot ID: P00167
  ENST ID: ENST00000397914
  CDS Start-End: 99-473
ccggcgcggggaatgtcccgggtggagctggctgagtcgcgcgctctgctccacccgacggggctgtgtgtgctgggcctggctcgcggcgaaccgagatggcagagcagtcggacgaggccgtgaagtactacaccctagaggagattcagaagcacaaccacagcaagagcacctggctgatcctgcaccacaaggtgtacgatttgaccaaatttctggaagagcatcctggtggggaagaagttttaagggaacaagctggaggtgacgctactgagaactttgaggatgtcgggcactctacagatgccagggaaatgtccaaaacattcatcattggggagctccatccagaaactcttatcactactattgattctagttccagttggtggaccaactgggtgatccctgccatctctgcagtggccgtcgccttgatgtatcgcctatacatggcagaggactgaacacctcctcagaagtcagcgcaggaagagcctgctttggacacgggagaaaagaagccattgctaactacttcaactgacagaaaccttcacttgaaaacaatgattttaatatatctctttctttttcttccgacattagaaac

SEQ ID NO: 124178 - DNA, 776 bp, Homo sapiens
  Payload ID: 4385
  Gene Symbol: CYB5A
  Gene Name: cytochrome b5 type A (microsomal)
  Uniprot ID: P00167
  ENST ID: ENST00000494131
  CDS Start-End: 61-357
gcgcgctctgctccacccgacggggctgtgtgtgctgggcctggctcgcggcgaaccgagatggcagagcagtcggacgaggccgtgaagtactacaccctagaggagattcagaagcacaaccacagcaagagcacctggctgatcctgcaccacaaggtgtacgatttgaccaaatttctggaagagcatcctggtggggaagaagttttaagggaacaagctggaggtgacgctactgagaactttgaggatgtcgggcactctacagatgccagggaaatgtccaaaacattcatcattggggagctccatccagatgacagaccaaagttaaacaagcctccggaaccttaaaggcggtgtttcaaggaaactcttatcactactattgattctagttccagttggtggaccaactgggtgatccctgccatctctgcagtggccgtcgccttgatgtatcgcctatacatggcagaggactgaacacctcctcagaagtcagcgcaggaagagcctgctttggacacgggagaaaagaagccattgctaactacttcaactgacagaaaccttcacttgaaaacaatgattttaatatatctctttctttttcttccgacattagaaacaaaacaaaaagaactgtcctttctgcgctcaaatttttcgagtgtgcctttttattcatctactttattttgatgtttccttaatgtgtaatttacttattataagcatgatcttttaaaaatatatttggcttttaaagt

SEQ ID NO: 124179 - DNA, 4286 bp, Homo sapiens
  Payload ID: 4386
  Gene Symbol: CYB5B
  Gene Name: cytochrome b5 type B (outer mitochondrial membrane)
  ENST ID: ENST00000307892
  CDS Start-End: 90-542
tgggccctggttacggaagccgaggaaggctgagcgcgggctctcaaggaaagtagtcgcggaatctcagttagcggtggagaggcagtatgtccggttcaatggcgactgcggaagctagcggcagcgatgggaaagggcaggaagtcgagacctcagtcacctattaccggttggaggaggtggcaaagcgcaactccttgaaggaactgtggcttgtgatccatgggcgagtctacgatgtcacccgcttcctcaacgagcaccctggaggagaagaggttctgctggaacaagctggtgtagatgcaagtgaaagctttgaagatgtaggacactcttctgatgccagagaaatgctaaagcagtactacattggtgatatccatccgagtgaccttaaacctgaaagtggtagcaaggacccttcaaaaaatgatacatgcaaaagttgctgggcatattggattttacccatcataggcgctgttctcttaggtttcctgtaccgctactacacatcggaaagcaaatcctcctgaggaggccttgctgaagttagaaagtgcatccactttggggcgaaaactagagacttgcttgggggctgcagaagtgccctctcctcgaatcctgccagttgcattcttcccccttggagccaagacgattggccagacatcacctcagatctgagaccagcgtcttccatctctcagagccttactcccaaagtacctgctcactgttccgtgttgaacaattgccggtgtttcctctcttcactggtttccatgagtacccttatatttcacaactttctgttcataagttatagtgacattgctctttggtaaaaatgcctgctttccaatactttgattgcatattagacattcttaacagggcggcagtctagtgttgaaagttttatttttccatttttcttttaagtaaattttttttaaaaaattctgatttagggctaggtgtggtggctcaggcctgtaatcctggcactttgggaggccaaggtgggaagatcgcttgaggccaagagttcaagaccagcctgggcaacatagcgagacccctatctgtattaaaaaaaaatctgatttaattcttttatttatcataaggggtttaattcctgaagtaaaggtttgcacctattaaacttaaaactgccaaatgatttttgttcttttatgtgcgtgataaaaatacaaagaatggtgtggccacctcctccctttcaagctagggcagcaggtagctcttcccagcccctgagcccagccccttcccaagtggtgccggacaaaaaactacatggccctttcgtgtcttgggggtggaaaggtagggatgaattggggtgatagaaccctggtgaattcagagtaatctttctttagaaaactggtgttttctaaagaaacaggataggagtttagagaaggcaccaaagctttcactttggtttggcaccagtttctaaccatctgttttttctaccctagctatcttttattggtaaaatataaatgtataattatgtttgtagagctttaccaaggagtttccctccttttttgtttgttgattagcaaatttttgattctccattttccaaaagtaagagactccagcatggccttctgtttgccccgcagtaaagtaacttccatataaaatggtatttgaaagtgagagttcatgacaacagaccgttttccatttcatctgtattttatctccgtgactccaacttgtgggtttgttctgtttttccatgagaataaaatactggcggtttttttctcagatgtgtgttcattgagaagtaggttactagaattatgttactgtgtcttattggttcaatgatgatttctctggcatattagacttttattttttcccccatggaagcacttgaggaaataaatagtacactggctgttttctgccagcaactgtggtgatttttctccctgtcctttgagaattgctagtctgcttctgagccattgtcatatccagcagggagcagcttggttcaagaaggaccatagaggctgctcagcatctcctccctccctcccagcttgccagggatttgatgagacaggaaactgcccagcaaaccagggactgcccatgtaaactatttaagaaaaagttcaacccaggtcttgtatcctgtgatttagcagttgaatgaatacagaattcatcaaaataatattaaccttgtacttgcacacttggatatatttgggagtaattttaggagatttctggctgacttttattatcagggatatgggtttagtaaagcttttatctttagaaaaatgtttgtatgcattataagatgctacttttaagacaatattgaaaaaaactttggttattatttaacaaaagtggtatgacttgatgcttctctatttaaaggcaaggaaggattggtatatgattgcctgtaataaataaattgcgtgattattggagtacattggggtaaaagtaaagaacagaggagtattgaggagcttgaaagggaacattcaaactaaagccaagcctgaagataacttgaatcagttgtaaaagtgtgttggcaatgtccgaaattgaatgaaaaacatctggcttataagaaatgttaaagaactaccatcttaagtaaaattggtgtttttgttatttttaaggtaaatgccaatgcaaaaggtatgtttttctacttcacattggttttcttttcctgtttacatctgcacttgttttttgctgagagccagaggaaaagataattagactttgtctcttccacccatgaaatcccccagtacccagggcttcttctgaactactgccgatgtgatgtcactttgtatctggaaaatcactttggggtccatttactgttattttgttgcctacaaaaacagccaggtgaaagctaaatcttgtgtgagagtttgcagaggtttttctatacaataaagtagtatagcacactagccaaatccatccaaaaggaccttttttttaggaagtagacttgaattcacaaaacagtcttgacatgggtagctggtgaaaaaccctctggagagcaagtggagccagtccccattggctgacagtgccacctggagctggtctctggggtgttcggttgtttattcctgaggaagactagctgctgctgctgctgctgctgcaaactgtactgtacacatcatggctgctggacacgaaggaggaggtgagagaagtttcatgctaccgaaatagagggtgttggtaccactgcccctggcctgagagccagggtttaaacctgcctcagtagagtctagtttgaaatgacaccaaaattcctcagcccctactcagcaattggttttggtttccaaatgacttctgcatttgtaaagataacagagtggtggggtcaaagtttatcttgtgtttagatctcttcaagactgcttaagcaaaaacaaaaatcccttggaacctatcgtttgagcctgtaaagttgttttagcagttgtcataaatgcatatgttgtgaaatcagaacactgtcgagtttatactcatttagctgcaatgtgggacaatgaaaaatgctttacaggcctggagtatcattacttatggtatctcctgctttaaaatctcaagcgatatctatctggttaaattccattttaggagattgagatgcagaacgttaatgttcattacctcctcctaccccaagagaaatggattcagacatgtcttgtctcaacaagaaattgatttttttttaaactatcttattctgttgccaaatatcacagaagtaatgaggagtttagttacatttggctgttgtgctctgaaagagccaggtttggaatttgtgggggtgatctaggaagaaggttccaaagaagcagaggcatttgtcaagttacctaccctatatccagcatcctcctcatgagcttcagtagctgctctttgcccacgcttgtatcctacgtttgctatttgggcaaaccattacttcagttatttaacttccctttttttttaacttcacctttgactatgaacaagtaacggtaacattccttttgtgtattcaataatgcagttagtttacctttttcagaatattttgaacaaagatctttgtctctttctgctggaatgcgcacacagtgaacgtttgttagaactacacacaataaagacactgttttcctttt

SEQ ID NO: 124180 - DNA, 1658 bp, Homo sapiens
  Payload ID: 4386
  Gene Symbol: CYB5B
  Gene Name: cytochrome b5 type B (outer mitochondrial membrane)
  ENST ID: ENST00000515314
  CDS Start-End: 19-414
ggcagtatgtccggttcaatggcgactgcggaagctagcggcagcgatgggaaagggcaggaagtcgagacctcagtcacctattaccggttggaggaggtggcaaagcgcaactccttgaaggaactgtggcttgtgatccatgggcgagtctacgatgtcacccgcttcctcaacgagcaccctggaggagaagaggttctgctggaacaagctggtgtagatgcaagtgaaagctttgaagatgtaggacactcttctgatgccagagaaatgctaaagcagtactacattggtgatatccatccgttgctgggcatattggattttacccatcataggcgctgttctcttaggtttcctgtaccgctactacacatcggaaagcaaatcctcctgaggaggccttgctgaagttagaaagtgcatccactttggggcgaaaactagagacttgcttgggggctgcagaagtgccctctcctcgaatcctgccagttgcattcttcccccttggagccaagacgattggccagacatcacctcagatctgagaccagcgtcttccatctctcagagccttactcccaaagtacctgctcactgttccgtgttgaacaattgccggtgtttcctctcttcactggtttccatgagtacccttatatttcacaactttctgttcataagttatagtgacattgctctttggtaaaaatgcctgctttccaatactttgattgcatattagacattcttaacagggcggcagtctagtgttgaaagttttatttttccatttttcttttaagtaaattttttttaaaaaattctgatttagggctaggtgtggtggctcaggcctgtaatcctggcactttgggaggccaaggtgggaagatcgcttgaggccaagagttcaagaccagcctgggcaacatagcgagacccctatctgtattaaaaaaaaatctgatttaattcttttatttatcataaggggtttaattcctgaagtaaaggtttgcacctattaaacttaaaactgccaaatgatttttgttcttttatgtgcgtgataaaaatacaaagaatggtgtggccacctcctccctttcaagctagggcagcaggtagctcttcccagcccctgagcccagccccttcccaagtggtgccggacaaaaaactacatggccctttcgtgtcttgggggtggaaaggtagggatgaattggggtgatagaaccctggtgaattcagagtaatctttctttagaaaactggtgttttctaaagaaacaggataggagtttagagaaggcaccaaagctttcactttggtttggcaccagtttctaaccatctgttttttctaccctagctatcttttattggtaaaatataaatgtataattatgtttgtagagctttaccaaggagtttccctccttttttgtttgttgattagcaaatttttgattctccattttccaaaagtaagagactccagcatggccttctgtttgccccgcagtaaagtaacttccatataaaatggtatttgaaagtgagagttcatgacaacagaccgttttccatttcatctgtattttatctccgtgactccaacttgtgggtttgttctgtttttccat

SEQ ID NO: 124181 - DNA, 4358 bp, Homo sapiens
  Payload ID: 4386
  Gene Symbol: CYB5B
  Gene Name: cytochrome b5 type B (outer mitochondrial membrane)
  Uniprot ID: O43169
  ENST ID: ENST00000512062
  CDS Start-End: 172-612
gaaaagaaaacgaaccaggaactattcggaagtgtgattggctgttgctaggaaccgtctcaaggccttatgggccctggttacggaagccgaggaaggctgagcgcgggctctcaaggaaagtagtcgcggaatctcagttagcggtggagaggcagtatgtccggttcaatggcgactgcggaagctagcggcagcgatgggaaagggcaggaagtcgagacctcagtcacctattaccggttggaggaggtggcaaagcgcaactccttgaaggaactgtggcttgtgatccatgggcgagtctacgatgtcacccgcttcctcaacgagcaccctggaggagaagaggttctgctggaacaagctggtgtagatgcaagtgaaagctttgaagatgtaggacactcttctgatgccagagaaatgctaaagcagtactacattggtgatatccatccgagtgaccttaaacctgaaagtggtagcaaggacccttcaaaaaatgatacatgcaaaagttgctgggcatattggattttacccatcataggcgctgttctcttaggtttcctgtaccgctactacacatcggaaagcaaatcctcctgaggaggccttgctgaagttagaaagtgcatccactttggggcgaaaactagagacttgcttgggggctgcagaagtgccctctcctcgaatcctgccagttgcattcttcccccttggagccaagacgattggccagacatcacctcagatctgagaccagcgtcttccatctctcagagccttactcccaaagtacctgctcactgttccgtgttgaacaattgccggtgtttcctctcttcactggtttccatgagtacccttatatttcacaactttctgttcataagttatagtgacattgctctttggtaaaaatgcctgctttccaatactttgattgcatattagacattcttaacagggcggcagtctagtgttgaaagttttatttttccatttttcttttaagtaaattttttttaaaaaattctgatttagggctaggtgtggtggctcaggcctgtaatcctggcactttgggaggccaaggtgggaagatcgcttgaggccaagagttcaagaccagcctgggcaacatagcgagacccctatctgtattaaaaaaaaatctgatttaattcttttatttatcataaggggtttaattcctgaagtaaaggtttgcacctattaaacttaaaactgccaaatgatttttgttcttttatgtgcgtgataaaaatacaaagaatggtgtggccacctcctccctttcaagctagggcagcaggtagctcttcccagcccctgagcccagccccttcccaagtggtgccggacaaaaaactacatggccctttcgtgtcttgggggtggaaaggtagggatgaattggggtgatagaaccctggtgaattcagagtaatctttctttagaaaactggtgttttctaaagaaacaggataggagtttagagaaggcaccaaagctttcactttggtttggcaccagtttctaaccatctgttttttctaccctagctatcttttattggtaaaatataaatgtataattatgtttgtagagctttaccaaggagtttccctccttttttgtttgttgattagcaaatttttgattctccattttccaaaagtaagagactccagcatggccttctgtttgccccgcagtaaagtaacttccatataaaatggtatttgaaagtgagagttcatgacaacagaccgttttccatttcatctgtattttatctccgtgactccaacttgtgggtttgttctgtttttccatgagaataaaatactggcggtttttttctcagatgtgtgttcattgagaagtaggttactagaattatgttactgtgtcttattggttcaatgatgatttctctggcatattagacttttattttttcccccatggaagcacttgaggaaataaatagtacactggctgttttctgccagcaactgtggtgatttttctccctgtcctttgagaattgctagtctgcttctgagccattgtcatatccagcagggagcagcttggttcaagaaggaccatagaggctgctcagcatctcctccctccctcccagcttgccagggatttgatgagacaggaaactgcccagcaaaccagggactgcccatgtaaactatttaagaaaaagttcaacccaggtcttgtatcctgtgatttagcagttgaatgaatacagaattcatcaaaataatattaaccttgtacttgcacacttggatatatttgggagtaattttaggagatttctggctgacttttattatcagggatatgggtttagtaaagcttttatctttagaaaaatgtttgtatgcattataagatgctacttttaagacaatattgaaaaaaactttggttattatttaacaaaagtggtatgacttgatgcttctctatttaaaggcaaggaaggattggtatatgattgcctgtaataaataaattgcgtgattattggagtacattggggtaaaagtaaagaacagaggagtattgaggagcttgaaagggaacattcaaactaaagccaagcctgaagataacttgaatcagttgtaaaagtgtgttggcaatgtccgaaattgaatgaaaaacatctggcttataagaaatgttaaagaactaccatcttaagtaaaattggtgtttttgttatttttaaggtaaatgccaatgcaaaaggtatgtttttctacttcacattggttttcttttcctgtttacatctgcacttgttttttgctgagagccagaggaaaagataattagactttgtctcttccacccatgaaatcccccagtacccagggcttcttctgaactactgccgatgtgatgtcactttgtatctggaaaatcactttggggtccatttactgttattttgttgcctacaaaaacagccaggtgaaagctaaatcttgtgtgagagtttgcagaggtttttctatacaataaagtagtatagcacactagccaaatccatccaaaaggaccttttttttaggaagtagacttgaattcacaaaacagtcttgacatgggtagctggtgaaaaaccctctggagagcaagtggagccagtccccattggctgacagtgccacctggagctggtctctggggtgttcggttgtttattcctgaggaagactagctgctgctgctgctgctgctgcaaactgtactgtacacatcatggctgctggacacgaaggaggaggtgagagaagtttcatgctaccgaaatagagggtgttggtaccactgcccctggcctgagagccagggtttaaacctgcctcagtagagtctagtttgaaatgacaccaaaattcctcagcccctactcagcaattggttttggtttccaaatgacttctgcatttgtaaagataacagagtggtggggtcaaagtttatcttgtgtttagatctcttcaagactgcttaagcaaaaacaaaaatcccttggaacctatcgtttgagcctgtaaagttgttttagcagttgtcataaatgcatatgttgtgaaatcagaacactgtcgagtttatactcatttagctgcaatgtgggacaatgaaaaatgctttacaggcctggagtatcattacttatggtatctcctgctttaaaatctcaagcgatatctatctggttaaattccattttaggagattgagatgcagaacgttaatgttcattacctcctcctaccccaagagaaatggattcagacatgtcttgtctcaacaagaaattgatttttttttaaactatcttattctgttgccaaatatcacagaagtaatgaggagtttagttacatttggctgttgtgctctgaaagagccaggtttggaatttgtgggggtgatctaggaagaaggttccaaagaagcagaggcatttgtcaagttacctaccctatatccagcatcctcctcatgagcttcagtagctgctctttgcccacgcttgtatcctacgtttgctatttgggcaaaccattacttcagttatttaacttccctttttttttaacttcacctttgactatgaacaagtaacggtaacattccttttgtgtattcaataatgcagttagtttacctttttcagaatattttgaacaaagatctttgtctctttctgctggaatgcgcacacagtgaacgtttgttagaactacacacaataaagacactgttttccttttct

SEQ ID NO: 124182 - DNA, 823 bp, Homo sapiens
  Payload ID: 4386
  Gene Symbol: CYB5B
  Gene Name: cytochrome b5 type B (outer mitochondrial membrane)
  ENST ID: ENST00000561792
  CDS Start-End: 17-439
cagtatgtccggttcaatggcgactgcggaagctagcggcagcgatgggaaagggcaggaagtcgagacctcagtcacctattaccggttggaggaggtggcaaagcgcaactccttgaaggaactgtggcttgtgatccatgggcgagtctacgatgtcacccgcttcctcaacgagcaccctggaggagaagaggttctgctggaacaagctggtgtagatgcaagtgaaagctttgaagatgtaggacactcttctgatgccagagaaatgctaaagcagtactacattggtgatatccatccgagtgaccttaaacctgaaagtggtagcaaggacccttcaaaaaatgatacatgcaaaaggcgctgttctcttaggtttcctgtaccgctactacacatcggaaagcaaatcctcctgaggaggccttgctgaagttagaaagtgcatccactttggggcgaaaactagagacttgcttgggggctgcagaagtgccctctcctcgaatcctgccagttgcattcttcccccttggagccaagacgattggccagacatcacctcagatctgagaccagcgtcttccatctctcagagccttactcccaaagtacctgctcactgttccgtgttgaacaattgccggtgtttcctctcttcactggtttccatgagtacccttatatttcacaactttctgttcataagttatagtgacattgctctttggtaaaaatgcctgctttccaatactttgattgcatattagacattcttaacagggcggcagtctagtgttgaaagttttatttttcc

SEQ ID NO: 124183 - DNA, 577 bp, Homo sapiens
  Payload ID: 4386
  Gene Symbol: CYB5B
  Gene Name: cytochrome b5 type B (outer mitochondrial membrane)
  ENST ID: ENST00000568237
  CDS Start-End: 1-195
aagcgcaactccttgaaggaactgtggcttgtgatccatgggcgagtctacgatgtcacccgcttcctcaacgaggacccttcaaaaaatgatacatgcaaaagttgctgggcatattggattttacccatcataggcgctgttctcttaggtttcctgtaccgctactacacatcggaaagcaaatcctcctgaggaggccttgctgaagttagaaagtgcatccactttggggcgaaaactagagacttgcttgggggctgcagaagtgccctctcctcgaatcctgccagttgcattcttcccccttggagccaagacgattggccagacatcacctcagatctgagaccagcgtcttccatctctcagagccttactcccaaagtacctgctcactgttccgtgttgaacaattgccggtgtttcctctcttcactggtttccatgagtacccttatatttcacaactttctgttcataagttatagtgacattgctctttggtaaaaatgcctgctttccaatactttgattgcatattagacattcttaacagggcggcagtctagtgttg

SEQ ID NO: 124184 - DNA, 3001 bp, Homo sapiens
  Payload ID: 4387
  Gene Symbol: CYB561
  Gene Name: cytochrome b561
  Uniprot ID: P49447
  ENST ID: ENST00000360793
  CDS Start-End: 148-903
acttccggtcccggagacaccgcccagcccgccgcccggttgccatggcgacgccgtcgcgccacggcccgcagaaccggccaagcgacccgggcgcggcgcggggaggctgaagggacgctcgggtaggcaagcgtttgcctcagcatggagggcggggccgcggcagccacccccacagcactgccttactacgtggccttctcccagctgctgggcctgaccttggtggccatgaccggcgcgtggctcgggctgtaccgaggcggcattgcctgggagagcgacctgcagttcaacgcgcaccccctctgcatggtcataggcctgatcttcctgcagggaaatgccctgctggtttaccgtgtcttcaggaacgaagctaaacgcaccaccaaggtcctgcacgggctgctgcacatctttgcgctcgtcatcgccctggttggcttggtggcggtgttcgactaccacaggaagaagggctacgctgacctgtacagcctacacagctggtgcgggatccttgtctttgtcctgtactttgtgcagtggctggtgggcttcagcttcttcctgttccccggagcttcattctccctgcggagccgctaccgcccacagcacatcttctttggtgctaccatcttcctcctttccgtgggcaccgccctgctgggcctgaaggaggcactgctgttcaacctcgggggcaagtatagcgcatttgagcccgagggtgtcctggccaacgtgctgggcctgctgctggcctgcttcggtggggcggtgctctacatcttgacccgggccgactggaagcggccttcccaggcggaagagcaggccctctccatggacttcaagacgctgacggagggagatagccccggctcccagtgatgcgcccggccggccctgggggttcgcggggtgtcttcttgcctgcccctgctgaggcgtcttcaggactgcaggctccggagagtggctctggcagcaggcgggcgcgtgggtgcagctgcatctgtttgagtgctgctttctggggtcaggtctccgcctcctctgcttctcctttctccgctgctatagaccagttcattgtgtgtggctcccgtgtctctgttgcccccttcagtgcagaaggctttgggtaggacttcgggtgttcggtcctggtcgcagagcacagatctttaaagaagcgagagaggaggccccaccctcctggcagcagatgcctggggcaaggccaggggaaactgggggggcctcagggacaggcctggaaaggccacgatggctgctgaattcaaacaaggagtccctccagcctgaataacacgtggcacaaatgggcccggcctttggcagaggagcaagtgatatgatgtgtaaagtatgttggtggtgaaagcaaggttccccaggagaggggagggactggcccctgggaagctctgagatgaggctgtggcccagctgtagtcctgaccttcctcttctttaaccctttagccctaggatggctttggtgggagaggggatagaagcccatgacttcagacagactttctcttggcagatgcaggcgggcctcctcccaggctgctccagacatgggggttggggatggggggcaccttgcagccccttcctgctggggctccctccttgtagcaccccccttgcggctcagctctggtttcctctcccaggctcacccaggctctgctcaggctgggaggcagagggcacaaaccttataattttttaaatgaaaaaccgctgctgctggctgtggctagagccccctggggctgctggagctgctgcctctgttctggaggacgagccttctccttatctgctgcccatctttccaggaagtcaggatggagtcagaacaactacagtcatcccccgtggtgtctgcacatcactccagccccataaagagtgtcatgttagctgagtcaccatttggcttcggcctggaaatagtgtgattagaacactgatcgtgtgcgaggccaggagatcaagaccatcctgactaacaaacacagtgaaaccccgtctctactaaaaatacaaaaaaattagccaggcgtggtggtgggcgcctgtagtcccagctacttgggaggctgaggcaggagaatggtgtgaacccgggagatggcgcttgcagtgagctgagattgcactccagcctgggcgacaggctcaaaaaagaaaaaaaaaagaacaccgatcatgtgcttcttggatctggtgactgttctctccctgttttcctttctttttgggtgtttgaggagcatggcttagcttgagacacacacagacactgtgtacttcagtgaagggcttaatatacagtttccaaacctgacgactcttcttcttgtaatggctgcccttttcctacctgaggccgtcttagagaaaggggccagtctcctctaatgctcagatttcccatagttggcttttgctgtgtctcctgcctcaggcagtgtcatttctgggagcaggtggttgtagtccaggcccctccccagcagggtctgcccaggctccttcgagcccctttccccgcctcctctcagcctgtccggatgacagtgttcgcctcctgtttagactgtacactcttcaggggtaggggtgccgtcagttcttcaatcagctggcacacacttgtatagtgaaatgtttacatgtgggaaaactccgccttagacaaactaccaaagtacaatcgtgtctctctctagccggaatgctacagagagaaatggaaccttagatttgcaacaaaagtctgtaaactggtctgtttgccaaagtgaacactggatgactaaggagctgaagaaggcccccagaagcggatttgtggtgggttattttattttgcctgtggccaatcttctgtgaaatacaatgtgctgttggtgcaacagatgattcaataaatgtctacagcaga

SEQ ID NO: 124185 - DNA, 3007 bp, Homo sapiens
  Payload ID: 4387
  Gene Symbol: CYB561
  Gene Name: cytochrome b561
  Uniprot ID: P49447
  ENST ID: ENST00000392975
  CDS Start-End: 154-909
gacagacaacaagtgaccaggggggacagcacttctttcagtacattttcctgttagactcggggtattagagacccaaagatacccaaggaggagtgagagcgtccctgccttcgaggagcagacagggcaccgcgaggcgtttgcctcagcatggagggcggggccgcggcagccacccccacagcactgccttactacgtggccttctcccagctgctgggcctgaccttggtggccatgaccggcgcgtggctcgggctgtaccgaggcggcattgcctgggagagcgacctgcagttcaacgcgcaccccctctgcatggtcataggcctgatcttcctgcagggaaatgccctgctggtttaccgtgtcttcaggaacgaagctaaacgcaccaccaaggtcctgcacgggctgctgcacatctttgcgctcgtcatcgccctggttggcttggtggcggtgttcgactaccacaggaagaagggctacgctgacctgtacagcctacacagctggtgcgggatccttgtctttgtcctgtactttgtgcagtggctggtgggcttcagcttcttcctgttccccggagcttcattctccctgcggagccgctaccgcccacagcacatcttctttggtgctaccatcttcctcctttccgtgggcaccgccctgctgggcctgaaggaggcactgctgttcaacctcgggggcaagtatagcgcatttgagcccgagggtgtcctggccaacgtgctgggcctgctgctggcctgcttcggtggggcggtgctctacatcttgacccgggccgactggaagcggccttcccaggcggaagagcaggccctctccatggacttcaagacgctgacggagggagatagccccggctcccagtgatgcgcccggccggccctgggggttcgcggggtgtcttcttgcctgcccctgctgaggcgtcttcaggactgcaggctccggagagtggctctggcagcaggcgggcgcgtgggtgcagctgcatctgtttgagtgctgctttctggggtcaggtctccgcctcctctgcttctcctttctccgctgctatagaccagttcattgtgtgtggctcccgtgtctctgttgcccccttcagtgcagaaggctttgggtaggacttcgggtgttcggtcctggtcgcagagcacagatctttaaagaagcgagagaggaggccccaccctcctggcagcagatgcctggggcaaggccaggggaaactgggggggcctcagggacaggcctggaaaggccacgatggctgctgaattcaaacaaggagtccctccagcctgaataacacgtggcacaaatgggcccggcctttggcagaggagcaagtgatatgatgtgtaaagtatgttggtggtgaaagcaaggttccccaggagaggggagggactggcccctgggaagctctgagatgaggctgtggcccagctgtagtcctgaccttcctcttctttaaccctttagccctaggatggctttggtgggagaggggatagaagcccatgacttcagacagactttctcttggcagatgcaggcgggcctcctcccaggctgctccagacatgggggttggggatggggggcaccttgcagccccttcctgctggggctccctccttgtagcaccccccttgcggctcagctctggtttcctctcccaggctcacccaggctctgctcaggctgggaggcagagggcacaaaccttataattttttaaatgaaaaaccgctgctgctggctgtggctagagccccctggggctgctggagctgctgcctctgttctggaggacgagccttctccttatctgctgcccatctttccaggaagtcaggatggagtcagaacaactacagtcatcccccgtggtgtctgcacatcactccagccccataaagagtgtcatgttagctgagtcaccatttggcttcggcctggaaatagtgtgattagaacactgatcgtgtgcgaggccaggagatcaagaccatcctgactaacaaacacagtgaaaccccgtctctactaaaaatacaaaaaaattagccaggcgtggtggtgggcgcctgtagtcccagctacttgggaggctgaggcaggagaatggtgtgaacccgggagatggcgcttgcagtgagctgagattgcactccagcctgggcgacaggctcaaaaaagaaaaaaaaaagaacaccgatcatgtgcttcttggatctggtgactgttctctccctgttttcctttctttttgggtgtttgaggagcatggcttagcttgagacacacacagacactgtgtacttcagtgaagggcttaatatacagtttccaaacctgacgactcttcttcttgtaatggctgcccttttcctacctgaggccgtcttagagaaaggggccagtctcctctaatgctcagatttcccatagttggcttttgctgtgtctcctgcctcaggcagtgtcatttctgggagcaggtggttgtagtccaggcccctccccagcagggtctgcccaggctccttcgagcccctttccccgcctcctctcagcctgtccggatgacagtgttcgcctcctgtttagactgtacactcttcaggggtaggggtgccgtcagttcttcaatcagctggcacacacttgtatagtgaaatgtttacatgtgggaaaactccgccttagacaaactaccaaagtacaatcgtgtctctctctagccggaatgctacagagagaaatggaaccttagatttgcaacaaaagtctgtaaactggtctgtttgccaaagtgaacactggatgactaaggagctgaagaaggcccccagaagcggatttgtggtgggttattttattttgcctgtggccaatcttctgtgaaatacaatgtgctgttggtgcaacagatgattcaataaatgtctacagcaga

SEQ ID NO: 124186 - DNA, 3151 bp, Homo sapiens
  Payload ID: 4387
  Gene Symbol: CYB561
  Gene Name: cytochrome b561
  Uniprot ID: P49447
  ENST ID: ENST00000392976
  CDS Start-End: 301-1056
aggtgagccctgactgcgcagggagggacagcgcggggctcccgagtagcagccggcctcgcacctgccccttgcggccgcgcactggactgcggcgccgacccgcaccctgggcccgagggctgcagggctcgcccgccctctcggagccgagcctctcccggtccaggcggcccctgccctggcctgcccgggtgccgggtctctgctgaagttagaaccgagacccccgcttgctggtgaccccgagtttggatctttgctcctgcgccgcgttctagagcaagcgtttgcctcagcatggagggcggggccgcggcagccacccccacagcactgccttactacgtggccttctcccagctgctgggcctgaccttggtggccatgaccggcgcgtggctcgggctgtaccgaggcggcattgcctgggagagcgacctgcagttcaacgcgcaccccctctgcatggtcataggcctgatcttcctgcagggaaatgccctgctggtttaccgtgtcttcaggaacgaagctaaacgcaccaccaaggtcctgcacgggctgctgcacatctttgcgctcgtcatcgccctggttggcttggtggcggtgttcgactaccacaggaagaagggctacgctgacctgtacagcctacacagctggtgcgggatccttgtctttgtcctgtactttgtgcagtggctggtgggcttcagcttcttcctgttccccggagcttcattctccctgcggagccgctaccgcccacagcacatcttctttggtgctaccatcttcctcctttccgtgggcaccgccctgctgggcctgaaggaggcactgctgttcaacctcgggggcaagtatagcgcatttgagcccgagggtgtcctggccaacgtgctgggcctgctgctggcctgcttcggtggggcggtgctctacatcttgacccgggccgactggaagcggccttcccaggcggaagagcaggccctctccatggacttcaagacgctgacggagggagatagccccggctcccagtgatgcgcccggccggccctgggggttcgcggggtgtcttcttgcctgcccctgctgaggcgtcttcaggactgcaggctccggagagtggctctggcagcaggcgggcgcgtgggtgcagctgcatctgtttgagtgctgctttctggggtcaggtctccgcctcctctgcttctcctttctccgctgctatagaccagttcattgtgtgtggctcccgtgtctctgttgcccccttcagtgcagaaggctttgggtaggacttcgggtgttcggtcctggtcgcagagcacagatctttaaagaagcgagagaggaggccccaccctcctggcagcagatgcctggggcaaggccaggggaaactgggggggcctcagggacaggcctggaaaggccacgatggctgctgaattcaaacaaggagtccctccagcctgaataacacgtggcacaaatgggcccggcctttggcagaggagcaagtgatatgatgtgtaaagtatgttggtggtgaaagcaaggttccccaggagaggggagggactggcccctgggaagctctgagatgaggctgtggcccagctgtagtcctgaccttcctcttctttaaccctttagccctaggatggctttggtgggagaggggatagaagcccatgacttcagacagactttctcttggcagatgcaggcgggcctcctcccaggctgctccagacatgggggttggggatggggggcaccttgcagccccttcctgctggggctccctccttgtagcaccccccttgcggctcagctctggtttcctctcccaggctcacccaggctctgctcaggctgggaggcagagggcacaaaccttataattttttaaatgaaaaaccgctgctgctggctgtggctagagccccctggggctgctggagctgctgcctctgttctggaggacgagccttctccttatctgctgcccatctttccaggaagtcaggatggagtcagaacaactacagtcatcccccgtggtgtctgcacatcactccagccccataaagagtgtcatgttagctgagtcaccatttggcttcggcctggaaatagtgtgattagaacactgatcgtgtgcgaggccaggagatcaagaccatcctgactaacaaacacagtgaaaccccgtctctactaaaaatacaaaaaaattagccaggcgtggtggtgggcgcctgtagtcccagctacttgggaggctgaggcaggagaatggtgtgaacccgggagatggcgcttgcagtgagctgagattgcactccagcctgggcgacaggctcaaaaaagaaaaaaaaaagaacaccgatcatgtgcttcttggatctggtgactgttctctccctgttttcctttctttttgggtgtttgaggagcatggcttagcttgagacacacacagacactgtgtacttcagtgaagggcttaatatacagtttccaaacctgacgactcttcttcttgtaatggctgcccttttcctacctgaggccgtcttagagaaaggggccagtctcctctaatgctcagatttcccatagttggcttttgctgtgtctcctgcctcaggcagtgtcatttctgggagcaggtggttgtagtccaggcccctccccagcagggtctgcccaggctccttcgagcccctttccccgcctcctctcagcctgtccggatgacagtgttcgcctcctgtttagactgtacactcttcaggggtaggggtgccgtcagttcttcaatcagctggcacacacttgtatagtgaaatgtttacatgtgggaaaactccgccttagacaaactaccaaagtacaatcgtgtctctctctagccggaatgctacagagagaaatggaaccttagatttgcaacaaaagtctgtaaactggtctgtttgccaaagtgaacactggatgactaaggagctgaagaaggcccccagaagcggatttgtggtgggttattttattttgcctgtggccaatcttctgtgaaatacaatgtgctgttggtgcaacagatgattcaataaatgtctacagc

SEQ ID NO: 124187 - DNA, 1496 bp, Homo sapiens
  Payload ID: 4387
  Gene Symbol: CYB561
  Gene Name: cytochrome b561
  Uniprot ID: P49447
  ENST ID: ENST00000448884
  CDS Start-End: 61-477
acccgggcgcggcgcggggaggctgaagggacgctcgggtaggcaagcgtttgcctcagcatggagggcggggccgcggcagccacccccacagcactgccttactacgtggccttctcccagctgctgggcctgaccttggtggccatgaccggcgcgtggctcgggctgtaccgaggcggcattgcctgggagagcgacctgcagttcaacgcgcaccccctctgcatggtcataggcctgatcttcctgcagggaaatgccctgctggtttaccgtgtcttcaggaacgaagctaaacgcaccaccaaggtcctgcacgggctgctgcacatctttgcgctcgtcatcgccctggttggcttggtggcggtgttcgactaccacaggaagaagggctacgctgacctgtacagcctacacagctggtgcgggatccttgtctttgtcctgtactttgtgcaggggcaagtatagcgcatttgagcccgagggtgtcctggccaacgtgctgggcctgctgctggcctgcttcggtggggcggtgctctacatcttgacccgggccgactggaagcggccttcccaggcggaagagcaggccctctccatggacttcaagacgctgacggagggagatagccccggctcccagtgatgcgcccggccggccctgggggttcgcggggtgtcttcttgcctgcccctgctgaggcgtcttcaggactgcaggctccggagagtggctctggcagcaggcgggcgcgtgggtgcagctgcatctgtttgagtgctgctttctggggtcaggtctccgcctcctctgcttctcctttctccgctgctatagaccagttcattgtgtgtggctcccgtgtctctgttgcccccttcagtgcagaaggctttgggtaggacttcgggtgttcggtcctggtcgcagagcacagatctttaaagaagcgagagaggaggccccaccctcctggcagcagatgcctggggcaaggccaggggaaactgggggggcctcagggacaggcctggaaaggccacgatggctgctgaattcaaacaaggagtccctccagcctgaataacacgtggcacaaatgggcccggcctttggcagaggagcaagtgatatgatgtgtaaagtatgttggtggtgaaagcaaggttccccaggagaggggagggactggcccctgggaagctctgagatgaggctgtggcccagctgtagtcctgaccttcctcttctttaaccctttagccctaggatggctttggtgggagaggggatagaagcccatgacttcagacagactttctcttggcagatgcaggcgggcctcctcccaggctgctccagacatgggggttggggatggggggcaccttgcagccccttcctgctggggctccctccttgtagcaccccccttgcggctcagctctggtttcctctcccaggctcacccaggctctgctca

SEQ ID NO: 124188 - DNA, 1302 bp, Homo sapiens
  Payload ID: 4387
  Gene Symbol: CYB561
  Gene Name: cytochrome b561
  ENST ID: ENST00000542042
  CDS Start-End: 84-1040
gaccagccccttccttcccgtcaaggagcgcgcttgcctgtgtaactcacctgtaaagcccacccagggaaggccagggcctcatgaaacagaaaacaaagccgggcactgggcccttgagctcactagaatttggggtatctttccttgcaccctcaccgcatatggaactcctggcgtcgtgtcccaggtcacgcctgtccccgtggggaggctgggcccctccccccagccactcccgagacttgagacctctgcctcaggacgatggcgtttgcctcagcatggagggcggggccgcggcagccacccccacagcactgccttactacgtggccttctcccagctgctgggcctgaccttggtggccatgaccggcgcgtggctcgggctgtaccgaggcggcattgcctgggagagcgacctgcagttcaacgcgcaccccctctgcatggtcataggcctgatcttcctgcagggaaatgccctgctggtttaccgtgtcttcaggaacgaagctaaacgcaccaccaaggtcctgcacgggctgctgcacatctttgcgctcgtcatcgccctggttggcttggtggcggtgttcgactaccacaggaagaagggctacgctgacctgtacagcctacacagctggtgcgggatccttgtctttgtcctgtactttgtgcagtggctggtgggcttcagcttcttcctgttccccggagcttcattctccctgcggagccgctaccgcccacagcacatcttctttggtgctaccatcttcctcctttccgtgggcaccgccctgctgggcctgaaggaggcactgctgttcaacctcgggggcaagtatagcgcatttgagcccgagggtgtcctggccaacgtgctgggcctgctgctggcctgcttcggtggggcggtgctctacatcttgacccgggccgactggaagcggccttcccaggcggaagagcaggccctctccatggacttcaagacgctgacggagggagatagccccggctcccagtgatgcgcccggccggccctgggggttcgcggggtgtcttcttgcctgcccctgctgaggcgtcttcaggactgcaggctccggagagtggctctggcagcaggcgggcgcgtgggtgcagctgcatctgtttgagtgctgctttctggggtcaggtctccgcctcctctgcttctcctttctccgctgctatagaccagttcattgtgtgtggctcccgtgtctctgttgcccccttcagtgcagaaggctttgggtaggactt

SEQ ID NO: 124189 - DNA, 2344 bp, Homo sapiens
  Payload ID: 4387
  Gene Symbol: CYB561
  Gene Name: cytochrome b561
  Uniprot ID: P49447
  ENST ID: ENST00000581573
  CDS Start-End: 403-1158
cgcatctcaggcgcagtctctaggggctgtgcgcatccgtgggggggacatgcgcatctcaggggggctgctcgcatctgggggtgctgtgtgcatctcgggggggctgtgcccatctagcggggtggctgtgcgcatctggagggggctgtgcgcaacccggggggggtgttgcgcgcatctagcaggggcggctgtgcgcatttcggggggggctgtgcatatctggggggaccgtgcttatctccgggggcggctgtgcgcatcttgaggggtgtgtacatctcggggggcctgtgcgcatcttggggggctgtgtgcatccgcgggggctgtgcgcatctcggggtgctgtgcgctgctcctctgagctctgctctttcttgcagcgtttgcctcagcatggagggcggggccgcggcagccacccccacagcactgccttactacgtggccttctcccagctgctgggcctgaccttggtggccatgaccggcgcgtggctcgggctgtaccgaggcggcattgcctgggagagcgacctgcagttcaacgcgcaccccctctgcatggtcataggcctgatcttcctgcagggaaatgccctgctggtttaccgtgtcttcaggaacgaagctaaacgcaccaccaaggtcctgcacgggctgctgcacatctttgcgctcgtcatcgccctggttggcttggtggcggtgttcgactaccacaggaagaagggctacgctgacctgtacagcctacacagctggtgcgggatccttgtctttgtcctgtactttgtgcagtggctggtgggcttcagcttcttcctgttccccggagcttcattctccctgcggagccgctaccgcccacagcacatcttctttggtgctaccatcttcctcctttccgtgggcaccgccctgctgggcctgaaggaggcactgctgttcaacctcgggggcaagtatagcgcatttgagcccgagggtgtcctggccaacgtgctgggcctgctgctggcctgcttcggtggggcggtgctctacatcttgacccgggccgactggaagcggccttcccaggcggaagagcaggccctctccatggacttcaagacgctgacggagggagatagccccggctcccagtgatgcgcccggccggccctgggggttcgcggggtgtcttcttgcctgcccctgctgaggcgtcttcaggactgcaggctccggagagtggctctggcagcaggcgggcgcgtgggtgcagctgcatctgtttgagtgctgctttctggggtcaggtctccgcctcctctgcttctcctttctccgctgctatagaccagttcattgtgtgtggctcccgtgtctctgttgcccccttcagtgcagaaggctttgggtaggacttcgggtgttcggtcctggtcgcagagcacagatctttaaagaagcgagagaggaggccccaccctcctggcagcagatgcctggggcaaggccaggggaaactgggggggcctcagggacaggcctggaaaggccacgatggctgctgaattcaaacaaggagtccctccagcctgaataacacgtggcacaaatgggcccggcctttggcagaggagcaagtgatatgatgtgtaaagtatgttggtggtgaaagcaaggttccccaggagaggggagggactggcccctgggaagctctgagatgaggctgtggcccagctgtagtcctgaccttcctcttctttaaccctttagccctaggatggctttggtgggagaggggatagaagcccatgacttcagacagactttctcttggcagatgcaggcgggcctcctcccaggctgctccagacatgggggttggggatggggggcaccttgcagccccttcctgctggggctccctccttgtagcaccccccttgcggctcagctctggtttcctctcccaggctcacccaggctctgctcaggctgggaggcagagggcacaaaccttataattttttaaatgaaaaaccgctgctgctggctgtggctagagccccctggggctgctggagctgctgcctctgttctggaggacgagccttctccttatctgctgcccatctttccaggaagtcaggatggagtcagaacaactacagtcatcccccgtggtgtctgcacatcactccagccccataaagagtgtcatgttagctgagtcaccatttggcttcggcctggaaatagtgtgattagaacactgatcgtgtgcgaggccaggagatcaagaccatcctgactaacaaacacagtgaaaccccgtctctac

SEQ ID NO: 124190 - DNA, 848 bp, Homo sapiens
  Payload ID: 4387
  Gene Symbol: CYB561
  Gene Name: cytochrome b561
  Uniprot ID: P49447
  ENST ID: ENST00000584291
  CDS Start-End: 94-848
agcgatgcttggctcagtgaagatctgcgggtcatgctgtccctaatgcgctgattgcattaagtggattctggctgcagcgtttgcctcagcatggagggcggggccgcggcagccacccccacagcactgccttactacgtggccttctcccagctgctgggcctgaccttggtggccatgaccggcgcgtggctcgggctgtaccgaggcggcattgcctgggagagcgacctgcagttcaacgcgcaccccctctgcatggtcataggcctgatcttcctgcagggaaatgccctgctggtttaccgtgtcttcaggaacgaagctaaacgcaccaccaaggtcctgcacgggctgctgcacatctttgcgctcgtcatcgccctggttggcttggtggcggtgttcgactaccacaggaagaagggctacgctgacctgtacagcctacacagctggtgcgggatccttgtctttgtcctgtactttgtgcagtggctggtgggcttcagcttcttcctgttccccggagcttcattctccctgcggagccgctaccgcccacagcacatcttctttggtgctaccatcttcctcctttccgtgggcaccgccctgctgggcctgaaggaggcactgctgttcaacctcgggggcaagtatagcgcatttgagcccgagggtgtcctggccaacgtgctgggcctgctgctggcctgcttcggtggggcggtgctctacatcttgacccgggccgactggaagcggccttcccaggcggaagagcaggccctctccatggacttcaagacgctgacggagggagatagccccggctcccagtg

SEQ ID NO: 124191 - DNA, 1127 bp, Homo sapiens
  Payload ID: 4387
  Gene Symbol: CYB561
  Gene Name: cytochrome b561
  ENST ID: ENST00000580691
  CDS Start-End: 1-917
ctttccttgcaccctcaccgcatatggaactcctggcgtcgtgtcccaggtcacgcctgtccccgtggggaggctgggcccctccccccagccactcccgagacttgagacctctgcctcaggacgatgggtgggaaggggcttgcggcgtttgcctcagcatggagggcggggccgcggcagccacccccacagcactgccttactacgtggccttctcccagctgctgggcctgaccttggtggccatgaccggcgcgtggctcgggctgtaccgaggcggcattgcctgggagagcgacctgcagttcaacgcgcaccccctctgcatggtcataggcctgatcttcctgcagggaaatgccctgctggtttaccgtgtcttcaggaacgaagctaaacgcaccaccaaggtcctgcacgggctgctgcacatctttgcgctcgtcatcgccctggttggcttggtggcggtgttcgactaccacaggaagaagggctacgctgacctgtacagcctacacagctggtgcgggatccttgtctttgtcctgtactttgtgcagtggctggtgggcttcagcttcttcctgttccccggagcttcattctccctgcggagccgctaccgcccacagcacatcttctttggtgctaccatcttcctcctttccgtgggcaccgccctgctgggcctgaaggaggcactgctgttcaacctcgggggcaagtatagcgcatttgagcccgagggtgtcctggccaacgtgctgggcctgctgctggcctgcttcggtggggcggtgctctacatcttgacccgggccgactggaagcggccttcccaggcggaagagcaggccctctccatggacttcaagacgctgacggagggagatagccccggctcccagtgatgcgcccggccggccctgggggttcgcggggtgtcttcttgcctgcccctgctgaggcgtcttcaggactgcaggctccggagagtggctctggcagcaggcgggcgcgtgggtgcagctgcatctgtttgagtgctgctttctggggtcaggtctccgcctcctctgcttctcctttctccgctgctatagaccagttcattgtgtgtg

SEQ ID NO: 124192 - DNA, 3200 bp, Homo sapiens
  Payload ID: 4387
  Gene Symbol: CYB561
  Gene Name: cytochrome b561
  ENST ID: ENST00000584031
  CDS Start-End: 301-885
aggtgagccctgactgcgcagggagggacagcgcggggctcccgagtagcagccggcctcgcacctgccccttgcggccgcgcactggactgcggcgccgacccgcaccctgggcccgagggctgcagggctcgcccgccctctcggagccgagcctctcccggtccaggcggcccctgccctggcctgcccgggtgccgggtctctgctgaagttagaaccgagacccccgcttgctggtgaccccgagtttggatctttgctcctgcgccgcgttctagagcaagcgtttgcctcagcatggagggcggggccgcggcagccacccccacagcactgccttactacgtggccttctcccagctgctgggcctgaccttggtggccatgaccggcgcgtggctcgggctgtaccgaggcggcattgcctgggagagcgacctgcagttcaacgcgcaccccctctgcatggtcataggcctgatcttcctgcagggaaatgccctgctggtttaccgtgtcttcaggaacgaagctaaacgcaccaccaaggtcctgcacgggctgctgcacatctttgcgctcgtcatcgccctggttggtgagttcccgggcgcggccttccccgccacctgcctgcctcttcaggcttggtggcggtgttcgactaccacaggaagaagggctacgctgacctgtacagcctacacagctggtgcgggatccttgtctttgtcctgtactttgtgcagtggctggtgggcttcagcttcttcctgttccccggagcttcattctccctgcggagccgctaccgcccacagcacatcttctttggtgctaccatcttcctcctttccgtgggcaccgccctgctgggcctgaaggaggcactgctgttcaacctcgggggcaagtatagcgcatttgagcccgagggtgtcctggccaacgtgctgggcctgctgctggcctgcttcggtggggcggtgctctacatcttgacccgggccgactggaagcggccttcccaggcggaagagcaggccctctccatggacttcaagacgctgacggagggagatagccccggctcccagtgatgcgcccggccggccctgggggttcgcggggtgtcttcttgcctgcccctgctgaggcgtcttcaggactgcaggctccggagagtggctctggcagcaggcgggcgcgtgggtgcagctgcatctgtttgagtgctgctttctggggtcaggtctccgcctcctctgcttctcctttctccgctgctatagaccagttcattgtgtgtggctcccgtgtctctgttgcccccttcagtgcagaaggctttgggtaggacttcgggtgttcggtcctggtcgcagagcacagatctttaaagaagcgagagaggaggccccaccctcctggcagcagatgcctggggcaaggccaggggaaactgggggggcctcagggacaggcctggaaaggccacgatggctgctgaattcaaacaaggagtccctccagcctgaataacacgtggcacaaatgggcccggcctttggcagaggagcaagtgatatgatgtgtaaagtatgttggtggtgaaagcaaggttccccaggagaggggagggactggcccctgggaagctctgagatgaggctgtggcccagctgtagtcctgaccttcctcttctttaaccctttagccctaggatggctttggtgggagaggggatagaagcccatgacttcagacagactttctcttggcagatgcaggcgggcctcctcccaggctgctccagacatgggggttggggatggggggcaccttgcagccccttcctgctggggctccctccttgtagcaccccccttgcggctcagctctggtttcctctcccaggctcacccaggctctgctcaggctgggaggcagagggcacaaaccttataattttttaaatgaaaaaccgctgctgctggctgtggctagagccccctggggctgctggagctgctgcctctgttctggaggacgagccttctccttatctgctgcccatctttccaggaagtcaggatggagtcagaacaactacagtcatcccccgtggtgtctgcacatcactccagccccataaagagtgtcatgttagctgagtcaccatttggcttcggcctggaaatagtgtgattagaacactgatcgtgtgcgaggccaggagatcaagaccatcctgactaacaaacacagtgaaaccccgtctctactaaaaatacaaaaaaattagccaggcgtggtggtgggcgcctgtagtcccagctacttgggaggctgaggcaggagaatggtgtgaacccgggagatggcgcttgcagtgagctgagattgcactccagcctgggcgacaggctcaaaaaagaaaaaaaaaagaacaccgatcatgtgcttcttggatctggtgactgttctctccctgttttcctttctttttgggtgtttgaggagcatggcttagcttgagacacacacagacactgtgtacttcagtgaagggcttaatatacagtttccaaacctgacgactcttcttcttgtaatggctgcccttttcctacctgaggccgtcttagagaaaggggccagtctcctctaatgctcagatttcccatagttggcttttgctgtgtctcctgcctcaggcagtgtcatttctgggagcaggtggttgtagtccaggcccctccccagcagggtctgcccaggctccttcgagcccctttccccgcctcctctcagcctgtccggatgacagtgttcgcctcctgtttagactgtacactcttcaggggtaggggtgccgtcagttcttcaatcagctggcacacacttgtatagtgaaatgtttacatgtgggaaaactccgccttagacaaactaccaaagtacaatcgtgtctctctctagccggaatgctacagagagaaatggaaccttagatttgcaacaaaagtctgtaaactggtctgtttgccaaagtgaacactggatgactaaggagctgaagaaggcccccagaagcggatttgtggtgggttattttattttgcctgtggccaatcttctgtgaaatacaatgtgctgttggtgcaacagatgattcaataaatgtctacagcag

SEQ ID NO: 124193 - DNA, 481 bp, Homo sapiens
  Payload ID: 4387
  Gene Symbol: CYB561
  Gene Name: cytochrome b561
  ENST ID: ENST00000580592
  CDS Start-End: 198-481
agcacttctttcagtacattttcctgttagactcggggtattagagacccaaagatacccaaggaggagtgagagcgtccctgccttcgaggagcagacagggcaccgcgagggtgctgggattataggtgtgagccatcgcacccggcccacacacacaccccccctttaatggtggagttgccaacagttgtccgatgtggcagagagaactggggagcagagaaggagcccatcactgggagggactgaaaaccagctcctgggcactgcagggcagagcgtgtgccggcgtttgcctcagcatggagggcggggccgcggcagccacccccacagcactgccttactacgtggccttctcccagctgctgggcctgaccttggtggccatgaccggcgcgtggctcgggctgtaccgaggcggcattgcctgggagagcgacctgcagttcaacgcgcaccccctctgcatggtcat

SEQ ID NO: 124194 - DNA, 811 bp, Homo sapiens
  Payload ID: 4387
  Gene Symbol: CYB561
  Gene Name: cytochrome b561
  ENST ID: ENST00000585153
  CDS Start-End: 1-220
ctaccgcccacagcacatcttctttggtgctaccatcttcctcctttccgtgggcaccgccctgctgggcctgaaggaggcactgctgttcaacctcggcttctcccttcctctcacccctgcaggggcaagtatagcgcatttgagcccgagggtgtcctggccaacgtgctgggcctgctgctggcctgcttcggtggggcggtgctctacatcttgacccgggccgactggaagcggccttcccaggcggaagagcaggccctctccatggacttcaagacgctgacggagggagatagccccggctcccagtgatgcgcccggccggccctgggggttcgcggggtgtcttcttgcctgcccctgctgaggcgtcttcaggactgcaggctccggagagtggctctggcagcaggcgggcgcgtgggtgcagctgcatctgtttgagtgctgctttctggggtcaggtctccgcctcctctgcttctcctttctccgctgctatagaccagttcattgtgtgtggctcccgtgtctctgttgcccccttcagtgcagaaggctttgggtaggacttcgggtgttcggtcctggtcgcagagcacagatctttaaagaagcgagagaggaggccccaccctcctggcagcagatgcctggggcaaggccaggggaaactgggggggcctcagggacaggcctggaaaggccacgatggctgctgaattcaaacaaggagtccctccagcctgaataacacgtggcacaaatgggcccggcctttggcagaggagcaagtgatatgatg

SEQ ID NO: 124195 - DNA, 551 bp, Homo sapiens
  Payload ID: 4387
  Gene Symbol: CYB561
  Gene Name: cytochrome b561
  ENST ID: ENST00000578072
  CDS Start-End: 124-551
cagcccgccgcccggttgccatggcgacgccgtcgcgccacggcccgcagaaccggccaagcgacccgggcgcggcgcggggaggctgaagggacgctcgggtaggcaagcgtttgcctcagcatggagggcggggccgcggcagccacccccacagcactgccttactacgtggccttctcccagctgctgggcctgaccttggtggccatgaccggcgcgtggctcgggctgtaccgaggcggcattgcctgggagagcgacctgcagttcaacgcgcaccccctctgcatggtcataggcctgatcttcctgcagggaaatgccctgctggtttaccgtgtcttcaggaacgaagctaaacgcaccaccaaggtcctgcacgggctgctgcacatctttgcgctcgtcatcgccctggttggtgagttcccgggcgcggccttccccgccacctgcctgcctcttcaggcttggtggcggtgttcgactaccacaggaagaagggctacgctgacctgtacagcctacacagctggtgcgggatcctt

SEQ ID NO: 124196 - DNA, 877 bp, Homo sapiens
  Payload ID: 4387
  Gene Symbol: CYB561
  Gene Name: cytochrome b561
  ENST ID: ENST00000582997
  CDS Start-End: 13-789
agcgtctgtgggatgtccagcgtttgcctcagcatggagggcggggccgcggcagccacccccacagcactgccttactacgtggccttctcccagctgctgggcctgaccttggtggccatgaccggcgcgtggctcgggctgtaccgaggcggcattgcctgggagagcgacctgcagttcaacgcgcaccccctctgcatggtcataggcctgatcttcctgcagggaaatgccctgctggtttaccgtgtcttcaggaacgaagctaaacgcaccaccaaggtcctgcacgggctgctgcacatctttgcgctcgtcatcgccctggttggcttggtggcggtgttcgactaccacaggaagaagggctacgctgacctgtacagcctacacagctggtgcgggatccttgtctttgtcctgtactttgtgcagtggctggtgggcttcagcttcttcctgttccccggagcttcattctccctgcggagccgctaccgcccacagcacatcttctttggtgctaccatcttcctcctttccgtgggcaccgccctgctgggcctgaaggaggcactgctgttcaacctcgggggcaagtatagcgcatttgagcccgagggtgtcctggccaacgtgctgggcctgctgctggcctgcttcggtggggcggtgctctacatcttgacccgggccgactggaagcggccttcccaggcggaagagcaggccctctccatggacttcaagacgctgacggagggagatagccccggctcccagtgatgcgcccggccggccctgggggttcgcggggtgtcttcttgcctgcccctgctgaggcgtcttcaggactgcaggctccggagagtgg

SEQ ID NO: 124197 - DNA, 897 bp, Homo sapiens
  Payload ID: 4387
  Gene Symbol: CYB561
  Gene Name: cytochrome b561
  ENST ID: ENST00000582297
  CDS Start-End: 64-696
gcgacccgggcgcggcgcggggaggctgaagggacgctcgggtaggcaagcgtttgcctcagcatggagggcggggccgcggcagccacccccacagcactgccttactacgtggccttctcccagctgctgggcctgaccttggtggccatgaccggcgcgtggctcgggctgtaccgaggcggcattgcctgggagagcgacctgcagttcaacgcgcaccccctctgcatggtcataggcctgatcttcctgcagggaaatgccctgctggtttaccgtgtcttcaggaacgaagctaaacgcaccaccaaggtcctgcacgggctgctgcacatctttgcgctcgtcatcgccctggttggcttggtggcggtgttcgactaccacaggaagaagggctacgctgacctgtacagcctacacagctggtgcgggatccttgtctttgtcctgtactttgtgcagtggctggtgggcttcagcttcttcctgttccccggagcttcattctccctgcggagccgctaccgcccacagcacatcttctttggtgctaccatcttcctcctttccgtgggcaccgccctgctgggcctgaaggaggcactgctgttcaacctcgggaagtcaggatggagtcagaacaactacagtcatcccccgtggtgtctgcacatcactccagccccataaagagtgtcatgttagctgagtcaccatttggcttcggcctggaaatagtgtgattagaacactgatcgtgtgcgaggccaggagatcaagaccatcctgactaacaaacacagtgaaaccccgtctctactaaaaatacaaaaaaattagccaggcgtggtggtgggcgcctgtagtcccagctacttgggaggctgaggc

SEQ ID NO: 124198 - DNA, 1193 bp, Homo sapiens
  Payload ID: 4387
  Gene Symbol: CYB561
  Gene Name: cytochrome b561
  ENST ID: ENST00000582034
  CDS Start-End: 87-755
agaaccggccaagcgacccgggcgcggcgcggggaggctgaagggacgctcgggtaggcaagctgctgggcctgaccttggtggccatgaccggcgcgtggctcgggctgtaccgaggcggcattgcctgggagagcgacctgcagttcaacgcgcaccccctctgcatggtcataggcctgatcttcctgcagggaaatgccctgctggtttaccgtgtcttcaggaacgaagctaaacgcaccaccaaggtcctgcacgggctgctgcacatctttgcgctcgtcatcgccctggttggcttggtggcggtgttcgactaccacaggaagaagggctacgctgacctgtacagcctacacagctggtgcgggatccttgtctttgtcctgtactttgtgcagtggctggtgggcttcagcttcttcctgttccccggagcttcattctccctgcggagccgctaccgcccacagcacatcttctttggtgctaccatcttcctcctttccgtgggcaccgccctgctgggcctgaaggaggcactgctgttcaacctcgggggcaagtatagcgcatttgagcccgagggtgtcctggccaacgtgctgggcctgctgctggcctgcttcggtggggcggtgctctacatcttgacccgggccgactggaagcggccttcccaggcggaagagcaggccctctccatggacttcaagacgctgacggagggagatagccccggctcccagtgatgcgcccggccggccctgggggttcgcggggtgtcttcttgcctgcccctgctgaggcgtcttcaggactgcaggctccggagagtggctctggcagcaggcgggcgcgtgggtgcagctgcatctgtttgagtgctgctttctggggtcaggtctccgcctcctctgcttctcctttctccgctgctatagaccagttcattgtgtgtggctcccgtgtctctgttgcccccttcagtgcagaaggctttgggtaggacttcgggtgttcggtcctggtcgcagagcacagatctttaaagaagcgagagaggaggccccaccctcctggcagcagatgcctggggcaaggccaggggaaactgggggggcctcagggacaggcctggaaaggccacgatggctgctgaattcaaacaaggagtccctccagcctga

SEQ ID NO: 124199 - DNA, 3061 bp, Homo sapiens
  Payload ID: 4388
  Gene Symbol: CYB561A3
  Gene Name: cytochrome b561 family, member A3
  Uniprot ID: Q8NBI2
  ENST ID: ENST00000294072
  CDS Start-End: 679-1407
ggctttctcttcccgctctatggccagtctggccgccatgttggagctttcgctgttcggggcccggcctgctccgggccctcccagcgtcgccgctagctgacttagggctcccgcccacactgcgcacggccttgctgagggccggctcgtagtgggaggcttcgcgttcacctgaacatttccgcctcctctggatgggggatgagaggcggggctgatgcatcgcagcagtcctggaccctgacttcggacttggagaagaaacgccgaggaggaacgggagttagggggttagcagcttggcgcgctgggagccggccacccctggtctccggacttcacttcccaggaggcctcgcgcgcgactggaagtgctgcgagcctataagaaggcgaggcggcacccgccgctctgctctggggcggcattgccagccggctgtaggcattcagggcagtgtcttctgcatctcctaggaacctcgggagcggcagctccggcgcctggtagcgagaggcgggttccggagatcccggcctcacttcgtcccactgtggttaggggtgagtcctgcaaatgttaagtgatttgctcaaggtgcccatttcgcaggaattggagcccaggccagttctctgagcctatcattagggctaaaggagtgcgtgatcagaatggtgtctggacggttctacttgtcctgcctgctgctggggtccctgggctctatgtgcatcctcttcactatctactggatgcagtactggcgtggtggctttgcctggaatggcagcatctacatgttcaactggcacccagtgcttatggttgctggcatggtggtattctatggaggtgcgtcactggtgtaccgcctgccccagtcgtgggtggggcccaaactgccctggaaactcctccatgcagcgctgcacctgatggccttcgtcctcactgttgtggggctggttgctgtctttacgtttcacaaccatggaaggactgccaacctctactcccttcacagctggctgggcatcaccactgtcttcctcttcgcctgccagtggttcctgggctttgctgtcttcctcctgccctgggcgtccatgtggctgcgcagcctcctaaaacctatccacgtcttttttggagccgccatcctctctctgtccatcgcatccgtcatttcgggcattaatgagaagcttttcttcagtttgaaaaacaccaccaggccataccacagcctgcccagtgaggcggtctttgccaacagcaccgggatgctggtggtggcctttgggctgctggtgctctacatccttctggcttcatcttggaagcgcccagagccggggatcctgaccgacagacagcccctgctgcatgatggggagtgaagcagcaggaaggggctcccaagagctcctggtggtgcagcctgtgctcccctcagaagctctgctcttcccagggctcccggctggtttcagcaggcgactttcttccaatgctgggcccagacttcttgcctgggtgctggcctgccctctccggccgcttgctgcctgtctgctttccttggtggctttgcctgggtgctgggcctgccctctccggccgcttgctgcctgtctgctttccttggtggctttgcctgggtgctgggcctgccttctctggctgcttgctgcctgtctgctttccttggtggctttggcttctgcactccttggcgtcagcctctcaggtcctccattcacacgaggtcctcctcgctctggccgctcttgctgctcctgtctgaagaaatcagactgatttcctcttaagactcctagggatgtggtgaagagctgggactcaagtgcagtccacggtgtgaaacatgagggaggtgaggtgtccgtccacttcccccataaaggtgtgcatttcagttaggctgccccgccacagagcaggcttcatctgctctgccatccagccccatctggatgtgaggtggggtggagacatcatggggtgattgcagaaagggggagtggcggcccacgcagcttctgctgaggagctgaccgctctgagctgttctgtttcgtattgctgctctgtgtctgcatgtattgtgaccgtgcggctccacctcttccagctgctgctacagctgaggcctggatcccggcctttccctgtgacttacgtgtctgtcaccggcaggcagccctacaaatcctggtgacctgctctcccaagaacagagcctgtccccagatgtcccagtagcgatgagtaacagaggtggctgtggacttcctctacttctccttgctggatcagggccttcctgcctcccgctgggcaggtctggccttgctctcttggcagggccccagcccctctgaccactctgcagctcaccatgcagctgatgccaaagttgtggtgtccagtgtgcagcagccctgggagccactgccaccttcagaggggttccttgctgagacccacattgcttcacctggccccaccatggctgcttgcctggcccaacctagcgttctgtgccatgctagagcttgagctgttgctcttcttcaggggaggaaatagggtggagagcgggaagggtcttgctcctaagtgttgctgctgtggcttttttgccttctccaaagacgcactgccaggtcccaagcttcagactgctgtgcttagtaagcaagtgagaagcctggggtttggagcccacctactctctggcagcatcagcatcctactcctggcaacatcaggccaacgtccaccccagcctcacattgccagatgttggcagaagggctaatattgaccgtcttgactggctggagccttcaaagccactgggatgtcctccaggcacctgggtcccatgaccagctccccatctccataggggtaggcatttcactggtttatgaagctcgagtttcattaaatatgttaagaatcaaagctgtctttgttcaggctgctataacaaaaatataatagcctgggtggcttaaacaacaa

SEQ ID NO: 124200 - DNA, 1803 bp, Homo sapiens
  Payload ID: 4388
  Gene Symbol: CYB561A3
  Gene Name: cytochrome b561 family, member A3
  ENST ID: ENST00000447532
  CDS Start-End: 293-1084
tataagaaggcgaggcggcacccgccgctctgctctggggcggcattgccagccggctgtaggcattcagggcagtgtcttctgcatctcctaggaacctcgggagcggcagctccggcgcctggtagcgagaggcgggttccggagatcccggcctcacttcgtcccactgtggttaggggtgagtcctgcaaatgttaagtgatttgctcaaggtgcccatttcgcaggaattggagcccaggccagttctctgagcctatcattagggctaaaggagtgcgtgatcagaatggtgtctggacggttctacttgtcctgcctgctgctggggtccctgggctctatgtgcatcctcttcactatctactggatgcagtactggcgtggtggctttgcctggaatggcagcatctacatgttcaactggcacccagtgcttatggttgctggcatggtggtattctatggaggtgcgtcactggtgtaccgcctgccccagtcgtgggtggggcccaaactgccctggaaactcctccatgcagcgctgcacctgatggccttcgtcctcactgttgtggggctggttgctgtctttacgtttcacaaccatggaaggactgccaacctctactcccttcacagctggctgggcatcaccactgtcttcctcttcgcctgccagtggttcctgggctttgctgtcttcctcctgccctgggcgtccatgtggctgcgcagcctcctaaaacctatccacgtcttttttggagccgccatcctctctctgtccatcgcatccgtcatttcgggcattaatgagaagcttttcttcagtttgaaaaacaccaccaggccataccacagcctgcccagtgaggcggtctttgccaacagcaccgggatgctggtggtggcctttgggctgctggtgctctacatccttctggcttcatcttggaagcgcccagagccggggatcctgaccgacagacagctgctgctacagctgaggcctggatcccggcctttccctgtgacttacgtgtctgtcaccggcaggcagccctacaaatcctggtgacctgctctcccaagaacagagcctgtccccagatgtcccagtagcgatgagtaacagaggtggctgtggacttcctctacttctccttgctggatcagggccttcctgcctcccgctgggcaggtctggccttgctctcttggcagggccccagcccctctgaccactctgcagctcaccatgcagctgatgccaaagttgtggtgtccagtgtgcagcagccctgggagccactgccaccttcagaggggttccttgctgagacccacattgcttcacctggccccaccatggctgcttgcctggcccaacctagcgttctgtgccatgctagagcttgagctgttgctcttcttcaggggaggaaatagggtggagagcgggaagggtcttgctcctaagtgttgctgctgtggcttttttgccttctccaaagacgcactgccaggtcccaagcttcagactgctgtgcttagtaagcaagtgagaagcctggggtttggagcccacctactctctggcagcatcagcatcctactcctggcaacatcaggccaacgtccaccccagcctcacattgccagatgttggcagaagggctaatattgaccgtcttgactggctggagccttcaaagccactgggatgtcctccaggcacctgggtcccatgaccagctccccatctccataggggtaggcatttcactggtttatgaa

SEQ ID NO: 124201 - DNA, 3205 bp, Homo sapiens
  Payload ID: 4388
  Gene Symbol: CYB561A3
  Gene Name: cytochrome b561 family, member A3
  Uniprot ID: Q8NBI2
  ENST ID: ENST00000426130
  CDS Start-End: 781-1560
tctatggccagtctggccgccatgttggagctttcgctgttcggggcccggcctgctccgggccctcccagcgtcgccgctagctgacttagggctcccgcccacactgcgcacggccttgctgagggccggctcgtagtgggaggcttcgcgttcacctgaacatttccgcctcctctggatgggggatgagaggcggggctgatgcatcgcagcagtcctggaccctgacttcggacttggagaagaaacgccgaggaggaacgggagttagggggttagcagcttggcgcgctgggagccggccacccctggtctccggacttcacttcccaggaggcctcgcgcgcgactggaagtgctgcgagcctataagaaggcgaggcggcacccgccgctctgctctggggcggcattgccagccggctgtaggcattcagggcagtgtcttctgcatctcctaggaacctcgggagcggcagctccggcgcctggtagcgagaggcgggttccggagatcccggcctcacttcgtcccactgtggttaggggtgagtcctgcaaatgttaagtgatttgctcaaggtgcccatttcgcaggaattggagcccaggccagttctctgagcctatcattagggctaaagaggaagagaaagcagaagtctcagggctggagacagctgaggggcatcagctggttcaaggtgtggagtgtgggcagtggagtgaaggcctggttacctctccagtgaagattagccccatagagcttactctatggggaagaacttttctgactccttcctgtctagggagtgcgtgatcagaatggtgtctggacggttctacttgtcctgcctgctgctggggtccctgggctctatgtgcatcctcttcactatctactggatgcagtactggcgtggtggctttgcctggaatggcagcatctacatgttcaactggcacccagtgcttatggttgctggcatggtggtattctatggaggtgcgtcactggtgtaccgcctgccccagtcgtgggtggggcccaaactgccctggaaactcctccatgcagcgctgcacctgatggccttcgtcctcactgttgtggggctggttgctgtctttacgtttcacaaccatggaaggactgccaacctctactcccttcacagctggctgggcatcaccactgtcttcctcttcgcctgccagtggttcctgggctttgctgtcttcctcctgccctgggcgtccatgtggctgcgcagcctcctaaaacctatccacgtcttttttggagccgccatcctctctctgtccatcgcatccgtcatttcgggcattaatgagaagcttttcttcagtttgaaaaacaccaccaggccataccacagcctgcccagtgaggcggtctttgccaacagcaccgggatgctggtggtggcctttgggctgctggtgctctacatccttctggcttcatcttggaagcgcccagagccggggatcctgaccgacagacagcccctgctgcatgatggggagtgaagcagcaggaaggggctcccaagagctcctggtggtgcagcctgtgctcccctcagaagctctgctcttcccagggctcccggctggtttcagcaggcgactttcttccaatgctgggcccagacttcttgcctgggtgctggcctgccctctccggccgcttgctgcctgtctgctttccttggtggctttgcctgggtgctgggcctgccctctccggccgcttgctgcctgtctgctttccttggtggctttgcctgggtgctgggcctgccttctctggctgcttgctgcctgtctgctttccttggtggctttggcttctgcactccttggcgtcagcctctcaggtcctccattcacacgaggtcctcctcgctctggccgctcttgctgctcctgtctgaagaaatcagactgatttcctcttaagactcctagggatgtggtgaagagctgggactcaagtgcagtccacggtgtgaaacatgagggaggtgaggtgtccgtccacttcccccataaaggtgtgcatttcagttaggctgccccgccacagagcaggcttcatctgctctgccatccagccccatctggatgtgaggtggggtggagacatcatggggtgattgcagaaagggggagtggcggcccacgcagcttctgctgaggagctgaccgctctgagctgttctgtttcgtattgctgctctgtgtctgcatgtattgtgaccgtgcggctccacctcttccagctgctgctacagctgaggcctggatcccggcctttccctgtgacttacgtgtctgtcaccggcaggcagccctacaaatcctggtgacctgctctcccaagaacagagcctgtccccagatgtcccagtagcgatgagtaacagaggtggctgtggacttcctctacttctccttgctggatcagggccttcctgcctcccgctgggcaggtctggccttgctctcttggcagggccccagcccctctgaccactctgcagctcaccatgcagctgatgccaaagttgtggtgtccagtgtgcagcagccctgggagccactgccaccttcagaggggttccttgctgagacccacattgcttcacctggccccaccatggctgcttgcctggcccaacctagcgttctgtgccatgctagagcttgagctgttgctcttcttcaggggaggaaatagggtggagagcgggaagggtcttgctcctaagtgttgctgctgtggcttttttgccttctccaaagacgcactgccaggtcccaagcttcagactgctgtgcttagtaagcaagtgagaagcctggggtttggagcccacctactctctggcagcatcagcatcctactcctggcaacatcaggccaacgtccaccccagcctcacattgccagatgttggcagaagggctaatattgaccgtcttgactggctggagccttcaaagccactgggatgtcctccaggcacctgggtcccatgaccagctccccatctccataggggtaggcatttcactggtttatgaagctcgagtttcattaaatatgttaagaatcaaagctgtctttgttcaggctgctataacaaaaatataatagcctgggtggctt

SEQ ID NO: 124202 - DNA, 1094 bp, Homo sapiens
  Payload ID: 4388
  Gene Symbol: CYB561A3
  Gene Name: cytochrome b561 family, member A3
  Uniprot ID: Q8NBI2
  ENST ID: ENST00000536915
  CDS Start-End: 93-821
gttacctctccagtgaagattagccccatagagcttactctatggggaagaacttttctgactccttcctgtctagggagtgcgtgatcagaatggtgtctggacggttctacttgtcctgcctgctgctggggtccctgggctctatgtgcatcctcttcactatctactggatgcagtactggcgtggtggctttgcctggaatggcagcatctacatgttcaactggcacccagtgcttatggttgctggcatggtggtattctatggaggtgcgtcactggtgtaccgcctgccccagtcgtgggtggggcccaaactgccctggaaactcctccatgcagcgctgcacctgatggccttcgtcctcactgttgtggggctggttgctgtctttacgtttcacaaccatggaaggactgccaacctctactcccttcacagctggctgggcatcaccactgtcttcctcttcgcctgccagtggttcctgggctttgctgtcttcctcctgccctgggcgtccatgtggctgcgcagcctcctaaaacctatccacgtcttttttggagccgccatcctctctctgtccatcgcatccgtcatttcgggcattaatgagaagcttttcttcagtttgaaaaacaccaccaggccataccacagcctgcccagtgaggcggtctttgccaacagcaccgggatgctggtggtggcctttgggctgctggtgctctacatccttctggcttcatcttggaagcgcccagagccggggatcctgaccgacagacagcccctgctgcatgatggggagtgaagcagcaggaaggggctcccaagagctcctggtggtgcagcctgtgctcccctcagaagctctgctcttcccagggctcccggctggtttcagcaggcgactttcttccaatgctgggcccagacttcttgcctgggtgctggcctgccctctccggccgcttgctgcctgtctgctttccttggtggctttgcctgggtgctgggcctgccctctccggccgcttgctgcctgtctgctttccttggtggctttgcctgggtgctgggcctg

SEQ ID NO: 124203 - DNA, 573 bp, Homo sapiens
  Payload ID: 4388
  Gene Symbol: CYB561A3
  Gene Name: cytochrome b561 family, member A3
  ENST ID: ENST00000545361
  CDS Start-End: 408-573
gctctggggcggcattgccagccggctgtaggcattcagggcagtgtcttctgcatctcctaggaacctcgggagcggcagctccggcgcctggtagcgagaggcgggttccggagatcccggcctcacttcgtcccactgtggttagggggtgtggctacagatcctttcggactgcatttactttttcctcttacaaagaaaaaaaaaacagttgtggaagtagatattgtcagatgagtgagcctgctgatcaagatctcttacatttcactgagggatggagagtgttttaggtgagtcctgcaaatgttaagtgatttgctcaaggtgcccatttcgcaggaattggagcccaggccagttctctgagcctatcattagggctaaaggagtgcgtgatcagaatggtgtctggacggttctacttgtcctgcctgctgctggggtccctgggctctatgtgcatcctcttcactatctactggatgcagtactggcgtggtggctttgcctggaatggcagcatctacatgttcaactggcacccagtgcttatggttgctggcatgg

SEQ ID NO: 124204 - DNA, 4094 bp, Homo sapiens
  Payload ID: 4388
  Gene Symbol: CYB561A3
  Gene Name: cytochrome b561 family, member A3
  ENST ID: ENST00000537364
  CDS Start-End: 3548-4094
agggagtggacccgaattcctgtaccagctcggccacttaccttggctaagtcattttcttgttttgggccccagtgtcacagtgtttttgatttgtaagatgagggtttagggcttgtatcctaaatctggtcctcaagattcttgaagtcccccagtccatcggggagggagagcaacaaactgattttctaccccttcatttatttgtagttctaaattataaaagtaacactgcaagagtttggagtagagcctttttctttttctttcttttttttttttctgagacagagtctcactctgtcgcccaggctggaatgcagtggcacgatctcggctcactgcaacctccgcctcccgggttcaagcgattcccctgcctcagcctcccaagtagctgggattacaggcgcccgctaccgcgcccggctaatttttgtatttttagtagagacggggtttctccatgttggtcaggctggtctcgaactcctgacctcatgtgatccgcccgcctcggcttcccaaagtgctgggattacaggcgtgagctaccgcgcccagcctgcgtagagcctttttctaagactaagggctggatgggaactagcatttcttacccctggatgtgacctgttttagctcagccgggagaatcctttttcgcaagaagttaataatatcttgtgacgtgaaaattatgtgaaactcagacttcagtgtccataaataaatattactggaacacagccgtggtgctcatttgttaagatgtttatgtggctgctcttgcatgggcagagttgatgacatagttgtgacagaccatgtgctctacaaagcctagaatatttactacctggacctttacagaagagcttgctgactgctcccttagaatggggctctgcaaagtgagcacaccctgggatcacagcccagcctgcccttagaacaaatgagaggatattttcaagcatttgcattgcagttttcacggtttttttgttttgttttgtttttgagacagagtctagctctgtcgcccaggctagagtgcagtggtgcgatctcggctcacttcagccttctcctgggctcaagccatcctcccacctcagcctcctgagtagctgagactacaggtggatgccatcacgcccagctaatttttttttttttttaagagatgagggctcactgttgctcaggctggtctggaactcctgggtatttatttatagacagagtctatctctgttgcacaggctgcagtgcagtggcgtgatcttggctcactgcaacctctgcctcctgggttcaagcaattctcgtgcctcagcttcccgagtaccttggactacaagcgcatgccaccgtgcctggctaatttttgtatttttagtagagacgggattttgccatgttggccaggctggtctcgaacccctgacttcaggtaacccacctgcctgggcctcccaaagtgctgggattacaggcatgaatcactgtgctggtccttcactgcattcttccttttctcctgctttgctctatttcaggaagtaggagggcttatctgtgtattgtgagcagggcaatataactttgcagctctctgtcaggaaagtgtgcccagggtctattctaagtctgtcacagagcagtaaaccaggaccttttctagggtgtggctacagatcctttcggactgcatttactttttcctcttacaaagaaaaaaaaaacagttgtggaagtagatattgtcagatgagtgagcctgctgatcaagatctcttacatttcactgagggatggagagtgttttaggtgaatatctggtgatctgaaacgtcctctgcccttggaggaattgaggaggcagttctgaggctgggtagcaaatctctgagttaagtagttgagtcacaaatcttctaggaggctggtggcatgattttctcctgccagcttcatggaagctttttccctgcagcccttggaccttcttttcttttttttttttttttttgagacagagtctcactctgtcccccaggctggagagcagtggcgcgatctcggctcactgcaacgtccacctccagggttcaagcaattctcctgcctcagcctccctggtagctggaattacaggcgtgcgccaccacacccagcacatttttgcattttcagtagagacgtggtttcaccatgttggccaggctggtctcaaactcctgacctcaggtgatccatccgcgtcggcctcccaaagtgctgggattacaggcttgagccaccgagcctggctggaccttcctttctcagagattactgccaacttgggtcaccttgtgcatctttacctaagtaggtggacccctagcatggggagagctggcatggcatggctgagggccactgagaggcctgggcaggcacaaggaacatgagctgcatgttagtagttaggatgaagtgcatgacagcaatgactaagaattctatgtatatatatatatttttagatggagtctcgctcagtcgccaggctggagtgcagtggcgtgatcgcagctcactgcaacctccacctcccgggttcaagcgattttcctgcctcagcctaccgagtagctagctgggactaaaggcgcgcgccaccatgcccagctaattttttatttttagtagagatgggggcgggggttcaccatattggccaggatggtctcgatctcttgaccttatgatctgcccgcctcggcctcccaaagtgctaggattacaggtgtgagccacctcacccagcctttttttttttttttttttgagatgaagtttcgctctcattgctcagggtggagtgcaatggcacaatcttggctcattgcaacctctgcctccctggttcaagcaattctcctgcctcagcctcctgagtagctgggattgattacaggcgcccaccaccactcctggctaattttgtatttttagtagagaccggggtttcaccatgttgatcagtctggtctcgaactcctgacctcaggtgatccacctgcctcagcctcccaaagtgcaggattacaggcataagccatcgcgcccagcgaagaattctaatacttgacttctacagtgtgctacattcattttctcacttgatctgacaacctgtggtcaaggaagcagcgtgggccttgaagctaaacacacaggatttggaactccccacccactctcactgggtcctcatgctaattacttatctctctcagccttagtttcctcacggaataatatgcctcccagggttaagaggagtaaatgggatcttgtgtgtaaggctctggtgctcgtagctggtgttcgttattcttactgttcaagtattcttactgccacgcctttcttgcaggtgagtcctgcaaatgttaagtgatttgctcaaggtgcccatttcgcaggaattggagcccaggccagttctctgagcctatcattagggctaaaggagtgcgtgatcagaatggtgtctggacggttctacttgtcctgcctgctgctggggtccctgggctctatgtgcatcctcttcactatctactggatgcagtactggcgtggtggctttgcctggaatggcagcatctacatgttcaactggcacccagtgcttatggttgctggcatggtggtattctatggaggtgcgtcactggtgtaccgcctgccccagtcgtgggtggggcccaaactgccctggaaactcctccatgcagcgctgcacctgatggccttcgtcctcactgttgtggggctggttgctgtctttacgtttcacaaccatggaaggactgccaacctctactcccttcacagctggctgggcatcaccactgtcttcctcttcgcctgccagtggttcctgggctttgctgtcttcctcctgccctgggcgtccatgtggctgcgcagcctcctaaaacctatccacgtcttttttggagccgccatcctctctctgtccatcgcatccgtcatttcgggcattaatgagaagcttttcttcagtt

SEQ ID NO: 124205 - DNA, 540 bp, Homo sapiens
  Payload ID: 4388
  Gene Symbol: CYB561A3
  Gene Name: cytochrome b561 family, member A3
  ENST ID: ENST00000537680
  CDS Start-End: 455-540
atgttggagctttcgctgttcggggcccggcctgctccgggccctcccagcgtcgccgctagctgacttagggctcccgcccacactgcgcacggccttgctgagggccggctcgtagtgggaggcttcgcgttcacctgaacatttccgcctcctctggatgggggatgagaggcggggctgatgcatcgcagcagtcctggaccctgacttcggacttggagaagaaacgccgaggaggaacgggagttagggggaacctcgggagcggcagctccggcgcctggtagcgagaggcgggttccggagatcccggcctcacttcgtcccactgtggttaggggtgagtcctgcaaatgttaagtgatttgctcaaggtgcccatttcgcaggaattggagcccaggccagttctctgagcctatcattagggctaaaggagtgcgtgatcagaatggtgtctggacggttctacttgtcctgcctgctgctggggtccctgggctctatgtgcatcctcttcactatctactggatgca

SEQ ID NO: 124206 - DNA, 1202 bp, Homo sapiens
  Payload ID: 4388
  Gene Symbol: CYB561A3
  Gene Name: cytochrome b561 family, member A3
  ENST ID: ENST00000540139
  CDS Start-End: 830-1202
atgatgctttttagcctagaaactgcaaacaagctgaatttattattgtgaaaatagaatgagaggtccaagaaacctgcttcccccctccactttttttttaggagacaggtttccctctttttcaggctagagtgcagtgggatgatcatagcttgctgcagccttgaactcttaggctcaagtgatcctcccacctcagtcccccaagtagctgagagaacaggcatgtgccaccatgcccggataatattttttatttttattttttgtggacacaggatcttgctatgttgcccaggctgatcttgaacttctggcctcccaaagtgctgacatgagtcaccgtgcccagccctcctccctttttaattggaatctgtttatttatttatttctctctgtggcccaggctagattgcagtggcatgatcatagctcactgtaacctcaaactcctggcctcaagcagtcctcccaccttggcctcccaaaaagtgctggaattacaggcatgagccaccttgcctgaccactcctccctttttaactggcccttctctcctcccttcatggctgttatcccacaaatcatgggagggtagaagatgccgaggagttgataccagtgccctagcatttcctgttcccttgctgggaagctgtgtaggatcctatcagggttattccctgatgtctgggtgagctcgaggggagaggctgagccctggcactactctctcctgcagcgtcactggtgtaccgcctgccccagtcgtgggtggggcccaaactgccctggaaactcctccatgcagcgctgcacctgatggccttcgtcctcactgttgtggggctggttgctgtctttacgtttcacaaccatggaaggactgccaacctctactcccttcacagctggctgggcatcaccactgtcttcctcttcgcctgccagtggttcctgggctttgctgtcttcctcctgccctgggcgtccatgtggctgcgcagcctcctaaaacctatccacgtcttttttggagccgccatcctctctctgtccatcgcatccgtcatttcgggcattaatgagaagcttttcttcagtttgaaaaacaccaccaggccataccacagcctgcccagtgaggcggtctttgccaacagcaccgggatgctggtggtggcctttgggctgc

SEQ ID NO: 124207 - DNA, 3986 bp, Homo sapiens
  Payload ID: 4388
  Gene Symbol: CYB561A3
  Gene Name: cytochrome b561 family, member A3
  ENST ID: ENST00000546151
  CDS Start-End: 270-557
gccgctctgctctggggcggcattgccagccggctgtaggcattcagggcagtgtcttctgcatctcctaggaacctcgggagcggcagctccggcgcctggtagcgagaggcgggttccggagatcccggcctcacttcgtcccactgtggttaggggtgagtcctgcaaatgttaagtgatttgctcaaggtgcccatttcgcaggaattggagcccaggccagttctctgagcctatcattagggctaaaggagtgcgtgatcagaatggtgtctggacggttctacttgtcctgcctgctgctggggtccctgggctctatgtgcatcctcttcactatctactggatgcagtactggcgtggtggctttgcctggaatggcagcatctacatgttcaactggcacccagtgcttatggttgctggcatggtggtattctatggaggtgctggctgggcatcaccactgtcttcctcttcgcctgccagtggttcctgggctttgctgtcttcctcctgccctgggcgtccatgtggctgcgcagcctcctaaaacctatccacgtcttttttggagccgccatcctctctctgtccatcgcatccgtcatttcgggcattaatgagaagcttttcttcagtttgtgagtgcagtggggtccccaactctaaggtgaagaggagggaatagggtcttcaaaagatacaccctgtgatcacaggactcacccaagggaggagagattttggggttgggtccactcctgatctggaaggtaacagaattgatctttctttaggttgaaattggtaagtcagcagatatttattgagcatcagtttgatttagcacctgctgtgtgtcagaaacagtactaagcaccttacatttaatcctgtcaaccaccctacatcattggtattgattggtattgttgtcattgccattttcttttttctttttttttgagatggagtctcactctgtcgcccaggctggagtgtagtggcacaatcttggctcgctgcaacctccacctgctgggttcaagcaattctcctgcctctgcctcccaagtagctgggcctacaagtgtgtgccaccatgcccggctaattttttgaatttttagtagggacggggtttcaccatgctgggcaggctggtctcggactcctgacctcatgatctgcccgcctcggcctcccagagtgctgggattacaggcatgagccactgcacccggccgtcattgccattttcaattgagggaacagattctgcaataggactgttcaggtagaaataaaaataaaaaaaatgagggaacagaggggttacgtaacttacccgagggcacacagccagtaagtggcagagctgggactcagattaggcagtctgactctagagccttgcatgcctgaccactactgtccgttcttttgaggcaatggggtgtagtgaaaagcaactaggacttaaggtcagaccttggtttcgatcttggctgtgccatttactagttatgcaactttgggcaagttaatttcattgctttgagcttcagtttcctcatgggtaaaaggattattacagctgggtgccgtggcatgcacctgtagtcccagctactagggaggctgaggtggaaggagtccagcctgggcaacataggaagaccctctctctctccttttatccccccagccaagagatagcatctcactctgttgcctaggttggagagcaatggtgtgaccatagctcactgcagcatcaaactcctgcactcaagcgatcttcccaatgtagcctcctaagtaagctaggactacaggcatggaccacctcacctagctaagttttatttttgtagagacaggatctcactatgttgcacaggctagtctccaactcctggggtaaagcaatcctcatgccttggcctcccaaagtgctgggattacaagagtgagccgctgcacctggctcattatacaaatatttgcagggacttagaaagggtgttaaaattcagccgggcgcagtggctcacgcctgtaatcccagcactttgggaggccgaggcgggcggatcatgaggtcaggagatcgagaccatcctggctaacatggtgaaaccctgtctctactaaaaatacaaaaaattagccaggcgtggtggcaggcacctgcagtcccagctacttgggaggctgaggcaggagaatggcgtgaacccaggaggcggagcttgcagtgagccgagatcgtgccactgcactccagcccgggtgacagagcaagactctgcctcaaaaaaaaaaaaaaaaaaaaaaagaaagggtgttaaaattctagatcacatatggacccgggaaggttttctcaccctctgttagtgacatcgagtctcccactagacaaaaataggtggaaaaatctctcgagggctcacattgttttgtcatcttcaggaaaaacaccaccaggccataccacagcctgcccagtgaggcggtctttgccaacagcaccgggatgctggtggtggcctttgggctgctggtgctctacatccttctggcttcatcttggaagcgcccagagccggggatcctgaccgacagacaggtatgggttccagtcccacattccagggtgggacagggccaggtctagagaaggatctcccacgaaaggctggggccttgacaagaagacttaccctgtggcacagcaggaaaccaagtaacttgagggtggagttagggtggctgatggggagcactggtcccaaaccagcgcatcccagtgaaatgctgggactccccagtctgtccattgggagacagaatttcccccccaaatcactgtggttctgtggggtgaagtgtggccttatcttcttccccaaggaagggcttgactgtgacaagggtgtgtgatttctcctttaccagcctgggggctagtctagtgggatgggtgcctggtgaccagctgagtgctcagagcaggtcttgatgggatgtagggagacggggtgtgtaccaggctcagggactttggggcttccctgagggatttggtggcttggatggggaccaccctgcaggctgggggtctgtctgaacagcttgggcctggtgtgactcctgcatcatgtcattaactcctgggcatctgcctctctttccagcccctgctgcatgatggggagtgaagcagcaggaaggggctcccaagagctcctggtggtgcagcctgtgctcccctcagaagctctgctcttcccagggctcccggctggtttcagcaggcgactttcttccaatgctgggcccagacttcttgcctgggtgctggcctgccctctccggccgcttgctgcctgtctgctttccttggtggctttgcctgggtgctgggcctgccctctccggccgcttgctgcctgtctgctttccttggtggctttgcctgggtgctgggcctgccttctctggctgcttgctgcctgtctgctttccttggtggctttggcttctgcactccttggcgtcagcctctcaggtcctccattcacacgaggtcctcctcgctctggccgctcttgctgctcctgtctgaagaaatcagactgatttcctcttaagactcctagggatgtggtgaagagctgggactcaagtgcagtccacggtgtgaaacatgagggaggtgaggtgtccgtccacttcccccataaaggtgtgcatttcagttaggctgccccgccacagagcaggcttcatctgctctgccatccagccccatctggatgtgaggtggggtggagacatcatggggtgattgcagaaagggggagtggcggcccacgcagcttctgctgaggagctgaccgctctgagctgttctgtttcgtattgctgctctgtgtctgcatgtattgtgaccgtgcggctccacctcttc

SEQ ID NO: 124208 - DNA, 779 bp, Homo sapiens
  Payload ID: 4388
  Gene Symbol: CYB561A3
  Gene Name: cytochrome b561 family, member A3
  ENST ID: ENST00000539128
  CDS Start-End: 434-779
tctgctctggggcggcattgccagccggctgtaggcattcagggcagtgtcttctgcatctcctaggaacctcgggagcggcagctccggcgcctggtagcgagaggcgggttccggagatcccggcctcacttcgtcccactgtggttaggggtgagtcctgcaaatgttaagtgatttgctcaaggtgcccatttcgcaggaattggagcccaggccagttctctgagcctatcattagggctaaagaggaagagaaagcagaagtctcagggctggagacagctgaggggcatcagctggttcaaggtgtggagtgtgggcagtggagtgaaggcctggttacctctccagtgaagattagccccatagagcttactctatggggaagaacttttctgactccttcctgtctagggagtgcgtgatcagaatggtgtctggacggttctacttgtcctgcctgctgctggggtccctgggctctatgtgcatcctcttcactatctactggatgcagtactggcgtggtggctttgcctggaatggcagcatctacatgttcaactggcacccagtgcttatggttgctggcatggtggtattctatggaggtgcgtcactggtgtaccgcctgccccagtcgtgggtggggcccaaactgccctggaaactcctccatgcagcgctgcacctgatggccttcgtcctcactgttgtggggctggttgctgtctttacgtttcacaaccatggaaggactgccaacctctactccc

SEQ ID NO: 124209 - DNA, 650 bp, Homo sapiens
  Payload ID: 4388
  Gene Symbol: CYB561A3
  Gene Name: cytochrome b561 family, member A3
  ENST ID: ENST00000542361
  CDS Start-End: 52-650
ggctggagacagctgaggggcatcagctggttcaaggagtgcgtgatcagaatggtgtctggacggttctacttgtcctgcctgctgctggggtccctgggctctatgtgcatcctcttcactatctactggatgcagtactggcgtggtggctttgcctggaatggcagcatctacatgttcaactggcacccagtgcttatggttgctggcatggtggtattctatggaggtgcgtcactggtgtaccgcctgccccagtcgtgggtggggcccaaactgccctggaaactcctccatgcagcgctgcacctgatggccttcgtcctcactgttgtggggctggttgctgtctttacgtttcacaaccatggaaggactgccaacctctactcccttcacagctggctgggcatcaccactgtcttcctcttcgcctgccagtggttcctgggctttgctgtcttcctcctgccctgggcgtccatgtggctgcgcagcctcctaaaacctatccacgtcttttttggagccgccatcctctctctgtccatcgcatccgtcatttcgggcattaatgagaagcttttcttcagtttgaaaaacaccaccaggccataccacagcctgcccagtgaggcggtctttgc

SEQ ID NO: 124210 - DNA, 572 bp, Homo sapiens
  Payload ID: 4388
  Gene Symbol: CYB561A3
  Gene Name: cytochrome b561 family, member A3
  ENST ID: ENST00000539890
  CDS Start-End: 89-418
agtgttacctcctttagccagagaactgggtgcatctgagccagtggagatttgtgacttctccttcttctaggagtgcgtgatcagaatggtgtctggacggttctacttgtcctgcctgctgctggggtccctgggctctatgtgcatcctcttcactatctactggatgcagtactggcgtggtggctttgcctggaatggcagcatctacatgttcaactggcacccagtgcttatggttgctggcatggtggtattctatggaggtggaaaaacaccaccaggccataccacagcctgcccagtgaggcggtctttgccaacagcaccgggatgctggtggtggcctttgggctgctggtgctctacatccttctggcttcatcttggaagcgcccagagccggggatcctgaccgacagacagcccctgctgcatgatggggagtgaagcagcaggaaggggctcccaagagctcctggtggtgcagcctgtgctcccctcagaagctctgctcttcccagggctcccggctggtttcagcaggcgactttcttccaatgctgggc

SEQ ID NO: 124211 - DNA, 1494 bp, Homo sapiens
  Payload ID: 4388
  Gene Symbol: CYB561A3
  Gene Name: cytochrome b561 family, member A3
  ENST ID: ENST00000540755
  CDS Start-End: 233-550
aggcattcagggcagtgtcttctgcatctcctaggaacctcgggagcggcagctccggcgcctggtagcgagaggcgggttccggagatcccggcctcacttcgtcccactgtggttaggggtgagtcctgcaaatgttaagtgatttgctcaaggtgcccatttcgcaggaattggagcccaggccagttctctgagcctatcattagggctaaaggagtgcgtgatcagaatggtgtctggacggttctacttgtcctgcctgctgctggggtccctgggctctatgtgcatcctcttcactatctactggatgcagtactggcgtggtggctttgcctggaatggcagcatctacatgttcaactggcacccagtgcttatggttgctggcatggtggtattctatggaggtgtggttcctgggctttgctgtcttcctcctgccctgggcgtccatgtggctgcgcagcctcctaaaacctatccacgtcttttttggagccgccatcctctctctgtccatcgcatccgtcatttcgggcattaatgagaagcttttcttcagtttgaaaaacaccaccaggccataccacagcctgcccagtgaggcggtctttgccaacagcaccgggatgctggtggtggcctttgggctgctggtgctctacatccttctggcttcatcttggaagcgcccagagccggggatcctgaccgacagacagcccctgctgcatgatggggagtgaagcagcaggaaggggctcccaagagctcctggtggtgcagcctgtgctcccctcagaagctctgctcttcccagggctcccggctggtttcagcaggcgactttcttccaatgctgggcccagacttcttgcctgggtgctggcctgccctctccggccgcttgctgcctgtctgctttccttggtggctttgcctgggtgctgggcctgccctctccggccgcttgctgcctgtctgctttccttggtggctttgcctgggtgctgggcctgccttctctggctgcttgctgcctgtctgctttccttggtggctttggcttctgcactccttggcgtcagcctctcaggtcctccattcacacgaggtcctcctcgctctggccgctcttgctgctcctgtctgaagaaatcagactgatttcctcttaagactcctagggatgtggtgaagagctgggactcaagtgcagtccacggtgtgaaacatgagggaggtgaggtgtccgtccacttcccccataaaggtgtgcatttcagttaggctgccccgccacagagcaggcttcatctgctctgccatccagccccatctggatgtgaggtggggtggagacatcatggggtgattgcagaaagggggagtggcggcccacgcagcttctgctgaggagctgaccgctctgagctgttctgtttcgtattgctgctctgtgtctgcatgtattgtgaccgtgcggct

SEQ ID NO: 124212 - DNA, 1136 bp, Homo sapiens
  Payload ID: 4388
  Gene Symbol: CYB561A3
  Gene Name: cytochrome b561 family, member A3
  ENST ID: ENST00000544118
  CDS Start-End: 229-543
attcagggcagtgtcttctgcatctcctaggaacctcgggagcggcagctccggcgcctggtagcgagaggcgggttccggagatcccggcctcacttcgtcccactgtggttaggggtgagtcctgcaaatgttaagtgatttgctcaaggtgcccatttcgcaggaattggagcccaggccagttctctgagcctatcattagggctaaaggagtgcgtgatcagaatggtgtctggacggttctacttgtcctgcctgctgctggggtccctgggctctatgtgcatcctcttcactatctactggatgcagtactggcgtggtggctttgcctggaatggcagcatctacatgttcaactggcacccagtgcttatggttgctggcatggtggtattctatggaggtggccataccacagcctgcccagtgaggcggtctttgccaacagcaccgggatgctggtggtggcctttgggctgctggtgctctacatccttctggcttcatcttggaagcgcccagagccggggatcctgaccgacagacagcccctgctgcatgatggggagtgaagcagcaggaaggggctcccaagagctcctggtggtgcagcctgtgctcccctcagaagctctgctcttcccagggctcccggctggtttcagcaggcgactttcttccaatgctgggcccagacttcttgcctgggtgctggcctgccctctccggccgcttgctgcctgtctgctttccttggtggctttgcctgggtgctgggcctgccctctccggccgcttgctgcctgtctgctttccttggtggctttgcctgggtgctgggcctgccttctctggctgcttgctgcctgtctgctttccttggtggctttggcttctgcactccttggcgtcagcctctcaggtcctccattcacacgaggtcctcctcgctctggccgctcttgctgctcctgtctgaagaaatcagactgatttcctcttaagactcctagggatgtggtgaagagctgggactcaagtgcagtccacggtgtgaaacatgagggaggtgaggtgtccgtccacttcccccataaaggtgtgcatttcagttaggctgccccgccaca

SEQ ID NO: 124213 - DNA, 5009 bp, Homo sapiens
  Payload ID: 4389
  Gene Symbol: CYB561D1
  Gene Name: cytochrome b561 family, member D1
  Uniprot ID: Q8N8Q1
  ENST ID: ENST00000310611
  CDS Start-End: 42-443
tgttcgggcagctggagtgtacgggcccgcgggccacggccatgcagcccctggaggtaggtctggttcccgctccagctggggagccgagactgacccgctggctgcggagaggcagtgggatcttggcgcacctggtagctttgggcttcaccatctttctgacagcgctgtcccggccaggaaccaaaacaggtcccctgatggaggatagaagtgaaggaggccgggcgcggtgggtcatgcctgaaatcccagcactttgggaggccgacgcgggtggatcacttgaggtcttttctcctggcaccctgtattcatggccttggcgttctgcctctgcatggctgaagccatcctactcttctcacctgaacactccctgttcttcttctgctcccgaaaagcacggatccggctccactgggcagggcagaccctagccatcctctgtgcagctctgggcctgggcttcatcatctccagcaggacccgcagtgagctgcctcatctggtgtcctggcacagctgggtgggagccctgacactgctggccactgctgtccaggcactgtgtgggctctgcctcctttgtccccgggcagccagggtctcaagggtggctcgcctcaagctctaccatctgacatgtggactggtggtctacctgatggctacagtaacggtgcttctgggcatgtactcagtatggttccaggcccagatcaaaggtgcggcctggtacctgtgcctggcactgcccgtctatccagccctggtgatcatgcaccagatttccagatcctacttgccgaggaagaaaatggaaatgtgagttcctgcgaacgctgaatctaggtgggacgcttgccttgaacatcatggttcctttggtgatctataagggatctatttaagaagtggtcaggttttcgcacttcttggctggtccagggactgcagaaaccaaagctgctattgttgaggaataattcagtgggtcaaaatggggagatgtactgggtatgagtggaaggtgatggagagcctgatcctgaagcctctacttgatgagagacagagttttgggtggtgatagtgatgtgctggtggtcatttcttgcttgtgtgcctgatgaaaaactgggttcctgtaagttatgaatggcatccagggatatttgggttacttttaagaaagcagtgtgatgtagtggagagagcccatgggtcttatttatgggatatggtcctcttaggctctgttgtacaaccttaggtacattccatatcttaagaccactgtttcttcatctgtgaaatgtttctaaacaatctctaagtcccttccttctctaatatacagcgtctgtcaggtcgatgtctcagaacactctcccagctgtggaccacgtggaccacttagcagactcagggggtagttctttactctccctttactaccctggagggacagctctgcccttgaggcccttcagaaatttgtgctgatttggtccctgtgccagggcacagggggtcaggcactgtggaaagaagggactcaggtgagggtcttctggactctaagacggtaaaggcactaaagtcactttaaagcttttggagaagcaggagggcattggcttaaccaagccgaaggctgctggctgggctgcctagcccagctaagatcttccttcagcccacctcaggatccgggcttgagggctgcagggcctgcgtgcgctccctcccccgaaatcacttctcagggcaaaggagccccaggcatctcatgctttgcccttcttagggctcaggttcttgccttagcacatagcttctgggagcttttttgaagcatttcataagggccaaggaagtggggcagggcttttctgatccaaagaaaacaaagtttctctggttacccctcttcccttgttatctaagctttcctcagttgtcatctcttcccagctctttggtccaagagggggctgagtttggtgccagctggcaaatgagggctggactctcttccctccagagaccaccccgctccttgctgcagctgaaagtagttccccaggctgccctcggtggtgaggactggatgctagactgctgagctgtggtctgggctcagttgagaagataggatctccctagatcatggcaaggcctgacaacagctgagccaggaaagtgctgctgaggcaagtcgacatagctcacagggaactctgggaagcctgggatgtaggcgctggagctccagttcccaggagcaggggcaggtgttcctagatgttagtgttgtggatgtccttggtcttctgaagattcaggtcctcctctccgggtagcttagaagtaaggaggttggtttgattcaatagtatggggacagaatggggacagcaagggcagaagtgtcctctccacgtaactcattatgcccctcctgggggagattgcatctccaggacaagcatctaaaggaggcccctgctgtgcagaggggtattgttcctgtctctttcattgtcctccctcctctcaaactctccagtgtggtgtgaactcagaagaaacggttactggggctgcatggagaatttcacctgcggtgattttgatccagggactgcatctcctctttcctcatcacagccagtgctgagaggctccttctacctgccgcagggtaggagggccaggcaaagttcaccagcttgctctaagagcaagcaggcaatgccgtaaagcctgagcctgcctgaggtgctgcctcctcccaggtggtgcgggggctggtgggcgggcgggcaggcgtgctgacagccggcagtttgcgtgggctgtgccatctgatgtctattcccagccctgggaggaagggggagtcatttatattctgcaggaggaaggggccccagctgtcgcctttctgaccagcaggcctggagggcaggggcacagagcagagaggagggcactggtggtctcctgcttagcctggtctgactgcagtgtagggaataggtcaccaggaggagcccttcatcctggcaggccggattgtggagggacttccctccccctcttttccatttctccctccatcaccacctgccctcacatcctggggcagcagctggacagccattagacctcagtgccagggcactcttcctccagctgggatctcagtggctcccagctgcatgggctcctgcttgtgtgttccctcctccgccatcctctgttccccgcacctcccttattctgctcatgtctggggtattcacttggctcctcagcaaggaagcaaacgccttggaggagaagcacatggttgcccttttgtccttgctccctggctagggaaagctgctagtggtcagcctgttttgcctttttttaaaaaaaaaaaaaaagccagggcagggtgcttagattttaaaaatttgcgtgtcatttgcacaaattttcatatcaagctaagtcctgattccaaatttgattatattccaaatttgattatattccaaatttgattatattcagattcaaccttgaggacattagaaatatagatggcttctgtatccaaatctgaatggaaatgagattacccttctgggttcagatacccctcccaagcccccgtcttttctgtaaccacccctcctctgagccccatcatggctggggttggtatggaatgggagcagctctgtatctggggaagtcctccagcctcaccttcttggctcttaagtggtaggctgttaccacttgccagcctgggcctcctctctccccaccctttcacaaggcaggctgcccttccgcactcactggcccatcccttctttctcatcgtcccacccttccacccccgtgcatggctgctgtaggtctggtttttttggtttttgttttttttaagacggagtctcactctgccgccaggctggagtgcagtggcagaatcttggctcactgcaacctctgcctcccaggttcaagcgattctcctgcctcagcctcccgagtagctgggactacaggcacgtgccaccatatccagctaatttttgtatttttagtagagatggggtttcaccatgttggccaggatctcttgacctcgtgatctgcccgcctcggcctcccaaagtgctgtgattacaggcgtgagccaccgtgcctagccaggtcttgttttgaaaacctcactgtgggagattcaggcatcctccctaagccagctggccgctgtgctaaagcctgttcagagttaataataatcattagctgaatggtgctggggcctttcagcttcagatctctaagcacttgcaggctgagtcagtcagccctcaccttccccctccttcctgggctgcagagtgtaacagaatgggaaggcactgtgggaaggaagtcaggaatcttgctgctagccacgccttgcagtgacttctcgtctgggagtgggcactgagtcctctcagtaaactaataagacttgcacctgacaaaggtcaagatatgtagggaacacagtgtatgctaggctgagacctatggtggtggcaggggtggctgttgagcctgaacttccagtactcctgcccttccttctgtttacctggcttggcctacagggggcacccctggtcttgatgcctcaagcccagcatttctgggtcccctctgcaagctcagagagcagggaggcttctggtagtgctcttgatgctcctgtgtctggttggcacaaagatcctgtgtaacatgaaatgaaaggtgcatcagcttgggggctgggaaacctgcagtatgggtttactccgtccctatcactggtgtggctgtgggcaaaccacttattgcctgacctacctcacagggatgttgtgagggtttgatgagagaatgaatgttaataggaattggaaaattcaaagcattaaacacatgtaaacaggtgg

SEQ ID NO: 124214 - DNA, 1085 bp, Homo sapiens
  Payload ID: 4389
  Gene Symbol: CYB561D1
  Gene Name: cytochrome b561 family, member D1
  Uniprot ID: Q8N8Q1
  ENST ID: ENST00000369868
  CDS Start-End: 27-782
agtgtacgggcccgcgggccacggccatgcagcccctggaggtaggtctggttcccgctccagctggggagccgagactgacccgctggctgcggagaggcagtgggatcttggcgcacctggtagctttgggcttcaccatctttctgacagcgctgtcccggccaggaaccaaaacaggtcccctgatggaggatagaagtgaaggaggccgggcgcggtgggtcatgcctgaaatcccagcactttgggaggccgacgcgggtggatcacttgagttctgcctctgcatggctgaagccatcctactcttctcacctgaacactccctgttcttcttctgctcccgaaaagcacggatccggctccactgggcagggcagaccctagccatcctctgtgcagctctgggcctgggcttcatcatctccagcaggacccgcagtgagctgcctcatctggtgtcctggcacagctgggtgggagccctgacactgctggccactgctgtccaggcactgtgtgggctctgcctcctttgtccccgggcagccagggtctcaagggtggctcgcctcaagctctaccatctgacatgtggactggtggtctacctgatggctacagtaacggtgcttctgggcatgtactcagtatggttccaggcccagatcaaaggtgcggcctggtacctgtgcctggcactgcccgtctatccagccctggtgatcatgcaccagatttccagatcctacttgccgaggaagaaaatggaaatgtgagttcctgcgaacgctgaatctaggtgggacgcttgccttgaacatcatggttcctttggtgatctataagggatctatttaagaagtggtcaggttttcgcacttcttggctggtccagggactgcagaaaccaaagctgctattgttgaggaataattcagtgggtcaaaatggggagatgtactgggtatgagtggaaggtgatggagagcctgatcctgaagcctctacttgatgagagacagagttttgggtggtgatagtgatgtgctggtggtcatttcttgcttgtgtgcctgatg

SEQ ID NO: 124215 - DNA, 620 bp, Homo sapiens
  Payload ID: 4389
  Gene Symbol: CYB561D1
  Gene Name: cytochrome b561 family, member D1
  Uniprot ID: Q8N8Q1
  ENST ID: ENST00000393709
  CDS Start-End: 89-607
ctctcctgcagccgccaccgcctccgcgatcgcaaacccggaagacgtgttcgggcagctggagtgtacgggcccgcgggccacggccatgcagcccctggagttctgcctctgcatggctgaagccatcctactcttctcacctgaacactccctgttcttcttctgctcccgaaaagcacggatccggctccactgggcagggcagaccctagccatcctctgtgcagctctgggcctgggcttcatcatctccagcaggacccgcagtgagctgcctcatctggtgtcctggcacagctgggtgggagccctgacactgctggccactgctgtccaggcactgtgtgggctctgcctcctttgtccccgggcagccagggtctcaagggtggctcgcctcaagctctaccatctgacatgtggactggtggtctacctgatggctacagtaacggtgcttctgggcatgtactcagtatggttccaggcccagatcaaaggtgcggcctggtacctgtgcctggcactgcccgtctatccagccctggtgatcatgcaccagatttccagatcctacttgccgaggaagaaaatggaaatgtgagttcctgcgaacg

SEQ ID NO: 124216 - DNA, 3326 bp, Homo sapiens
  Payload ID: 4389
  Gene Symbol: CYB561D1
  Gene Name: cytochrome b561 family, member D1
  Uniprot ID: Q8N8Q1
  ENST ID: ENST00000420578
  CDS Start-End: 41-730
gttcgggcagctggagtgtacgggcccgcgggccacggccatgcagcccctggaggtaggtctggttcccgctccagctggggagccgagactgacccgctggctgcggagaggcagtgggatcttggcgcacctggtagctttgggcttcaccatctttctgacagcgctgtcccggccaggaaccagtcttttctcctggcaccctgtattcatggccttggcgttctgcctctgcatggctgaagccatcctactcttctcacctgaacactccctgttcttcttctgctcccgaaaagcacggatccggctccactgggcagggcagaccctagccatcctctgtgcagctctgggcctgggcttcatcatctccagcaggacccgcagtgagctgcctcatctggtgtcctggcacagctgggtgggagccctgacactgctggccactgctgtccaggcactgtgtgggctctgcctcctttgtccccgggcagccagggtctcaagggtggctcgcctcaagctctaccatctgacatgtggactggtggtctacctgatggctacagtaacggtgcttctgggcatgtactcagtatggttccaggcccagatcaaaggtgcggcctggtacctgtgcctggcactgcccgtctatccagccctggtgatcatgcaccagatttccagatcctacttgccgaggaagaaaatggaaatgtgagttcctgcgaacgctgaatctaggtgggacgcttgccttgaacatcatggttcctttggtgatctataagggatctatttaagaagtggtcaggttttcgcacttcttggctggtccagggactgcagaaaccaaagctgctattgttgaggaataattcagtgggtcaaaatggggagatgtactgggtatgagtggaaggtgatggagagcctgatcctgaagcctctacttgatgagagacagagttttgggtggtgatagtgatgtgctggtggtcatttcttgcttgtgtgcctgatgaaaaactgggttcctgtaagttatgaatggcatccagggatatttgggttacttttaagaaagcagtgtgatgtagtggagagagcccatgggtcttatttatgggatatggtcctcttaggctctgttgtacaaccttaggtacattccatatcttaagaccactgtttcttcatctgtgaaatgtttctaaacaatctctaagtcccttccttctctaatatacagcgtctgtcaggtcgatgtctcagaacactctcccagctgtggaccacgtggaccacttagcagactcagggggtagttctttactctccctttactaccctggagggacagctctgcccttgaggcccttcagaaatttgtgctgatttggtccctgtgccagggcacagggggtcaggcactgtggaaagaagggactcaggtgagggtcttctggactctaagacggtaaaggcactaaagtcactttaaagcttttggagaagcaggagggcattggcttaaccaagccgaaggctgctggctgggctgcctagcccagctaagatcttccttcagcccacctcaggatccgggcttgagggctgcagggcctgcgtgcgctccctcccccgaaatcacttctcagggcaaaggagccccaggcatctcatgctttgcccttcttagggctcaggttcttgccttagcacatagcttctgggagcttttttgaagcatttcataagggccaaggaagtggggcagggcttttctgatccaaagaaaacaaagtttctctggttacccctcttcccttgttatctaagctttcctcagttgtcatctcttcccagctctttggtccaagagggggctgagtttggtgccagctggcaaatgagggctggactctcttccctccagagaccaccccgctccttgctgcagctgaaagtagttccccaggctgccctcggtggtgaggactggatgctagactgctgagctgtggtctgggctcagttgagaagataggatctccctagatcatggcaaggcctgacaacagctgagccaggaaagtgctgctgaggcaagtcgacatagctcacagggaactctgggaagcctgggatgtaggcgctggagctccagttcccaggagcaggggcaggtgttcctagatgttagtgttgtggatgtccttggtcttctgaagattcaggtcctcctctccgggtagcttagaagtaaggaggttggtttgattcaatagtatggggacagaatggggacagcaagggcagaagtgtcctctccacgtaactcattatgcccctcctgggggagattgcatctccaggacaagcatctaaaggaggcccctgctgtgcagaggggtattgttcctgtctctttcattgtcctccctcctctcaaactctccagtgtggtgtgaactcagaagaaacggttactggggctgcatggagaatttcacctgcggtgattttgatccagggactgcatctcctctttcctcatcacagccagtgctgagaggctccttctacctgccgcagggtaggagggccaggcaaagttcaccagcttgctctaagagcaagcaggcaatgccgtaaagcctgagcctgcctgaggtgctgcctcctcccaggtggtgcgggggctggtgggcgggcgggcaggcgtgctgacagccggcagtttgcgtgggctgtgccatctgatgtctattcccagccctgggaggaagggggagtcatttatattctgcaggaggaaggggccccagctgtcgcctttctgaccagcaggcctggagggcaggggcacagagcagagaggagggcactggtggtctcctgcttagcctggtctgactgcagtgtagggaataggtcaccaggaggagcccttcatcctggcaggccggattgtggagggacttccctccccctcttttccatttctccctccatcaccacctgccctcacatcctggggcagcagctggacagccattagacctcagtgccagggcactcttcctccagctgggatctcagtggctcccagctgcatgggctcctgcttgtgtgttccctcctccgccatcctctgttccccgcacctcccttattctgctcatgtctggggtattcacttggctcctcagcaaggaagcaaacgccttggaggagaagcacatggttgcccttttgtccttgctccctggctagggaaagctgctagtggtcagcctgttttgccttttttt

SEQ ID NO: 124217 - DNA, 5077 bp, Homo sapiens
  Payload ID: 4389
  Gene Symbol: CYB561D1
  Gene Name: cytochrome b561 family, member D1
  Uniprot ID: Q8N8Q1
  ENST ID: ENST00000430195
  CDS Start-End: 26-412
gtgtacgggcccgcgggccacggccatgcagcccctggaggtaggtctggttcccgctccagctggggagccgagactgacccgctggctgcggagaggcagtgggatcttggcgcacctggtagctttgggcttcaccatctttctgacagcgctgtcccggccaggaaccaaaacaggtcccctgatggaggatagaagtgaaggaggccgggcgcggtgggtcatgcctgaaatcccagcactttgggaggccgacgcgggtggatcacttgaggtcttttctcctggcaccctgtattcatggccttggcggatgtatgagagcacctcctttttctcaggcctccaagccagacatgaggcttactggctctctcctatgttcacagttctgcctctgcatggctgaagccatcctactcttctcacctgaacactccctgttcttcttctgctcccgaaaagcacggatccggctccactgggcagggcagaccctagccatcctctgtgcagctctgggcctgggcttcatcatctccagcaggacccgcagtgagctgcctcatctggtgtcctggcacagctgggtgggagccctgacactgctggccactgctgtccaggcactgtgtgggctctgcctcctttgtccccgggcagccagggtctcaagggtggctcgcctcaagctctaccatctgacatgtggactggtggtctacctgatggctacagtaacggtgcttctgggcatgtactcagtatggttccaggcccagatcaaaggtgcggcctggtacctgtgcctggcactgcccgtctatccagccctggtgatcatgcaccagatttccagatcctacttgccgaggaagaaaatggaaatgtgagttcctgcgaacgctgaatctaggtgggacgcttgccttgaacatcatggttcctttggtgatctataagggatctatttaagaagtggtcaggttttcgcacttcttggctggtccagggactgcagaaaccaaagctgctattgttgaggaataattcagtgggtcaaaatggggagatgtactgggtatgagtggaaggtgatggagagcctgatcctgaagcctctacttgatgagagacagagttttgggtggtgatagtgatgtgctggtggtcatttcttgcttgtgtgcctgatgaaaaactgggttcctgtaagttatgaatggcatccagggatatttgggttacttttaagaaagcagtgtgatgtagtggagagagcccatgggtcttatttatgggatatggtcctcttaggctctgttgtacaaccttaggtacattccatatcttaagaccactgtttcttcatctgtgaaatgtttctaaacaatctctaagtcccttccttctctaatatacagcgtctgtcaggtcgatgtctcagaacactctcccagctgtggaccacgtggaccacttagcagactcagggggtagttctttactctccctttactaccctggagggacagctctgcccttgaggcccttcagaaatttgtgctgatttggtccctgtgccagggcacagggggtcaggcactgtggaaagaagggactcaggtgagggtcttctggactctaagacggtaaaggcactaaagtcactttaaagcttttggagaagcaggagggcattggcttaaccaagccgaaggctgctggctgggctgcctagcccagctaagatcttccttcagcccacctcaggatccgggcttgagggctgcagggcctgcgtgcgctccctcccccgaaatcacttctcagggcaaaggagccccaggcatctcatgctttgcccttcttagggctcaggttcttgccttagcacatagcttctgggagcttttttgaagcatttcataagggccaaggaagtggggcagggcttttctgatccaaagaaaacaaagtttctctggttacccctcttcccttgttatctaagctttcctcagttgtcatctcttcccagctctttggtccaagagggggctgagtttggtgccagctggcaaatgagggctggactctcttccctccagagaccaccccgctccttgctgcagctgaaagtagttccccaggctgccctcggtggtgaggactggatgctagactgctgagctgtggtctgggctcagttgagaagataggatctccctagatcatggcaaggcctgacaacagctgagccaggaaagtgctgctgaggcaagtcgacatagctcacagggaactctgggaagcctgggatgtaggcgctggagctccagttcccaggagcaggggcaggtgttcctagatgttagtgttgtggatgtccttggtcttctgaagattcaggtcctcctctccgggtagcttagaagtaaggaggttggtttgattcaatagtatggggacagaatggggacagcaagggcagaagtgtcctctccacgtaactcattatgcccctcctgggggagattgcatctccaggacaagcatctaaaggaggcccctgctgtgcagaggggtattgttcctgtctctttcattgtcctccctcctctcaaactctccagtgtggtgtgaactcagaagaaacggttactggggctgcatggagaatttcacctgcggtgattttgatccagggactgcatctcctctttcctcatcacagccagtgctgagaggctccttctacctgccgcagggtaggagggccaggcaaagttcaccagcttgctctaagagcaagcaggcaatgccgtaaagcctgagcctgcctgaggtgctgcctcctcccaggtggtgcgggggctggtgggcgggcgggcaggcgtgctgacagccggcagtttgcgtgggctgtgccatctgatgtctattcccagccctgggaggaagggggagtcatttatattctgcaggaggaaggggccccagctgtcgcctttctgaccagcaggcctggagggcaggggcacagagcagagaggagggcactggtggtctcctgcttagcctggtctgactgcagtgtagggaataggtcaccaggaggagcccttcatcctggcaggccggattgtggagggacttccctccccctcttttccatttctccctccatcaccacctgccctcacatcctggggcagcagctggacagccattagacctcagtgccagggcactcttcctccagctgggatctcagtggctcccagctgcatgggctcctgcttgtgtgttccctcctccgccatcctctgttccccgcacctcccttattctgctcatgtctggggtattcacttggctcctcagcaaggaagcaaacgccttggaggagaagcacatggttgcccttttgtccttgctccctggctagggaaagctgctagtggtcagcctgttttgcctttttttaaaaaaaaaaaaaaagccagggcagggtgcttagattttaaaaatttgcgtgtcatttgcacaaattttcatatcaagctaagtcctgattccaaatttgattatattccaaatttgattatattccaaatttgattatattcagattcaaccttgaggacattagaaatatagatggcttctgtatccaaatctgaatggaaatgagattacccttctgggttcagatacccctcccaagcccccgtcttttctgtaaccacccctcctctgagccccatcatggctggggttggtatggaatgggagcagctctgtatctggggaagtcctccagcctcaccttcttggctcttaagtggtaggctgttaccacttgccagcctgggcctcctctctccccaccctttcacaaggcaggctgcccttccgcactcactggcccatcccttctttctcatcgtcccacccttccacccccgtgcatggctgctgtaggtctggtttttttggtttttgttttttttaagacggagtctcactctgccgccaggctggagtgcagtggcagaatcttggctcactgcaacctctgcctcccaggttcaagcgattctcctgcctcagcctcccgagtagctgggactacaggcacgtgccaccatatccagctaatttttgtatttttagtagagatggggtttcaccatgttggccaggatctcttgacctcgtgatctgcccgcctcggcctcccaaagtgctgtgattacaggcgtgagccaccgtgcctagccaggtcttgttttgaaaacctcactgtgggagattcaggcatcctccctaagccagctggccgctgtgctaaagcctgttcagagttaataataatcattagctgaatggtgctggggcctttcagcttcagatctctaagcacttgcaggctgagtcagtcagccctcaccttccccctccttcctgggctgcagagtgtaacagaatgggaaggcactgtgggaaggaagtcaggaatcttgctgctagccacgccttgcagtgacttctcgtctgggagtgggcactgagtcctctcagtaaactaataagacttgcacctgacaaaggtcaagatatgtagggaacacagtgtatgctaggctgagacctatggtggtggcaggggtggctgttgagcctgaacttccagtactcctgcccttccttctgtttacctggcttggcctacagggggcacccctggtcttgatgcctcaagcccagcatttctgggtcccctctgcaagctcagagagcagggaggcttctggtagtgctcttgatgctcctgtgtctggttggcacaaagatcctgtgtaacatgaaatgaaaggtgcatcagcttgggggctgggaaacctgcagtatgggtttactccgtccctatcactggtgtggctgtgggcaaaccacttattgcctgacctacctcacagggatgttgtgagggtttgatgagagaatgaatgttaataggaattggaaaattcaaagcattaaacacatgtaaacaggtggtattatt

SEQ ID NO: 124218 - DNA, 892 bp, Homo sapiens
  Payload ID: 4389
  Gene Symbol: CYB561D1
  Gene Name: cytochrome b561 family, member D1
  ENST ID: ENST00000527072
  CDS Start-End: 41-208
gttcgggcagctggagtgtacgggcccgcgggccacggccatgcagcccctggaggtaggtctggttcccgctccagctggggagccgagactgacccgctggctgcggagaggcagtgggatcttggcgcacctggtagctttgggcttcaccatctttctgacagcgctgtcccggccaggaaccattctgcctctgcatggctgaagccatcctactcttctcacctgaacactccctgttcttcttctgctcccgaaaagcacggatccggctccactgggcagggcagaccctagccatcctctgtgcagctctgggcctgggcttcatcatctccagcaggacccgcagtgagctgcctcatctggtgtcctggcacagctgggtgggagccctgacactgctggccactgctgtccaggcactgtgtgggctctgcctcctttgtccccgggcagccagggtctcaagggtggctcgcctcaagctctaccatctgacatgtggactggtggtctacctgatggctacagtaacggtgcttctgggcatgtactcagtatggttccaggcccagatcaaaggtgcggcctggtacctgtgcctggcactgcccgtctatccagccctggtgatcatgcaccagatttccagatcctacttgccgaggaagaaaatggaaatgtgagttcctgcgaacgctgaatctaggtgggacgcttgccttgaacatcatggttcctttggtgatctataagggatctatttaagaagtggtcaggttttcgcacttcttggctggtccagggactgcagaaaccaaagctgctattgttgaggaataattcagtgggtcaaaatggggagatgtactgggtatgagtggaa

SEQ ID NO: 124219 - DNA, 1271 bp, Homo sapiens
  Payload ID: 4389
  Gene Symbol: CYB561D1
  Gene Name: cytochrome b561 family, member D1
  ENST ID: ENST00000528785
  CDS Start-End: 36-731
ggcagctggagtgtacgggcccgcgggccacggccatgcagcccctggaggtaggtctggttcccgctccagctggggagccgagactgacccgctggctgcggagaggcagtgggatcttggcgcacctggtagctttgggcttcaccatctttctgacagcgctgtcccggccaggaaccagtcttttctcctggcaccctgtattcatggccttggcgttctgcctctgcatggctgaagccatcctactcttctcacctgaacactccctgttcttcttctgctcccgaaaagcacggatccggctccactgggcagggcagaccctagccatcctctgtgcagctctgggcctgggcttcatcatctccagcaggacccgcagtgagctgcctcatctggtgtcctggcacagctgggtgggagccctgacactgctggccactgctgtccaggcactgtgtgggctctgcctcctttgtccccgggcagccagggtctcaagggtggctcgcctcaagctctaccatctgacatgtggactggtggtctacctgatggctacagtaacggtgcttctgggcatgtactcagtatggttccaggcccagatcaaaggtgcggcctggtacctgtgcctggcactgcccgtctatccagccctggtgatcatgcaccagatttccagatcctacttgccgaggaagaaaatggaaattgctacctaagaggagccagggtaagtgctgcaaggcatggcagacaaaattgcacatcttggccagaatctaaggaacttcttgtggtttgggggaggtggtgaggatgtgggtggtgggtgggtggggggtgttgaagagatgcagccatggacttccttgggcttggcacaggccaaaacagaagagagaactccaaactccaagtagtcctcatcagacttgctctccttatcagcttcatcctgtcagccaaattgtcagccatagaaaaactgctttgcagatgaaaaactatataaatgcagagtatgggagtgctctgacatcaacagctgtcatttcactgactgccaaggttgacttgtctgatgtggctggttgtgcagtagctccacccctcgtcaccttggttgttcctcctgaagtgaaaaacaactttccaaatagaggagggctgcccttcggtcaagactttaggtaagtattcaaattcgcattcttttaatttttttcctggtatcatttcctctccctctttggaatctg

SEQ ID NO: 124220 - DNA, 913 bp, Homo sapiens
  Payload ID: 4389
  Gene Symbol: CYB561D1
  Gene Name: cytochrome b561 family, member D1
  ENST ID: ENST00000533024
  CDS Start-End: 61-225
atcgcaaacccggaagacgtgttcgggcagctggagtgtacgggcccgcgggccacggccatgcagcccctggaggtcttttctcctggcaccctgtattcatggccttggcgttctgcctctgcatggctgaagccatcctactcttctcacctgaacactccctgttcttcttctgctcccgaaaagcacggatccggctccactgggcagggcagaccctagccatcctctgtgcagctctgggcctgggcttcatcatctccagcaggacccgcagtgagctgcctcatctggtgtcctggcacagctgggtgggagccctgacactgctggccactgctgtccaggcactgtgtgggctctgcctcctttgtccccgggcagccagggtctcaagggtggctcgcctcaagctctaccatctgacatgtggactggtggtctacctgatggctacagtaacggtgcttctgggcatgtactcagtatggttccaggcccagatcaaaggtgcggcctggtacctgtgcctggcactgcccgtctatccagccctggtgatcatgcaccagatttccagatcctacttgccgaggaagaaaatggaaatgtgagttcctgcgaacgctgaatctaggtgggacgcttgccttgaacatcatggttcctttggtgatctataagggatctatttaagaagtggtcaggttttcgcacttcttggctggtccagggactgcagaaaccaaagctgctattgttgaggaataattcagtgggtcaaaatggggagatgtactgggtatgagtggaaggtgatggagagcctgatcctgaagcctctacttgatgagagacagagttttgggtggtgatagtgatgtgctggtggtcatttcttgcttgtgtg

SEQ ID NO: 124221 - DNA, 3424 bp, Homo sapiens
  Payload ID: 4389
  Gene Symbol: CYB561D1
  Gene Name: cytochrome b561 family, member D1
  ENST ID: ENST00000496961
  CDS Start-End: 62-256
gatcgcaaacccggaagacgtgttcgggcagctggagtgtacgggcccgcgggccacggccatgcagcccctggaggtaggtctggttcccgctccagctggggagccgagactgacccgctggctgcggagaggcagtgggatcttggcgcacctggtagctttgggcttcaccatctttctgacagcgctgtcccggccaggaaccagtcttttctcctggcaccctgtattcatggccttggcggatgtatgagagcacctcctttttctcaggcctccaagccagacatgaggcttactggctctctcctatgttcacagttctgcctctgcatggctgaagccatcctactcttctcacctgaacactccctgttcttcttctgctcccgaaaagcacggatccggctccactgggcagggcagaccctagccatcctctgtgcagctctgggcctgggcttcatcatctccagcaggacccgcagtgagctgcctcatctggtgtcctggcacagctgggtgggagccctgacactgctggccactgctgtccaggcactgtgtgggctctgcctcctttgtccccgggcagccagggtctcaagggtggctcgcctcaagctctaccatctgacatgtggactggtggtctacctgatggctacagtaacggtgcttctgggcatgtactcagtatggttccaggcccagatcaaaggtgcggcctggtacctgtgcctggcactgcccgtctatccagccctggtgatcatgcaccagatttccagatcctacttgccgaggaagaaaatggaaatgtgagttcctgcgaacgctgaatctaggtgggacgcttgccttgaacatcatggttcctttggtgatctataagggatctatttaagaagtggtcaggttttcgcacttcttggctggtccagggactgcagaaaccaaagctgctattgttgaggaataattcagtgggtcaaaatggggagatgtactgggtatgagtggaaggtgatggagagcctgatcctgaagcctctacttgatgagagacagagttttgggtggtgatagtgatgtgctggtggtcatttcttgcttgtgtgcctgatgaaaaactgggttcctgtaagttatgaatggcatccagggatatttgggttacttttaagaaagcagtgtgatgtagtggagagagcccatgggtcttatttatgggatatggtcctcttaggctctgttgtacaaccttaggtacattccatatcttaagaccactgtttcttcatctgtgaaatgtttctaaacaatctctaagtcccttccttctctaatatacagcgtctgtcaggtcgatgtctcagaacactctcccagctgtggaccacgtggaccacttagcagactcagggggtagttctttactctccctttactaccctggagggacagctctgcccttgaggcccttcagaaatttgtgctgatttggtccctgtgccagggcacagggggtcaggcactgtggaaagaagggactcaggtgagggtcttctggactctaagacggtaaaggcactaaagtcactttaaagcttttggagaagcaggagggcattggcttaaccaagccgaaggctgctggctgggctgcctagcccagctaagatcttccttcagcccacctcaggatccgggcttgagggctgcagggcctgcgtgcgctccctcccccgaaatcacttctcagggcaaaggagccccaggcatctcatgctttgcccttcttagggctcaggttcttgccttagcacatagcttctgggagcttttttgaagcatttcataagggccaaggaagtggggcagggcttttctgatccaaagaaaacaaagtttctctggttacccctcttcccttgttatctaagctttcctcagttgtcatctcttcccagctctttggtccaagagggggctgagtttggtgccagctggcaaatgagggctggactctcttccctccagagaccaccccgctccttgctgcagctgaaagtagttccccaggctgccctcggtggtgaggactggatgctagactgctgagctgtggtctgggctcagttgagaagataggatctccctagatcatggcaaggcctgacaacagctgagccaggaaagtgctgctgaggcaagtcgacatagctcacagggaactctgggaagcctgggatgtaggcgctggagctccagttcccaggagcaggggcaggtgttcctagatgttagtgttgtggatgtccttggtcttctgaagattcaggtcctcctctccgggtagcttagaagtaaggaggttggtttgattcaatagtatggggacagaatggggacagcaagggcagaagtgtcctctccacgtaactcattatgcccctcctgggggagattgcatctccaggacaagcatctaaaggaggcccctgctgtgcagaggggtattgttcctgtctctttcattgtcctccctcctctcaaactctccagtgtggtgtgaactcagaagaaacggttactggggctgcatggagaatttcacctgcggtgattttgatccagggactgcatctcctctttcctcatcacagccagtgctgagaggctccttctacctgccgcagggtaggagggccaggcaaagttcaccagcttgctctaagagcaagcaggcaatgccgtaaagcctgagcctgcctgaggtgctgcctcctcccaggtggtgcgggggctggtgggcgggcgggcaggcgtgctgacagccggcagtttgcgtgggctgtgccatctgatgtctattcccagccctgggaggaagggggagtcatttatattctgcaggaggaaggggccccagctgtcgcctttctgaccagcaggcctggagggcaggggcacagagcagagaggagggcactggtggtctcctgcttagcctggtctgactgcagtgtagggaataggtcaccaggaggagcccttcatcctggcaggccggattgtggagggacttccctccccctcttttccatttctccctccatcaccacctgccctcacatcctggggcagcagctggacagccattagacctcagtgccagggcactcttcctccagctgggatctcagtggctcccagctgcatgggctcctgcttgtgtgttccctcctccgccatcctctgttccccgcacctcccttattctgctcatgtctggggtattcacttggctcctcagcaaggaagcaaacgccttggaggagaagcacatggttgcccttttgtccttgctccctggctagggaaagctgctagtggtcagcctgttttgccttttttt

SEQ ID NO: 124222 - DNA, 1225 bp, Homo sapiens
  Payload ID: 4390
  Gene Symbol: CYB561D2
  Gene Name: cytochrome b561 family, member D2
  Uniprot ID: O14569
  ENST ID: ENST00000232508
  CDS Start-End: 232-900
ggaagtcctgggtgggtagacgtcgcacccggaagtaaagcggctccgtgacggagcggcggtgcgcgcggcagggcccggagtatcccgctttctttggaggaaaccaccgcatcagatctgcgctgcggcagaggcagccttttctccagtgaggagtgaacagtgggcacctgagatcctggcccacgctactatgctttcaggctacaaccactagcacggctgacgatggccctttctgcggagaccgagtcacacatctaccgagctctgcgtactgcttctggcgctgccgcccaccttgtggccctgggctttaccatctttgtggctgtgcttgccaggcctggctccagcctgttctcctggcacccggtgcttatgtctttggctttctccttcctgatgaccgaggcactactggtgttttctcctgagagttcgctgctgcactccctctcacggaaaggccgagcacgctgccactgggtgctgcagctgctggccctgctgtgtgcactgctgggcctcggccttgtcatcctccacaaagagcagcttggcaaagcccacctggttacgcggcatgggcaggcagggctgctggctgtgctgtgggcagggctgcagtgctcaggtggggtggggctgctctaccccaagctgctgccccgatggcccctggcgaagctcaagctataccatgctacttctgggctggtgggctacctgctgggtagtgccagcctcttgctgggcatgtgctcactctggttcactgcctctgtcactggtgcagcctggtacctggctgtattatgccctgtcctcaccagcttggtcattatgaaccaggtgagcaatgcctacctataccgcaagaggatccaaccatgagctcttcccagcctaggggaagcctggatttgcccctccatgtaggagctgggcctagggacctgttgaactctctcagctgagtcaggggacacctcaggcactgggacagttgggcatttggaggcccgtgtgtgaattcctgctcctcatgctggagtgcctcccatttccttcccctttctctgtcatcccagaggaacataggcatcatgtgtctggatgaagctggggctgcaagactgcctctcctgcaaggcagctcatacttgtactgtatgttcagaaattttaggagagaaaaaagtaaaaaatttgtaaaaaa

SEQ ID NO: 124223 - DNA, 1533 bp, Homo sapiens
  Payload ID: 4390
  Gene Symbol: CYB561D2
  Gene Name: cytochrome b561 family, member D2
  Uniprot ID: O14569
  ENST ID: ENST00000418577
  CDS Start-End: 577-1245
gggtagacgtcgcacccggaagtaaagcggctccgtgacggagcggcggtgcgcgcggcagggcccggagtatcccgctttctttggaggaaaccaccgcatcagatctgcgctgcggcagaggcaggcaagtccctagcgtggaggggcagcatgctggcagcacttggggaggcggtgcgctaagggattcacgctgtaactgggaccgcagcagggaactacaatttccatagtgctccgcgccctcccagctggctctactgccggcgacggcgtggtacacgctgggatttgtagtcttacatggctttgcgcctcctacctggaaggcgggccagcgattggtaccagttcagacatgggtacacgttgacaggccgccggccgtcgactggcatgttgtgaccattcctggtgctggtcttggtactgttctttcctaccataacttattggaagagggtggcattcctgccttgcagccttttctccagtgaggagtgaacagtgggcacctgagatcctggcccacgctactatgctttcaggctacaaccactagcacggctgacgatggccctttctgcggagaccgagtcacacatctaccgagctctgcgtactgcttctggcgctgccgcccaccttgtggccctgggctttaccatctttgtggctgtgcttgccaggcctggctccagcctgttctcctggcacccggtgcttatgtctttggctttctccttcctgatgaccgaggcactactggtgttttctcctgagagttcgctgctgcactccctctcacggaaaggccgagcacgctgccactgggtgctgcagctgctggccctgctgtgtgcactgctgggcctcggccttgtcatcctccacaaagagcagcttggcaaagcccacctggttacgcggcatgggcaggcagggctgctggctgtgctgtgggcagggctgcagtgctcaggtggggtggggctgctctaccccaagctgctgccccgatggcccctggcgaagctcaagctataccatgctacttctgggctggtgggctacctgctgggtagtgccagcctcttgctgggcatgtgctcactctggttcactgcctctgtcactggtgcagcctggtacctggctgtattatgccctgtcctcaccagcttggtcattatgaaccaggtgagcaatgcctacctataccgcaagaggatccaaccatgagctcttcccagcctaggggaagcctggatttgcccctccatgtaggagctgggcctagggacctgttgaactctctcagctgagtcaggggacacctcaggcactgggacagttgggcatttggaggcccgtgtgtgaattcctgctcctcatgctggagtgcctcccatttccttcccctttctctgtcatcccagaggaacataggcatcatgtgtctggatgaagctggggctgcaagactgcctctcctgcaaggcagctcatacttgtactgtatgttcagaa

SEQ ID NO: 124224 - DNA, 1319 bp, Homo sapiens
  Payload ID: 4390
  Gene Symbol: CYB561D2
  Gene Name: cytochrome b561 family, member D2
  Uniprot ID: O14569
  ENST ID: ENST00000425346
  CDS Start-End: 316-984
cagaggcgtccccacctcctgtgaacacttgtcagagacagcctcgaggcctgtgtcgctggggcacgcaagcttgccaatccctctgcccaatggcgcctgcgcagcgcgactcagaggcgtggctggggcgggggacggctcgtcccaggaagtcctgggtgggtagacgtcgcacccggaagtaaagcggctccgtgacggagcggcggtgcgcgcggcagggcccggagtatcccgctttctttggaggaaaccaccgcatcagatctgcgctgcggcagaggcaggctacaaccactagcacggctgacgatggccctttctgcggagaccgagtcacacatctaccgagctctgcgtactgcttctggcgctgccgcccaccttgtggccctgggctttaccatctttgtggctgtgcttgccaggcctggctccagcctgttctcctggcacccggtgcttatgtctttggctttctccttcctgatgaccgaggcactactggtgttttctcctgagagttcgctgctgcactccctctcacggaaaggccgagcacgctgccactgggtgctgcagctgctggccctgctgtgtgcactgctgggcctcggccttgtcatcctccacaaagagcagcttggcaaagcccacctggttacgcggcatgggcaggcagggctgctggctgtgctgtgggcagggctgcagtgctcaggtggggtggggctgctctaccccaagctgctgccccgatggcccctggcgaagctcaagctataccatgctacttctgggctggtgggctacctgctgggtagtgccagcctcttgctgggcatgtgctcactctggttcactgcctctgtcactggtgcagcctggtacctggctgtattatgccctgtcctcaccagcttggtcattatgaaccaggtgagcaatgcctacctataccgcaagaggatccaaccatgagctcttcccagcctaggggaagcctggatttgcccctccatgtaggagctgggcctagggacctgttgaactctctcagctgagtcaggggacacctcaggcactgggacagttgggcatttggaggcccgtgtgtgaattcctgctcctcatgctggagtgcctcccatttccttcccctttctctgtcatcccagaggaacataggcatcatgtgtctggatgaagctggggctgcaagactgcctctcctgcaaggcagctcatacttgtactgtatgttcagaaattttaggagagaaaaaagtaaaaaatttgtaaaaaatgactgaaaa

SEQ ID NO: 124225 - DNA, 1212 bp, Homo sapiens
  Payload ID: 4390
  Gene Symbol: CYB561D2
  Gene Name: cytochrome b561 family, member D2
  Uniprot ID: O14569
  ENST ID: ENST00000424512
  CDS Start-End: 236-904
ggaagtcctgggtgggtagacgtcgcacccggaagtaaagcggctccgtgacggagcggcggtgcgcgcggcagggcccggagtatcccgctttctttggaggaaaccaccgcatcagatctgcgctgcggcagaggcaggcaaccttttctccagtgaggagtgaacagtgggcacctgagatcctggcccacgctactatgctttcaggctacaaccactagcacggctgacgatggccctttctgcggagaccgagtcacacatctaccgagctctgcgtactgcttctggcgctgccgcccaccttgtggccctgggctttaccatctttgtggctgtgcttgccaggcctggctccagcctgttctcctggcacccggtgcttatgtctttggctttctccttcctgatgaccgaggcactactggtgttttctcctgagagttcgctgctgcactccctctcacggaaaggccgagcacgctgccactgggtgctgcagctgctggccctgctgtgtgcactgctgggcctcggccttgtcatcctccacaaagagcagcttggcaaagcccacctggttacgcggcatgggcaggcagggctgctggctgtgctgtgggcagggctgcagtgctcaggtggggtggggctgctctaccccaagctgctgccccgatggcccctggcgaagctcaagctataccatgctacttctgggctggtgggctacctgctgggtagtgccagcctcttgctgggcatgtgctcactctggttcactgcctctgtcactggtgcagcctggtacctggctgtattatgccctgtcctcaccagcttggtcattatgaaccaggtgagcaatgcctacctataccgcaagaggatccaaccatgagctcttcccagcctaggggaagcctggatttgcccctccatgtaggagctgggcctagggacctgttgaactctctcagctgagtcaggggacacctcaggcactgggacagttgggcatttggaggcccgtgtgtgaattcctgctcctcatgctggagtgcctcccatttccttcccctttctctgtcatcccagaggaacataggcatcatgtgtctggatgaagctggggctgcaagactgcctctcctgcaaggcagctcatacttgtactgtatgttcagaaattttaggagagaaaaaagt

SEQ ID NO: 124226 - DNA, 927 bp, Homo sapiens
  Payload ID: 4391
  Gene Symbol: COA1
  Gene Name: cytochrome c oxidase assembly factor 1 homolog
  Uniprot ID: Q9GZY4
  ENST ID: ENST00000223336
  CDS Start-End: 152-592
aagtctctactgctccccgctggcgcgcaggaccgcgggcatttacccgtgctttcccaagcctggaagaactcgtcatgctctttgtagcgtggtgcttctgttgctcacaggacaacttgcctttgatgattttcaagagagttgtgctatgatgtggcaaaagtatgcaggaagcaggcggtcaatgcctctgggagcaaggatccttttccacggtgtgttctatgccgggggctttgccattgtgtattacctcattcaaaagtttcattccagggctttatattacaagttggcagtggagcagctgcagagccatcccgaggcacaggaagctctgggccctcctctcaacatccattatctcaagctcatcgacagggaaaacttcgtggacattgttgatgccaagttgaagattcctgtctctggatccaaatcagagggccttctctacgtccactcatccagaggtggcccctttcagaggtggcaccttgacgaggtctttttagagctcaaggatggtcagcagattcctgtgttcaagctcagtggggaaaacggtgatgaagtgaaaaaggagtagagacgacccagaagacccagcttgcttctagtccatccttccctcatctctaccatatggccactggggtggtggcccatctcagtgacagacactcctgcaacccagttttccagccaccagtgggatgatggtatgtgccagcacatggtaattttggtgtaattctaacttgggcacaacaaatgctatttgtcatttttaaactgaatccgaaagaaactcctattataaatttaagataatgtaatgtatttgaaagtgctttgtataaaaaagcacatgataaaaggaatcagaattaataaaatgtttgttgatctttgctagttctc

SEQ ID NO: 124227 - DNA, 1085 bp, Homo sapiens
  Payload ID: 4391
  Gene Symbol: COA1
  Gene Name: cytochrome c oxidase assembly factor 1 homolog
  Uniprot ID: Q9GZY4
  ENST ID: ENST00000310564
  CDS Start-End: 320-760
tttcccaagcctggaagaactcgtcatgctctttgtagcgtggtgcttctgttgctcacaggatgtttgccacacgagtcactcgagagaatctctgagtcctggcgagggctttctgaggcttcgtgtgttagcagctgttgtcttccaactcagcggcaggtttgcctttccccacggacactctggaccttgtagctcctcaagcttccctgtctattgagcagataggaagccgtgtcaaatatgtggcaccttgaggaaatgcctagtgaatgacagacaacttgcctttgatgattttcaagagagttgtgctatgatgtggcaaaagtatgcaggaagcaggcggtcaatgcctctgggagcaaggatccttttccacggtgtgttctatgccgggggctttgccattgtgtattacctcattcaaaagtttcattccagggctttatattacaagttggcagtggagcagctgcagagccatcccgaggcacaggaagctctgggccctcctctcaacatccattatctcaagctcatcgacagggaaaacttcgtggacattgttgatgccaagttgaagattcctgtctctggatccaaatcagagggccttctctacgtccactcatccagaggtggcccctttcagaggtggcaccttgacgaggtctttttagagctcaaggatggtcagcagattcctgtgttcaagctcagtggggaaaacggtgatgaagtgaaaaaggagtagagacgacccagaagacccagcttgcttctagtccatccttccctcatctctaccatatggccactggggtggtggcccatctcagtgacagacactcctgcaacccagttttccagccaccagtgggatgatggtatgtgccagcacatggtaattttggtgtaattctaacttgggcacaacaaatgctatttgtcatttttaaactgaatccgaaagaaactcctattataaatttaagataatgtaatgtatttgaaagtgctttgtataaaaaagcacatgataaaaggaatcagaattaataaaatgtttgttgatcttt

SEQ ID NO: 124228 - DNA, 2448 bp, Homo sapiens
  Payload ID: 4391
  Gene Symbol: COA1
  Gene Name: cytochrome c oxidase assembly factor 1 homolog
  Uniprot ID: Q9GZY4
  ENST ID: ENST00000395879
  CDS Start-End: 1683-2123
acccttttgcggcacacttgctaccttggtcttagctctgggctttggtgtcctctggcagtcctgctgcattgccttctctcccccatctgcccacccctgtcccagagagatttttctgtagcccctcatctgcagagtccgacagctcagggtcgagggtctttcttagcagtaatcacccactatgctctcacccctccatttctggacatgcttcctgtggcttctctcctgcgctttacacttcagcagttcttgtttctgctcactctgcctttgtttgtcatttcctggatttgaagctgttctgctcttttcacctttctcttctcaaggtaaacttcctctgtgaaacctccgctgatgccctgcagcaaggttgaccacttcctgagtgttacttcctctcttggtgcatatgtctggttgcactaaccaggctgctgctagcccaaaggcacctttgtgcaaattagaaaaagacaaccatccccatcccttcttcaagatactttatagtacttccaactgttggcaaactgtcttaataaagatacaaatctttgatttctctaatgtgcatggtgccctacaagggttgtgcagtgcatagccgtgcagttgcatgtgatagatctatgttataattatttgtttaattgtctgtattcccctcaggaccaaggaaaattccttatatcttgatactgtttttatattcttactgtctgaccagatcagaccctcagtaaccgtttgctaaacaaaagaaggaatgaaggtacaaatatgtatccaccttgtctggaaaaatagcaggaaaggcatgcctgccaaggacttttacactgaacagtaagaatatattttagctcagagacactgtttgttttcacatttcaatattgctttaattagatatcttaaagctcgtgtaccacagtggttgaaagagcagatgctggagccagactgcatgaatttgaatcccagttctaccacttattcacttattagtgcacctttgggcatgttacttaacctttctgtgcctcagtttactcatctgcaaaatgagcgtgatgataatagttcctacttcaaagggttgtgagaattaaatgaattatataaagtgcttagaatagtacaagacacataatagtcagagacagaagtattaggtattatcaatattgttaaagtccatgtataagtttactgtactattgtttctttttaactctgaagtgctgttttcactctgtcacgtacagcttttattgctagcatcttgcttctgcaggtccagcctcctgttgattggccctgtgtttgtgctgtggtcaaagcacttgctgtctgcggttctcccttgtgcacaccggttctttggttgctgtaacaaaaactacataggacacagacaggaaacccgcaggctttgttttttcttcctaatttggcagcagaagggggaaaaaccagggcctttcacagacaaggcttgttttagagtttaattttaacttcttgttcgtgttctaaagcttgggttggtaataaatcttggctgtatgagactagagagaactgggctttaaaaatatgattttaatgtaaaatcttttctaattgcaggacaacttgcctttgatgattttcaagagagttgtgctatgatgtggcaaaagtatgcaggaagcaggcggtcaatgcctctgggagcaaggatccttttccacggtgtgttctatgccgggggctttgccattgtgtattacctcattcaaaagtttcattccagggctttatattacaagttggcagtggagcagctgcagagccatcccgaggcacaggaagctctgggccctcctctcaacatccattatctcaagctcatcgacagggaaaacttcgtggacattgttgatgccaagttgaagattcctgtctctggatccaaatcagagggccttctctacgtccactcatccagaggtggcccctttcagaggtggcaccttgacgaggtctttttagagctcaaggatggtcagcagattcctgtgttcaagctcagtggggaaaacggtgatgaagtgaaaaaggagtagagacgacccagaagacccagcttgcttctagtccatccttccctcatctctaccatatggccactggggtggtggcccatctcagtgacagacactcctgcaacccagttttccagccaccagtgggatgatggtatgtgccagcacatggtaattttggtgtaattctaacttgggcacaacaaatgctatttgtcatttttaaactgaatccgaaagaaactcctattataaatttaagataatgtaatgtatttgaaagtgctttgtataaaaaagcacatgataaaaggaatcagaattaataaaatgtttgttgatcttt

SEQ ID NO: 124229 - DNA, 406 bp, Homo sapiens
  Payload ID: 4391
  Gene Symbol: COA1
  Gene Name: cytochrome c oxidase assembly factor 1 homolog
  ENST ID: ENST00000457939
  CDS Start-End: 108-299
acccgtgctttcccaagcctggaagaactcgtcatgctctttgtagcgtggtgcttctgttgctcacaggacaacttgcctttgatgattttcaagagagttgtgctatgatgtggcaaaagtatgcaggaagcaggcggtcaatgcctctgggagcaaggatccttttccacggtgtgttctatgccgggggctttgccattgtgtattacctcattcaaagtaagtatcctgctagccgcctgcggcctgacctcctcctagcctgctcctgctcctccatcagaggaaatacttgagatgctttgtttagattagagaaaggaggagagggtgattttaaaggctagtccaccatttcgttggctatagcttcctctgtatcctgtaatctcagtttttccag

SEQ ID NO: 124230 - DNA, 3223 bp, Homo sapiens
  Payload ID: 4391
  Gene Symbol: COA1
  Gene Name: cytochrome c oxidase assembly factor 1 homolog
  Uniprot ID: Q9GZY4
  ENST ID: ENST00000438444
  CDS Start-End: 393-833
cgaaacccttcccggcgcgagtccgagcgtctgagaagcagaagccacacgtcccggcgacctaagttctggatcagccggccggaggacccgtgttagcatttacaatccgaggtgagctgaagcctccggttgtcccggttcgacgctctagccctgcgagcagccgacgccggaagtctctactgctccccgctggcgcgcaggaccgcgggcatttacccgtgctttcccaagcctggaagaactcgtcatgctctttgtagcgtggtgcttctgttgctcacagaggtgcctgcttccccttctgccatgattggaagtttcctgaggcctccccagccatgtggaactgacaacttgcctttgatgattttcaagagagttgtgctatgatgtggcaaaagtatgcaggaagcaggcggtcaatgcctctgggagcaaggatccttttccacggtgtgttctatgccgggggctttgccattgtgtattacctcattcaaaagtttcattccagggctttatattacaagttggcagtggagcagctgcagagccatcccgaggcacaggaagctctgggccctcctctcaacatccattatctcaagctcatcgacagggaaaacttcgtggacattgttgatgccaagttgaagattcctgtctctggatccaaatcagagggccttctctacgtccactcatccagaggtggcccctttcagaggtggcaccttgacgaggtctttttagagctcaaggatggtcagcagattcctgtgttcaagctcagtggggaaaacggtgatgaagtgaaaaaggagtagagacgacccagaagacccagcttgcttctagtccatccttccctcatctctaccatatggccactggggtggtggcccatctcagtgacagacactcctgcaacccagttttccagccaccagtgggatgatggcctccctattccctgagacacaacagtattgaaattgggccaattaataaccccacagtggcctctcactaaatgtgagaggtgaggaagctgcaggagaaaatttgaagctagcagtgttcatgagatgtaagtaaagaagccatctccataaaagtacaacgtgacgcagcaagtgctgatggagaagctgtagaagttacacagaagatctagcttggaccatcgatgaaagtggctacactaaacaacagattttaaatgtagataaaacagcattttattggaaaaagatgccatctaggactttcatagttagaaaaactcaatgcctggcttcaaaggacaagctgactcttgtcaggggctagtgcagctgtgactttcagttaaagccaatgctcattgactattctgaaaatcccagggcccttaagatatgctgtataaacgcaacaacaaagcctggatgacgttgggtctgtttacagcctggtctactgagtaagcccactgttgagacctagtgctcagaaaaaatagatttctttcaaaatatggctgggtgcagtggctcacaccggtaatcccagcactttgggaggctggggcgggtggattgcttgatgccaggagttcaagaccagcctgggcaacatggtgaaaccctgtctcaaaaaacaaatccaaaaaaccaaaatattgctactcattaacaatgcacctggttacccaagagctctgatggagatgtacaaggagatgaatactgttttcatgcctgctaacacagtatccattctgctgctgatagatcaagaagtacttttgactttcaaaacttgttatttaagaaatacattttgtggtttctctgatggttctgggcagtcagttcaaaaccttctggaaaggattcaccattctagatgccatcaagagcattcaattcacgggaggaggtcaaaatatcaacattaattggaatttggaagaaatagattccaatcctcatggaggacttggagggtttcaagacttcagaggaggaaggaactgtagatgggctgaaaatagcaagagaactagaagtggaggggcctagagatgtgaccgaattgctgtaacctcaggatcaaacttgtatggatgagaagttccttctcatggacgagcaaagaaggtgatttcttgaaatggaatctactcctggtgaagatgctatgaacattgttgaaatgacaaaagatttagaatattccataaacttagctgtggccagggtttgagaggattgactcctaattttgaagttctactgtgggtaaatgctgtcaaacagcattgcatgccacagaggaatctctcatgaaagagttaataaatgcagcaaacttcactgttgtcttactttaagaaactgccacagtcactgcaggcttcagcaacttatcttttcctaccctcctctcgcatttaaaagtacttttaaattaatgtatgtacattatttttaggcataacactgctgctcatttaaaaaaactacagtatgaaccatgttatatgcagtggaaaggcaaaaaattcatgtgacttacttgcttgtatttggtttattgcagtggtctggaactgaaagtgatgcgtatttctgagttatgcctgtatttaagaagctgagtgaaacccaaagaagtccatgataggacagacttctgaaaactaaagacagaaaaaagcttgaaagcatcaagaaagaagtgaaatcttagctagagggaaaagtaactcagatgacagtggatttctctctggaaaccatggaggccagaaggaagtgagacaagttcttttagtgccagaagaactatcaacttgtggctgggcacggtggctcacacctgtaatcccagcactttgggagaccaaggtgggcagatcacttgaagtcaggagtttgagaccagcctggccaacatggcaaaaccctgtctctactaaaaatacaaaaattagccaggcatggtggcacatgcctgtaatctcagctacttgggaggctgaggcacgagaattacttgaacccgggaggtggaggttgcagtgagccaagatcctgccactgcactccagcctgggcaacagagcaagactgcctcaaaacaaaactctgtcaactccaaattcctatttggtgaaatgatccttcaggattgatggggtaataaaaacattctcggttgatagaaaact

SEQ ID NO: 124231 - DNA, 547 bp, Homo sapiens
  Payload ID: 4391
  Gene Symbol: COA1
  Gene Name: cytochrome c oxidase assembly factor 1 homolog
  ENST ID: ENST00000420441
  CDS Start-End: 121-225
accgcgggcatttacccgtgctttcccaagcctggaagaactcgtcatgctctttgtagcgtggtgcttctgttgctcacaggacaacttgcctttgatgattttcaagagagttgtgctatgatgtggcaaaaggtaatggaatgttccagggccaagttccccactagaacctgccagggtattctcgagttagacaatagaagaaagtcactccctgaatagttatgggcttctcctggtctttagggttcacttgtgctttaacttcacaggagggatgggcattttctgcattgtttcccactctgtctttctctcgtgtctcatgctggcgttggaagctgtaacactctgggaacctctccataacccagtctggctgcctcaccctgttgagctctcttcaaattaagcaagatctgactaatacattcttcagagatgctctgaccgttttcattatgagaactaaatgacttttcccagatcacattactgtaattaactttacactcattttgatactcttacatattataagagt

SEQ ID NO: 124232 - DNA, 1599 bp, Homo sapiens
  Payload ID: 4391
  Gene Symbol: COA1
  Gene Name: cytochrome c oxidase assembly factor 1 homolog
  ENST ID: ENST00000448704
  CDS Start-End: 213-317
atttacccgtgctttcccaagcctggaagaactcgtcatgctctttgtagcgtggtgcttctgttgctcacaggatgtttgccacacgagtcactcgagagaatctctgagtcctggcgagggctttctgaggcttcgtgtgttagcagctgttgtcttccaactcagcggcaggacaacttgcctttgatgattttcaagagagttgtgctatgatgtggcaaaaggtaatggaatgttccagggccaagttccccactagaacctgccagggtattctcgagttagacaatagaagaaagtcactccctgaatagttatgggcttctcctggtctttagggttcacttgtgctttaacttcacaggagggatgggcattttctgcattgtttcccactctgtctttctctcgtgtctcatgctggcgttggaagctgtaacactctgggaacctctccataacccagtctggctgcctcaccctgttgagctctcttcaaattaagcaagatctgactaatacattcttcagagatgctctgaccgttttcattatgagaactaaatgacttttcccagatcacattactgtaattaactttacactcattttgatactcttacatattataagagtggatggatggtatgctgtatttaccgagctggcatccctccatctgttcattcagcctgagtcataaccagagtttcctcatcccaagggtggtgcatttttcaaaatatgaaaggagccagtgacagctccagcccattcgcaggcttacaggaccagccattgccacaaaggataagcttcctgtttaccagttggcctgagacaaagtggttgtgcttcctggccatgcggggcttggcacacagtctgggctgtgtctgtcaggatggtgggctgaatgctcgctctgtgctgggctggctgggggtggcagggcccccacagcatgggtcctggacatgggccactctcgagagggcaccctcaggagggcactcagtttggcttcagaaccaaccctggcatttggaaaggaagcaaatgagggagggcggtctggcctcctttctggcttccttaatgcttctttcctttaggggtccaagccgggcaaatccccttggcacaaaactgggaatcctacaataaatttgtatcttttgtttttaagtatgcaggaagcaggcggtcaatgcctctgggagcaaggatccttttccacggtgtgttctatgccgggggctttgccattgtgtattacctcattcaaagtaagtatcctgctagccgcctgcggcctgacctcctcctagcctgctcctgctcctccatcagaggaaatacttgagatgctttgtttagattagagaaaggaggagagggtgattttaaaggctagtccaccatttcgttggctatagcttcctctgtatcctgtaatctcagtttttccaggagcaacgagtacaaataaaaggaccaggactaatatgcataagaagcccagcaaagcacgatgggctttcagtccagtgcacacacaggggctccatcaagattctgagattatataaagaa

SEQ ID NO: 124233 - DNA, 1737 bp, Homo sapiens
  Payload ID: 4391
  Gene Symbol: COA1
  Gene Name: cytochrome c oxidase assembly factor 1 homolog
  Uniprot ID: Q9GZY4
  ENST ID: ENST00000415076
  CDS Start-End: 124-564
aggaccgcgggcatttacccgtgctttcccaagcctggaagaactcgtcatgctctttgtagcgtggtgcttctgttgctcacaggacaacttgcctttgatgattttcaagagagttgtgctatgatgtggcaaaagtatgcaggaagcaggcggtcaatgcctctgggagcaaggatccttttccacggtgtgttctatgccgggggctttgccattgtgtattacctcattcaaaagtttcattccagggctttatattacaagttggcagtggagcagctgcagagccatcccgaggcacaggaagctctgggccctcctctcaacatccattatctcaagctcatcgacagggaaaacttcgtggacattgttgatgccaagttgaagattcctgtctctggatccaaatcagagggccttctctacgtccactcatccagaggtggcccctttcagaggtggcaccttgacgaggtctttttagagctcaaggatggtcagcagattcctgtgttcaagctcagtggggaaaacggtgatgaagtgaaaaaggagtagagacgacccagaagacccagcttgcttctagtccatccttccctcatctctaccatatggccactggggtggtggcccatctcagtgacagacactcctgcaacccagttttccagccaccagtgggatgatgaaacacaactggttttgagaatccatcccttcttcactcagtccacgtaaaggttaggatggtagaaagtgttatacctcttcctccagagttggagcctatgacactgatgacactggcatggaaagccaaagccctacaccaaccagcacacttactggttccaaattgatctacgctggtgtaatcagagtgaatctcagaactttggacagagctgtgagcagagactgactttcctgctgtctccaggtagctgcaaggctgaacagcagcacctactttattaccatcttactgtcattcaaagaaggcagagctgaatgctggagaaaaactgagtactagcaacagtttttgaaccctgaatactgtcataactgaagctagaattatccctggacttgtttgccactaaaatttccttgttttgcttaccctggtttcagctggcaccctgatcacttgaaaggaacataactgatatactgtcctttgtttttctttccttcctcttctccgcctttgatgattttaaattagaaatctacctgcctctaatctctttaattttctcatttatttactgctgcctattttccaaaacactgcttctcgaatattcctggctcaaaaatcatctatgtcttcatgacatatgaaacccctagaatccagcctttccccagcttttaatatctcctaattgatttctcaattccagtgaaatgattccatttatttttttcccaaacacatcacaaatattcctaactcttgtgagcaattttctctcattcttctcaacttatctaaatcctaacttttcaaaagatctagctcaagttctgtcttatcatattttgagttcctttctttggcattgtattattttgtatctttccatgtacacatgtgtgcattatctccctgataaaactaactggctagaggataggagtaaagactcaattctaatatccttgttacctaataatacacaaacgtgaaacatgtttgaataaatcactgttaaatat

SEQ ID NO: 124234 - DNA, 524 bp, Homo sapiens
  Payload ID: 4391
  Gene Symbol: COA1
  Gene Name: cytochrome c oxidase assembly factor 1 homolog
  ENST ID: ENST00000415798
  CDS Start-End: 184-524
gctggcgcgcaggaccgcgggcatttacccgtgctttcccaagcctggaagaactcgtcatgctctttgtagcgtggtgcttctgttgctcacagagtctcgctctggccagagattttctaaataatggtcaggaatctgcattgacaacttgcctttgatgattttcaagagagttgtgctatgatgtggcaaaagtatgcaggaagcaggcggtcaatgcctctgggagcaaggatccttttccacggtgtgttctatgccgggggctttgccattgtgtattacctcattcaaaagtttcattccagggctttatattacaagttggcagtggagcagctgcagagccatcccgaggcacaggaagctctgggccctcctctcaacatccattatctcaagctcatcgacagggaaaacttcgtggacattgttgatgccaagttgaagattcctgtctctggatccaaatcagagggccttctctacgtccactcatccagaggtggcccctttcagag

SEQ ID NO: 124235 - DNA, 1372 bp, Homo sapiens
  Payload ID: 4391
  Gene Symbol: COA1
  Gene Name: cytochrome c oxidase assembly factor 1 homolog
  ENST ID: ENST00000418140
  CDS Start-End: 195-386
aagcctggaagaactcgtcatgctctttgtagcgtggtgcttctgttgctcacaggatgtttgccacacgagtcactcgagagaatctctgagtcctggcgagggctttctgaggcttcgtgtgttagcagctgttgtcttccaactcagcggcaggacaacttgcctttgatgattttcaagagagttgtgctatgatgtggcaaaagtatgcaggaagcaggcggtcaatgcctctgggagcaaggatccttttccacggtgtgttctatgccgggggctttgccattgtgtattacctcattcaaagtaagtatcctgctagccgcctgcggcctgacctcctcctagcctgctcctgctcctccatcagaggaaatacttgagatgctttgtttagattagagaaaggaggagagggtgattttaaaggctagtccaccatttcgttggctatagcttcctctgtatcctgtaatctcagtttttccaggagcaacgagtacaaataaaaggaccaggactaatatgcataagaagcccagcaaagcacgatgggctttcagtccagtgcacacacaggggctccatcaagattctgagattatataaagaagggacagagggaaggggaataccagatggttcacaggtggggaaagctgtggctgtgcgtccagcattgtcagactttttttgcactttcattctctgctgttgatttaatggaggagggaccatgagcaaggaactctggcaggggcagaaaataaaagcagagaccacgatggcaaaatcccgacagatgccgcttccagccccactgcactcaaatttgaatttgtaaagacaggccacaattactgtcagcagccaggacatttaaggtcattttaatgctactggtggcaaagcggcagcagttttttctagactggctttttttaggctcctttatccccacccagcttggctcgtcatccactctgcaacattttcacttcttcccaggatgtgagtgtcaccagcagacaagcagacaggctccagtgtcctctccagcctttctgcaccatcctgcagagttggtggagttgcagagtctggagggggcctgagatgagcgttcccaggaatgattcagactgaataatttggcctcctcttccctctgccaaagggacaggggcaggacatgagagggatgggtgcacttttgggtcagggttcagctttctggtgtgacagcctttctcccttaggaggctgctaagtcggtgagacctgggcactgcagccgactgcctgggttgaatggttgaatctcggctccagctcttgaccagctatgtggccttatgggggagtccgt

SEQ ID NO: 124236 - DNA, 585 bp, Homo sapiens
  Payload ID: 4391
  Gene Symbol: COA1
  Gene Name: cytochrome c oxidase assembly factor 1 homolog
  ENST ID: ENST00000451651
  CDS Start-End: 186-311
agaactcgtcatgctctttgtagcgtggtgcttctgttgctcacaggatgtttgccacacgagtcactcgagagaatctctgagtcctggcgagggctttctgaggcttcgtgtgttagcagctgttgtcttccaactcagcggcaggacaacttgcctttgatgattttcaagagagttgtgctatgatgtggcaaaagtatgcaggaagcaggcggtcaatgcctctgggagcaaggatccttttccacggtgtgttctatgccgggggctttgccattgtgtattacctcattcaaagaggctgctaagtcggtgagacctgggcactgcagccgactgcctgggttgaatggttgaatctcggctccagctcttgaccagctatgtggccttatgggggagtccgtcacctttctgggcattagttaccttattggtgtgatgtgtggtaatgttagtgcttgtgtatgaggtgagaattgaatctcacaacacaagagctgttgaacattgtgagatgtgtggaatattgagaacagtgcctagccatagaaatcactcaataaagattagctgtctgga

SEQ ID NO: 124237 - DNA, 1177 bp, Homo sapiens
  Payload ID: 4391
  Gene Symbol: COA1
  Gene Name: cytochrome c oxidase assembly factor 1 homolog
  Uniprot ID: Q9GZY4
  ENST ID: ENST00000446564
  CDS Start-End: 195-635
aagcctggaagaactcgtcatgctctttgtagcgtggtgcttctgttgctcacaggatgtttgccacacgagtcactcgagagaatctctgagtcctggcgagggctttctgaggcttcgtgtgttagcagctgttgtcttccaactcagcggcaggacaacttgcctttgatgattttcaagagagttgtgctatgatgtggcaaaagtatgcaggaagcaggcggtcaatgcctctgggagcaaggatccttttccacggtgtgttctatgccgggggctttgccattgtgtattacctcattcaaaagtttcattccagggctttatattacaagttggcagtggagcagctgcagagccatcccgaggcacaggaagctctgggccctcctctcaacatccattatctcaagctcatcgacagggaaaacttcgtggacattgttgatgccaagttgaagattcctgtctctggatccaaatcagagggccttctctacgtccactcatccagaggtggcccctttcagaggtggcaccttgacgaggtctttttagagctcaaggatggtcagcagattcctgtgttcaagctcagtggggaaaacggtgatgaagtgaaaaaggagtagagacgacccagaagacccagcttgcttctagtccatccttccctcatctctaccatatggccactggggtggtggcccatctcagtgacagacactcctgcaacccagttttccagccaccagtgggatgatgttgcacctggacttgatatgaaagtaaccatcagaaaatcaacagagatcttaaacttgcctaccacagacacctgcaggaatatactaagaatcatcatagtggacctttattgtctcctgagcacccattctttgttctttcagaaacacaactggttttgagaatccatcccttcttcactcagtccacgtaaaggttaggatggtagaaagtgttatacctcttcctccagagttggagcctatgacactgatgacactggcatggaaagccaaagccctacaccaaccagcacacttactggttccaaattgatctacgctggtgtaatcagagtgaatctcagaactttggacagagctgtgagcagagactgactttcctgctgtctccaggtagctgcaag

SEQ ID NO: 124238 - DNA, 1520 bp, Homo sapiens
  Payload ID: 4391
  Gene Symbol: COA1
  Gene Name: cytochrome c oxidase assembly factor 1 homolog
  Uniprot ID: Q9GZY4
  ENST ID: ENST00000446330
  CDS Start-End: 124-564
aggaccgcgggcatttacccgtgctttcccaagcctggaagaactcgtcatgctctttgtagcgtggtgcttctgttgctcacaggacaacttgcctttgatgattttcaagagagttgtgctatgatgtggcaaaagtatgcaggaagcaggcggtcaatgcctctgggagcaaggatccttttccacggtgtgttctatgccgggggctttgccattgtgtattacctcattcaaaagtttcattccagggctttatattacaagttggcagtggagcagctgcagagccatcccgaggcacaggaagctctgggccctcctctcaacatccattatctcaagctcatcgacagggaaaacttcgtggacattgttgatgccaagttgaagattcctgtctctggatccaaatcagagggccttctctacgtccactcatccagaggtggcccctttcagaggtggcaccttgacgaggtctttttagagctcaaggatggtcagcagattcctgtgttcaagctcagtggggaaaacggtgatgaagtgaaaaaggagtagagacgacccagaagacccagcttgcttctagtccatccttccctcatctctaccatatggccactggggtggtggcccatctcagtgacagacactcctgcaacccagttttccagccaccagtgggatgatgttgcacctggacttgatatgaaagtaaccatcagaaaatcaacagagatcttaaacttgcctaccacagacacctgcaggaatatactaagaatcatcatagtggacctttattgtctcctgagcacccattctttgttctttcagaaacacaactggttttgagaatccatcccttcttcactcagtccacgtaaaggttaggatggtagaaagtgttatacctcttcctccagagttggagcctatgacactgatgacactggcatggaaagccaaagccctacaccaaccagcacacttactggttccaaattgatctacgctggtgtaatcagagtgaatctcagaactttggacagagctgtgagcagagactgactttcctgctgtctccaggtagctgcaaggctgaacagcagcacctactttattaccatcttactgtcattcaaagaaggcagagctgaatgctggagaaaaactgagtactagcaacagtttttgaaccctgaatactgtcataactgaagctagaattatccctggacttgtttgccactaaaatttccttgttttgcttaccctggtttcagctggcaccctgatcacttgaaaggaacataactgatatactgtcctttgtttttctttccttcctcttctccgcctttgatgattttaaattagaaatctacctgcctctaatctctttaattttctcatttatttactgctgcctattttccaaaacactgcttctcgaatattcctggctcaaaaatcatctatgtcttcatgacatatgaaacccctagaatcca

SEQ ID NO: 124239 - DNA, 720 bp, Homo sapiens
  Payload ID: 4391
  Gene Symbol: COA1
  Gene Name: cytochrome c oxidase assembly factor 1 homolog
  ENST ID: ENST00000431651
  CDS Start-End: 457-720
gggcatttacccgtgctttcccaagcctggaagaactcgtcatgctctttgtagcgtggtgcttctgttgctcacagaggtgcctgcttccccttctgccatgattggaagtttcctgaggcctccccagccatgtggaactagtggttcagatttactttcccggagtagtcacaggactgggcagtgaaaacaggttgacttggatcagctgatggttcttttgtcccatggatgttctgctggtactgcagtcatctggtagcccacttaaactagaatgtccatgacagctcattcacatggctagtgccttggatgtttgccacacgagtcactcgagagaatctctgagtcctggcgagggctttctgaggcttcgtgtgttagcagctgttgtcttccaactcagcggcaggacaacttgcctttgatgattttcaagagagttgtgctatgatgtggcaaaagtatgcaggaagcaggcggtcaatgcctctgggagcaaggatccttttccacggtgtgttctatgccgggggctttgccattgtgtattacctcattcaaaagtttcattccagggctttatattacaagttggcagtggagcagctgcagagccatcccgaggcacaggaagctctgggccctcctctcaacatccattatctcaagctcatcgacagggaaaacttcgtggacattgttgatgccaag

SEQ ID NO: 124240 - DNA, 771 bp, Homo sapiens
  Payload ID: 4392
  Gene Symbol: COA3
  Gene Name: cytochrome c oxidase assembly factor 3
  Uniprot ID: Q9Y2R0
  ENST ID: ENST00000328434
  CDS Start-End: 24-344
accgcgaagggaggagtggcaacatggcgtcttcgggagctggtgaccctctggattctaagcgtggagaggccccgttcgctcagcgtatcgacccgactcgggagaagctgacacccgagcaactgcattccatgcggcaggcggagcttgcccagtggcagaaggtcctaccacggcggcgaacccggaacatcgtgaccggcctaggcatcggggccctggtgttggctatttatggttacaccttctactcgatttcccaggagcgtttcctagatgagctagaagacgaggccaaagctgcccgagcccgagctctggcaagggcgtcagggtcctaatctggatgggtattgatcatgtccaacctgctggagccccttcacatggtggatgatgccccatgaccctgtagaaattgaatcctgctcacaacattgttggccttcttactaaccttggaccgtgattgagcccaagaaaccagggacttacgcatttggccaatgtcaaaagaacagaactttgcccactgcacacttgctgtgtacaatgactgagccctttcttgtagtttgtttccttgtttgagaggtgtgcatgcgaccgtggcttttcccaaagtttctgactttgtggtttacccccttcaccttccagggacgcagttgttacgaggttagacgtggcagctctgtgcagtgtttgagcctacagtgggatacatagggtcaaattgagaataataaactgagtcattctcctgga

SEQ ID NO: 124241 - DNA, 1374 bp, Homo sapiens
  Payload ID: 4392
  Gene Symbol: COA3
  Gene Name: cytochrome c oxidase assembly factor 3
  ENST ID: ENST00000586680
  CDS Start-End: 10-225
agtggcaacatggcgtcttcgggagctggtgaccctctggattctaagcgtggagaggccccgttcgctcagcgtatcgacccgactcgggagaagctgacacccgagcaactgcattccatgcggcaggcggagcttgcccagtggcagaaggtcctaccacggcggcgaacccggaacatcgtgaccggcctaggcatcggggccctggtgttggctatttaaagcatcagattctgagaacacaagctccatggtgggccctggtgtgggggagatacatggcttctgttctgaattcactggagggaaaagaaaaagtgatgaagaaacctccaaggtgggaggaaggcgaagctgcagccagtgtctgtagtgtttccacctctgacaagtgcctgaggatgcacggagggcatgaaagggctagccacacaccttgctctcccaggttctcctctcactcctccatcctcccgagactcacttctgccgaagactctgcagctcagcccagaactcctcatcttccccactgctttctgactcctcgctgctcaaacacaggctgctgtaggagtagttcatccacactgggctgggatggctcaggggttgggggctgcccccaacttggggttccttcccatcatctccttcctcctcaactccagcccccagaccctcagctgcacggtcgctctcagccagagcttccctggtctctggcccgcctccagcactgtcctctgtatctgagctctctgaagtgagctgaggggttgaaggttttggagaaccagagagagtgggggatgttggctgcaagggaagaggctcagccggttccttggatgaagtcacttggaaacgcccaacaagctgcggctttccctctgtagggcgacgaggaagaaggcatgaggaaaggagagcagtgacaggacagacagtgagtagggataatggcaggggaaggtcagtggtcagaggccttaccttcagagatgggcgccagcctggcttcccctgggaggggccgagcaggaggtggtgaggcctagaaagtggggggccatgagaagggaagagtgcagagtggagtctccctaatcatccctcttggttttctactcacctcactctccacctcagctgtgtggggtgaagggctttcctggccaccaggagcaacgggagggggaaggggcaggctagggaggggactaggaggggctggaggagactgggaaaggagcccaggtgagggggacagcagggactgggccacagtcatcacagccagtgagaaggcactagccagagaaaggagaggggctgctgtggtggaggggaaggaagaagtggaggggc

SEQ ID NO: 124242 - DNA, 960 bp, Homo sapiens
  Payload ID: 4393
  Gene Symbol: COA4
  Gene Name: cytochrome c oxidase assembly factor 4 homolog
  Uniprot ID: Q9NYJ1
  ENST ID: ENST00000355693
  CDS Start-End: 249-512
ccccttcccggaagtgagtccccgagaagcgtgcggcgaggacagaggtgggctcaacaccaagaggccaccaatgaaaacgtgactttttcacattccccgccccttccgtgtgcacgctccccacgaggggctggttcctgaaaggatgtacagaggatccccaaccgcctgcgaaacccaagccgccgcgtaggagcgtgcgttcgggccctcttctcccacctgttcgactccccatccccaggatgtcaacctcagtccctcaaggccatacctggacccaacgggtgaagaaagacgatgaggaggaggacccgctggaccagctgatctcccgctctggctgtgctgcctcccactttgcagtgcaggagtgcatggcccagcaccaggactggcggcaatgccagccacaggtgcaggcgttcaaggattgcatgagtgaacagcaggcgaggcggcaagaggagctgcagaggaggcaagaacaagccggtgcccaccactgagaccccaaaccacctatccccagtagatggccctgccaagaccagcacccagcaagattatagaggaagaaatcctaaatgctggtgtgggaggtctaaaacatggggagagtttttggatctggagttgagagccatgggtttggacatgactggcacaaacagctgtcatatgttcatggtcagatgtcatacattctcagctgtcttgttccaccagtatttaccaggaaaacaaagaatgtgttaagggatgctcccccaccccacatcttaagtcagtgtgccaagtactgagatgattttagggacattttattttaaattaaatttacaatctaatggtaaattgattacctaattagtgcctttctctttcatcacttgttctggatgtttcaatcagtttagtggaaggaaaaataaatggggaaactttttattcaaa

SEQ ID NO: 124243 - DNA, 582 bp, Homo sapiens
  Payload ID: 4393
  Gene Symbol: COA4
  Gene Name: cytochrome c oxidase assembly factor 4 homolog
  Uniprot ID: Q9NYJ1
  ENST ID: ENST00000537289
  CDS Start-End: 201-464
aggatgtacagaggatccccaaccgcctgcgaaacccaagccgccgcgtaggagcgtgcgttcgggccctcttctcccacctgttcggccagcctccacgatccagctgccaaccatctagcctaccctgatctctgagcaggggtcgtcgtcattttactccagaggagactgaagccaaaagactccccatccccaggatgtcaacctcagtccctcaaggccatacctggacccaacgggtgaagaaagacgatgaggaggaggacccgctggaccagctgatctcccgctctggctgtgctgcctcccactttgcagtgcaggagtgcatggcccagcaccaggactggcggcaatgccagccacaggtgcaggcgttcaaggattgcatgagtgaacagcaggcgaggcggcaagaggagctgcagaggaggcaagaacaagccggtgcccaccactgagaccccaaaccacctatccccagtagatggccctgccaagaccagcacccagcaagattatagaggaagaaatcctaaatgctggtgtgggaggtctaaaacatggggagagtttttg

SEQ ID NO: 124244 - DNA, 1038 bp, Homo sapiens
  Payload ID: 4393
  Gene Symbol: COA4
  Gene Name: cytochrome c oxidase assembly factor 4 homolog
  Uniprot ID: Q9NYJ1
  ENST ID: ENST00000541455
  CDS Start-End: 395-685
cattttttttcttttttctttttttttgagatggagttttgctcttattgcccaggagtttgagaccatgctgagcaacatggaaaaaccttgtctctattaaagaatcaaaaaaattagctgagtggtgatgcacacctgtagtcccagctactctggccagggagggactgagggggaaggattgcttgatccctaaagatggaggctacagtgagcctgggcaacaaagcaagacaccctcaaaaaaaaaaaaaaaaaaacaagcatctgtcttcaagcttagagtctcccacgggagacagacacattaaacaggctaaatggtgcagtctggtcagtgctatttataatttaggaaccttacatattatatccctactctaacctgttaatgttctatagactccccatccccaggatgtcaacctcagtccctcaaggccatacctggacccaacgggtgaagaaagacgatgaggaggaggacccgctggaccagctgatctcccgctctggctgtgctgcctcccactttgcagtgcaggagtgcatggcccagcaccaggactggcggcaatgccagccacaggtgcaggcgttcaaggattgcatgagtgaacagcaggcgaggcggcaagaggagctgcagaggaggcaagaacaagccggtgcccaccactgagaccccaaaccacctatccccagtagatggccctgccaagaccagcacccagcaagattatagaggaagaaatcctaaatgctggtgtgggaggtctaaaacatggggagagtttttggatctggagttgagagccatgggtttggacatgactggcacaaacagctgtcatatgttcatggtcagatgtcatacattctcagctgtcttgttccaccagtatttaccaggaaaacaaagaatgtgttaagggatgctcccccaccccacatcttaagtcagtgtgccaagtactgagatgattttagggacattttattttaaattaaatttacaatctaatggtaaattga

SEQ ID NO: 124245 - DNA, 922 bp, Homo sapiens
  Payload ID: 4393
  Gene Symbol: COA4
  Gene Name: cytochrome c oxidase assembly factor 4 homolog
  Uniprot ID: Q9NYJ1
  ENST ID: ENST00000545127
  CDS Start-End: 213-476
ctcaaagttcaaagtcctcgatacgcctgaggcgcctcaggcctcgtggctgccagcatttttctgctttaagatcctttccatgacttccttgtttaggccagcctccacgatccagctgccaaccatctagcctaccctgatctctgagcaggggtcgtcgtcattttactccagaggagactgaagccaaaagactccccatccccaggatgtcaacctcagtccctcaaggccatacctggacccaacgggtgaagaaagacgatgaggaggaggacccgctggaccagctgatctcccgctctggctgtgctgcctcccactttgcagtgcaggagtgcatggcccagcaccaggactggcggcaatgccagccacaggtgcaggcgttcaaggattgcatgagtgaacagcaggcgaggcggcaagaggagctgcagaggaggcaagaacaagccggtgcccaccactgagaccccaaaccacctatccccagtagatggccctgccaagaccagcacccagcaagattatagaggaagaaatcctaaatgctggtgtgggaggtctaaaacatggggagagtttttggatctggagttgagagccatgggtttggacatgactggcacaaacagctgtcatatgttcatggtcagatgtcatacattctcagctgtcttgttccaccagtatttaccaggaaaacaaagaatgtgttaagggatgctcccccaccccacatcttaagtcagtgtgccaagtactgagatgattttagggacattttattttaaattaaatttacaatctaatggtaaattgattacctaattagtgcctttctctttcatcacttgttctggatgtttcaatcagtttagtggaaggaaaaataaatggggaaactttttattca

SEQ ID NO: 124246 - DNA, 1754 bp, Homo sapiens
  Payload ID: 4394
  Gene Symbol: COA5
  Gene Name: cytochrome c oxidase assembly factor 5
  Uniprot ID: Q86WW8
  ENST ID: ENST00000328709
  CDS Start-End: 88-312
tgagactggggcctcgctcgctcccgacccggttgcaagtgttgcggtgggagaaagtcgcgtccgcatcggaggggaagcgccgtcatgcctaagtattatgaggacaagccgcagggcggcgcgtgcgcgggcctgaaggaggacctgggcgcgtgtctgctgcagtcggactgtgtggtccaggaaggaaaatcacctcggcagtgtttgaaggaaggatactgcaactctttgaagtacgcattttttgagtgtaaaagatcagtgttggataacagggcaagattcagaggaagaaaaggatattgatgcattatgttgaagccaacatggaaaacaacaaatattttccctggtcattaacacaaagaagccaaaacaggaaacatactttttactacatctgtttggttggaccagatttcccctccgtggaacactgaagaaagtggatgagttgttttcgaatatgtataaagtaaatgattctcttgatccaagttatttttagaagaaaaacctaattgaacaggtatgggttgggagcataataaatgtgttttgagaattgttctaaagcacagaaaatggaaagactgttatttgcaaacttgactcttcaattgaattacccaattagtacaggccactgatttgactgacacagtcgataacatgcagcctatccagaaggtgtctgttgggaaagtttaggataaaactttttctttagttcagtcttttcctgtctagttctaaaatgaattgtgtttgattccttagagaagaaatacttcatttgtgctctgattcactgaagtaataacctcagcactttaatagcgtccacaggcatagctgatgctaggccccagattgtgttgcccaggctctttaccatcatcttcggactgtttttgtttcctggttacattttcagtctggcccgctctacataatgggccagtgtcagctccaagtccacatccttattatccatgattcaaaagggagagagagaacttcctttttcagggtccacaaatcaaatctataaaaggactctggtcttcccaggatcacctgcccttgcattggaccagtccctgtggaagaggggatgggggcctgtgatcttggccaggcctgggctatctatctgcactgtcattgctaactcctgtcagaatcacatggatgagtagtgggctgaatcccaaaaggaaaggggtttagagcaagtggaaacaacagatgttcactatagaaagcaagaatgaaaaccatgaagtggttgaagattagccttacagtaattttattctgatcacttaatacagtagagtcaaacaggaatccaagtttccaactttattatttttggcactgaagaattacaaagaactctagcgtctttatacctccgtggttcactggagttaaagcaatcggggcgttgtacagctcacttgagtttttaaaggttctactaaaaagtgagaattccacagcaatatgggtcattgttgcagaatatcacaaaggtctgttgtgtatactccttttcaccaggaaagggacaataatagtttttttcaatgtatatatatataagtgatctaactttttattaataaaagtaaacaactctaaaatgtatattataaagccctgtcatctttgttgagtaatagctttattgagctttatttggagaaatacacataccgtaaaattcacactgaaactta

SEQ ID NO: 124247 - DNA, 557 bp, Homo sapiens
  Payload ID: 4394
  Gene Symbol: COA5
  Gene Name: cytochrome c oxidase assembly factor 5
  ENST ID: ENST00000409997
  CDS Start-End: 111-332
gttgccgctggcttccggtcccctgagactggggcctcgctcgctcccgacccggttgcaagtgttgcggtgggagaaagtcgcgtccgcatcggaggggaagcgccgtcatgcctaagtattatgaggacaagccgcagggcggcgcgtgcgcgggcctgaaggaggacctgggcgcgtgtctgctgcagtcggactgtgtggtccaggaaggaaaatcacctcggcagtgtttgaaggaaggatactgcaactctttgaagtacgcattttttgagtgtaaaagatcagtgatggagtctcgctctgttgcccgggctggagtgcagtagtgtgatcttggctcgctgcaacctctgcgtcctgggttcaagtgattctcgtgcttcagcctcccgagtagctgggactacaggcagctgccaccatgcccagctaagttttatatttttagtagagatggggtttcgccatgttggccaggctggtctcaaactcctgatccacccacctctccctcccagagtgctgggattacaggcatgagccattaacac

SEQ ID NO: 124248 - DNA, 1013 bp, Homo sapiens
  Payload ID: 4395
  Gene Symbol: COA6
  Gene Name: cytochrome c oxidase assembly factor 6
  Uniprot ID: Q5JTJ3
  ENST ID: ENST00000366612
  CDS Start-End: 546-785
gtggggcgcgcgtggactatgggcccgggaggtcccttactgtccccgagccgcgggttcctcttgtgcaaaacggggtggcactccaatcgcctgcttggtgattgtggcccccacacacctgtttctacagcgcttaggttcgaacagtaaccctgtaaactaggcactgctgtccccgctttactggtgggaaacgggctcggagagaataaatgagctgccctaagcgactgggacagaaccacagttctcagccgggctttctgagcccacgctgccgccccagcagggatcaaatcacacagtgtgagataagcctcaagagcgggtggccttatgctgccactgagaactgattgggttcagttgcctcatcaaaatccctaagcatggttttgttttgtttttgtttttttttttttttttagttttaaaggaagaggagattgacggttttcctctttccttatcttctcttcagattacaaagttcattgttaatctcaaatattattttggccaacagcttcatcgcagtaggaatggcagccccatctatgaaggaaagacaggtctgctggggggcccgggatgagtactggaagtgtttagatgagaacttagaggatgcttctcaatgcaagaagttaagaagctctttcgaatcaagttgtccccaacagtggataaaatattttgataaaagaagagactacttaaaattcaaagaaaaatttgaagcaggacaatttgagccttcagaaacaactgcaaaatcctaggctgttcataaagattgaaagtattctttctggacattgaaaaagctccactgactatggaacagtaatagtttgaatcatagtgaacatcaatacttgttccctatatacgacacttgataattaagatgatcaagaaccagaagatctgtgaagaaatgaaataaaatggtatttagtaagaaatctctattttaagaaaaaaagtaaaacctgttataaacacat

SEQ ID NO: 124249 - DNA, 641 bp, Homo sapiens
  Payload ID: 4395
  Gene Symbol: COA6
  Gene Name: cytochrome c oxidase assembly factor 6
  Uniprot ID: Q5JTJ3
  ENST ID: ENST00000366613
  CDS Start-End: 37-414
gcttgctgatgggtccgggtggggcgcgcgtggactatgggcccgggaggtcccttactgtccccgagccgcgggttcctcttgtgcaaaacggggtggcactccaatcgcctgcttggtgattgtggcccccacacacctgtttctacagcgcttagcttcatcgcagtaggaatggcagccccatctatgaaggaaagacaggtctgctggggggcccgggatgagtactggaagtgtttagatgagaacttagaggatgcttctcaatgcaagaagttaagaagctctttcgaatcaagttgtccccaacagtggataaaatattttgataaaagaagagactacttaaaattcaaagaaaaatttgaagcaggacaatttgagccttcagaaacaactgcaaaatcctaggctgttcataaagattgaaagtattctttctggacattgaaaaagctccactgactatggaacagtaatagtttgaatcatagtgaacatcaatacttgttccctatatacgacacttgataattaagatgatcaagaaccagaagatctgtgaagaaatgaaataaaatggtatttagtaagaaatctctattttaagaaaaaaagtaaaacctgttataaacaca

SEQ ID NO: 124250 - DNA, 710 bp, Homo sapiens
  Payload ID: 4395
  Gene Symbol: COA6
  Gene Name: cytochrome c oxidase assembly factor 6
  ENST ID: ENST00000366615
  CDS Start-End: 12-479
atggaaagtaaatggtagctcggaagggtcaaaagagtccgcggtttcgccgcgtgagttgctttttgcggctggggaggtctacgcttctagagcttgagccagcggggcgaccctgcagtggcaggactcggcaccgcgccctccaccgccggttggtggcctgcgtgacagtttcctcccgtcgacatcgaaaggaagccggacgtgggcgggcagagagcttcatcgcagtaggaatggcagccccatctatgaaggaaagacaggtctgctggggggcccgggatgagtactggaagtgtttagatgagaacttagaggatgcttctcaatgcaagaagttaagaagctctttcgaatcaagttgtccccaacagtggataaaatattttgataaaagaagagactacttaaaattcaaagaaaaatttgaagcaggacaatttgagccttcagaaacaactgcaaaatcctaggctgttcataaagattgaaagtattctttctggacattgaaaaagctccactgactatggaacagtaatagtttgaatcatagtgaacatcaatacttgttccctatatacgacacttgataattaagatgatcaagaaccagaagatctgtgaagaaatgaaataaaatggtatttagtaagaaatctctattttaagaaaaaaagtaaaacctgttataaacacatgca

SEQ ID NO: 124251 - DNA, 697 bp, Homo sapiens
  Payload ID: 4395
  Gene Symbol: COA6
  Gene Name: cytochrome c oxidase assembly factor 6
  Uniprot ID: Q5JTJ3
  ENST ID: ENST00000619305
  CDS Start-End: 228-467
tggtagctcggaagggtcaaaagagtccgcggtttcgccgcgtgagttgctttttgcggctggggaggtctacgcttctagagcttgagccagcggggcgaccctgcagtggcaggactcggcaccgcgccctccaccgccggttggtggcctgcgtgacagtttcctcccgtcgacatcgaaaggaagccggacgtgggcgggcagagagcttcatcgcagtaggaatggcagccccatctatgaaggaaagacaggtctgctggggggcccgggatgagtactggaagtgtttagatgagaacttagaggatgcttctcaatgcaagaagttaagaagctctttcgaatcaagttgtccccaacagtggataaaatattttgataaaagaagagactacttaaaattcaaagaaaaatttgaagcaggacaatttgagccttcagaaacaactgcaaaatcctaggctgttcataaagattgaaagtattctttctggacattgaaaaagctccactgactatggaacagtaatagtttgaatcatagtgaacatcaatacttgttccctatatacgacacttgataattaagatgatcaagaaccagaagatctgtgaagaaatgaaataaaatggtatttagtaagaaatctctattttaagaaaaaaagtaaaacctgttataaacacatgc
